(19) United States
(12) Patent Application Publication
(10) Pub. No.: US 2024/0150829 A1
(43) Pub. Date: May 9, 2024

(54) SYSTEM AND METHODS OF DETECTION OF ONCRNAS FOR CANCER DIAGNOSIS

(71) Applicant: The Regents of the University of California, Oakland, CA (US)

(72) Inventor: Hani GOODARZI, San Francisco, CA (US)

(21) Appl. No.: 18/110,785

(22) Filed: Feb. 16, 2023

Related U.S. Application Data
(63) Continuation of application No. PCT/US2021/046186, filed on Aug. 16, 2021.
(60) Provisional application No. 63/066,269, filed on Aug. 16, 2020.

(51) Int. Cl. C12Q 1/6874; C12Q 1/48; C12Q 1/6806; C12Q 1/6844

(52) U.S. Cl. CPC C12Q 1/6874; C12Q 1/485; C12Q 1/6806; C12Q 1/6844; G01N 2333/9128

(57) ABSTRACT

The present disclosure relates generally to detection of non-coding RNA molecules in a sample or diagnosis of a subject based upon detection or quantification of non-coding RNA molecules in a sample of the subject, specifically to identify and use of molecular biomarkers for cancer diagnosis.

### CROSS-REFERENCE TO RELATED APPLICATIONS

[0001] The present application is a United States non-provisional continuing application filed under 35 U.S.C. § 111 and claiming priority to International Application No. PCT/US2021/046186, filed on Aug. 16, 2021, which claims priority to U.S. Provisional Patent Application No. 63/066,269, filed Aug. 16, 2020, the contents of each of which are hereby incorporated by reference in their entireties.

### SUBMISSION OF SEQUENCE LISTING

[0002] The Sequence Listing associated with this application is filed in electronic format via Patent Center and is hereby incorporated by reference into the specification in its entirety. The name of the text file containing the Sequence Listing is UCAL018USSeqListing.xml. The size of the text file is 16.2 MB and was created on Mar. 27, 2023.

### TECHNOLOGY FIELD

[0003] The present disclosure relates generally to detection of non-coding RNA molecules in a sample or diagnosis of a subject based upon detection or quantification of non-coding RNA molecules in a sample of the subject, specifically to identify and use of molecular biomarkers for cancer diagnosis.

### BACKGROUND

[0004] The widespread reprogramming of the gene expression landscape is a hallmark of cancer development. Thus, the systematic identification of regulatory pathways that drive pathologic gene expression patterns is a crucial step towards understanding and treating cancer. Over the years, a multitude of regulatory mechanisms have been implicated in oncogenic expression of genes involved in cancer cell differentiation, survival, invasion, and spread. While numerous studies have focused on the transcriptional pathways that underlie oncogenesis, post-transcriptional regulatory pathways have also emerged as major regulators of this process. For example, microRNAs (small non-coding RNAs), a subclass of small RNAs that function in gene silencing, were among the first characterized post-transcriptional regulators of breast cancer progression (1). RNA-binding proteins (RBPs) are also critical posttranscriptional regulators of gene expression, and several specific RBPs have been shown to affect oncogenesis and cancer progression (2-5). Recently, it was demonstrated that transfer RNAs (tRNAs, 6) and tRNA fragments (7), which are other classes of small non-coding RNAs, play a fundamental role in breast cancer progression.

[0005] Despite the diverse repertoire of regulatory mechanisms involved in cancers, a shared characteristic among them is that they co-opt and dys-regulate existing pathways within the cell. In other words, cancer cells adopt myriad strategies, such as somatic mutations (e.g. KRAS, 8), gene fusions (e.g. BCR-ABL, 9), epigenetic modifications (e.g. promoter hypermethylation, 10), and regulatory mechanisms disruptions (NFkB transcription factors, 10) to over-activate oncogenic and to down-regulate tumor suppressive pathways (11, 12). While these strategies rely on the pathologic modulation of regulatory programs that are already in place, there is an often-overlooked possibility that cancer cells may be capable of evolving or engineering specialized regulatory pathways that drive tumorigenesis.

### SUMMARY

[0006] Performing a systematic screen for small non-coding RNAs that are expressed by breast cancer but are absent from healthy normal, a set of 201 small non-coding RNAs were previously identified as being strongly associated with breast cancer but mostly undetectable in normal cells. Because these small non-coding RNA are cancer-associated but functionally unknown, they have been named “orphan non-coding RNAs” or “oncRNAs.” This prior finding and the applications of those oncRNAs in diagnosis and/or detection of breast cancer has been previously described in WO 2019/094780 published on May 16, 2019 and Fish et al., Nat. Med., 2018, 24:1743-1751, the content of each publication is incorporated herein by reference in its entirety.

[0007] The present disclosure provides novel small non-coding RNAs that serve as biomarkers which are indicative of various types of cancer, tissue of origin, and status of the cancer, and which may be used to accurately diagnose cancer in a subject even at an early stage. In some embodiments, the methods comprise detection of extracellular, circulating small non-coding RNAs in a suitable sample. In some embodiments, the sample is a human serum sample. In some embodiments, the sample is a fractionated human serum sample comprising exosomes that comprise small non-coding mRNA.

[0008] The disclosure relates to a method of diagnosing a subject with a benign, pre-malignant, or malignant hyperproliferative cell, said method comprising detecting the presence, absence, and/or quantity of at least one non-coding RNA or functional fragment thereof in a sample of the subject. In some embodiments, the step of detecting in the method of the disclosure is preceded by a step of acquiring the sample from the subject. In some embodiments, the step of detecting the presence, absence, and/or quantity of at least one non-coding RNA or functional fragment thereof in the sample comprises contacting the sample with one or a plurality of probes specific for the at least one non-coding RNA or functional fragment thereof, and normalizing the quantity in the sample with a measurement taken from a control sample.

[0009] In some embodiments, the disclosed method further comprises exposing the sample to at least one nucleic acid molecule complementary to one or a plurality of non-coding RNAs chosen from SEQ ID NO: 1 through SEQ ID NO: 1543, or one or a plurality of non-coding nucleic acid sequences that comprise at least about 70%, 80%, 85%, 90%, 95%, 96%, 97%, 98% or 99% sequence identity to any of nucleic acids chosen from SEQ ID NO: 1 through SEQ ID NO: 1543. In some embodiments, the disclosed method further comprises correlating the amount of the at least one non-coding RNA or functional fragment thereof in the sample to the probability or likelihood the subject has a benign, pre-malignant, or malignant hyperproliferative cell growth, relative to a measurement of the amount of the at least one non-coding RNA or functional fragment thereof in a control sample.

[0010] In some embodiments, the benign, pre-malignant, or malignant hyperproliferative cell diagnosed by the disclosed method is from a tissue chosen from: adrenal gland, bile ducts, bladder, blood, bone, bone marrow, brain, breast, cervix, colon, esophagus, eye, gall bladder, ganglia, gastrointestinal tract, heart, lymphatic system, liver, lung, kidney, muscle, ovary, pancreas, parathyroid, penis, prostate, prostate glands, rectum, salivary glands, skin, spine, stomach, spleen, testis, thymus, thyroid, or uterus. In some embodiments, the disclosed method diagnoses the presence of a pre-malignant or malignant hyperproliferative cell in the subject chosen from one or a plurality of basal or luminal cancers.

[0011] In some embodiments, the sample is blood or serum from the subject. In some embodiments, the sample is taken from a culture of cells seeded or inoculated by at least one cell from the subject. In some embodiments, the sample is taken from a culture of cells seeded or inoculated by at least one primary cell from the subject. In some embodiments, the sample is a human tissue sample comprising a tissue or liquid sample from a plasma, serum or blood draw, brushing, biopsy, or surgical resection of the subject. In some embodiments, the sample comprises a cell that is freshly obtained, formalin fixed, alcohol-fixed and/or paraffin embedded.

[0012] In some embodiments, the disclosed method further comprises culturing at least one biopsy from the subject with a culture medium under conditions and for a time period sufficient to grow at least one cell from the subject's tissue chosen from: adrenal gland, bile ducts, bladder, blood, bone, bone marrow, brain, breast, cervix, colon, esophagus, eye, gall bladder, ganglia, gastrointestinal tract, heart, lymphatic system, liver, lung, kidney, muscle, ovary, pancreas, parathyroid, penis, prostate, prostate glands, rectum, salivary glands, skin, spine, stomach, spleen, testis, thymus, thyroid, or uterus. In some embodiments, the sample is free of oncRNAs from breast cancer cells. In some embodiments, the subject is free of a hyperproliferative cell from the breast or has not been diagnosed with or treated for breast cancer.

[0013] In some embodiments, the step of measuring the quantity of the at least one non-coding RNA or functional fragment thereof in the sample in the disclosed method comprises one or a combination of: digitally imaging the sample, exposing the sample to a known amount of labeled antibody specific for an epitope of the at least one non-coding RNA or functional fragment thereof, exposing the sample to one or a plurality of dyes specific for the at least one non-coding RNA or functional fragment thereof, exposing the sample to at least one labeled probe comprising a nucleotide sequence complementary to a sequence of the at least one non-coding RNA or functional fragment thereof, exposing the sample to chromatography, isolating total RNA of the sample and exposing the total RNA to sequencing analysis and/or exposing the sample to mass spectrometry. In some embodiments, this step further comprises analyzing morphology of cells from the sample.

[0014] In some embodiments, the step of detecting the presence, absence, and/or quantity of the at least one non-coding RNA or functional fragment thereof in the sample of the disclosed method comprises using a chemoluminescent probe, fluorescent probe, and/or fluorescence microscopy. In some embodiments, this step of detecting further comprises contacting total RNA of the sample to at least one probe comprising s nucleotide sequence complementary to one or a plurality of non-coding RNAs chosen from SEQ ID NO: 1 through SEQ ID NO: 1543, or one or a plurality of non-coding nucleic acid sequences that comprise at least about 70%, 80%, 85%, 90%, 95%, 96%, 97%, 98% or 99% sequence identity to any of nucleic acids chosen from SEQ ID NO: 1 through SEQ ID NO: 1543.

[0015] The disclosure further relates to a method of detecting a cancer cell in a subject comprising detecting the presence, absence, and/or quantity of at least one non-coding RNA or functional fragment thereof in a sample by contacting the sample with one or a plurality of probes comprising nucleotide sequences complementary to the at least one non-coding RNA sequences. In some embodiments, the step of detecting is preceded by a step of obtaining the sample from the subject. In some embodiments, the disclosed method further comprises:
[0016] a) calculating one or more scores based upon the presence, absence, or quantity of the at least one non-coding RNA or functional fragment thereof; and
[0017] b) correlating the one or more scores to the presence, absence, or quantity of the at least one non-coding RNA or functional fragment thereof, such that, if the amount of the at least non-coding RNA or functional fragment thereof is greater than the quantity of the at least one non-coding RNA or functional fragment thereof in a control sample; or, if the amount of the at least one non-coding RNA or functional fragment thereof is substantially equal to the quantity of the at least one non-coding RNA or functional fragment thereof in a sample taken from a subject known to have cancer then the subject is diagnosed as having cancer.

[0018] In some embodiments, the at least one non-coding RNA or functional fragment thereof detected by the disclosed method comprises at least about 70%, 80%, 85%, 90%, 95%, 96%, 97%, 98%, 99% sequence identity to any of SEQ ID NO: 1 through SEQ ID NO: 1543. In some embodiments, the at least one non-coding RNA or functional fragment thereof detected by the disclosed method is chosen from SEQ ID NO: 1 through SEQ ID NO: 1543.

[0019] In some embodiments, the sample is a human tissue sample comprising a tissue from a serum or plasma or blood draw, brushing, biopsy, or surgical resection of a subject. In some embodiments, the sample comprises total RNA from a cell that is freshly obtained, formalin fixed, alcohol-fixed and/or paraffin embedded. In some embodiments, the sample is plasma, blood or serum. In some embodiments, the sample is free of whole cells. In some embodiments, the sample comprises exosome comprising oncRNAs, but free of whole cells.

[0020] In some embodiments, the step of quantifying at least one non-coding RNA or functional fragment thereof in the sample of the disclosed method comprises isolating total RNA from the sample.

[0021] The disclosure also relates to a method of diagnosing a subject with a cancer, comprising:
[0022] a) detecting the presence, absence, and/or quantity of at least one non-coding RNA or functional fragment thereof in a sample of the subject by contacting the sample with one or a plurality of probes specific for the at least one non-coding RNA or functional fragment thereof; and
[0023] b) diagnosing the subject as having the cancer if the presence or quantity of the at least one non-coding RNA or functional fragment thereof is detected in the sample.

[0024] In some embodiments, the step of detecting is preceded by a step of acquiring the sample from the subject. In some embodiments, step a) further comprises:
[0025] i) calculating one or more scores based upon the presence, absence, or quantity of the at least one non-coding RNA or functional fragment thereof; and
[0026] ii) correlating the one or more scores to the presence, absence, or quantity of the at least one non-coding RNA or functional fragment thereof, such that, if the amount of the at least one non-coding RNA or functional fragment thereof is greater than the quantity of the at least one non-coding RNA or functional fragment thereof in a control sample; or, if the amount of the at least one non-coding RNA or functional fragment thereof is substantially equal to the quantity of the at least one non-coding RNA or functional fragment thereof in a sample taken from a subject known to have a cancer, then the subject is diagnosed as having the cancer.

[0027] In some embodiments, the one or plurality of probes used in the disclosed method comprise nucleotide sequences complementary to one or a plurality of sequences chosen from SEQ ID NO: 1 through SEQ ID NO: 1543, or one or a plurality of sequences that comprise at least about 70%, 80%, 85%, 90%, 95%, 96%, 97%, 98% or 99% sequence identity to any of nucleic acids chosen from SEQ ID NO: 1 through SEQ ID NO: 1543.

[0028] In some embodiments, the disclosed method further comprises detecting the presence, absence or quantity of an antigen of said cancer. In some embodiments, the step of quantifying the at least one non-coding RNA or functional fragment thereof in the sample of the disclosed method comprises using a fluorescence and/or digital imaging.

[0029] In some embodiments, the sample is a human tissue sample comprising a cell or tissue from a plasma, serum or blood draw, brushing, biopsy, or surgical resection of the subject. In some embodiments, the sample comprises total RNA from a cell that is freshly obtained, formalin fixed, alcohol-fixed and/or paraffin embedded. In some embodiments, the sample is human serum.

[0030] The disclosure further relates to a method of treating a subject in need thereof diagnosed with or suspected of having a cancer, comprising:
[0031] a) contacting one or a plurality of probes specific for at least one non-coding RNA or functional fragment thereof with a sample from the subject;
[0032] b) quantifying the amount of the at least one non-coding RNA or functional fragment thereof in the sample;
[0033] c) calculating one or more scores based upon the presence, absence, or quantity of the at least one non-coding RNA or functional fragment thereof;
[0034] d) correlating the one or more scores to the presence, absence, or quantity of the at least one non-coding RNA or functional fragment thereof, such that, if the amount of the at least one non-coding RNA or functional fragment thereof is greater than the quantity of the at least one non-coding RNA or functional fragment thereof in a control sample; or, if the amount of the at least one non-coding RNA or functional fragment thereof is substantially equal to the quantity of the at least one non-coding RNA or functional fragment thereof in a sample taken from a subject known to have a cancer, then the subject is diagnosed as having the cancer, and
[0035] e) administering to the subject a therapeutically effective amount of treatment for the cancer.

[0036] In some embodiments, the one or plurality of probes used in the disclosed method comprise nucleotide sequences complementary to one or a plurality of sequences chosen from SEQ ID NO: 1 through SEQ ID NO: 1543, or one or a plurality of sequences that comprise at least about 70%, 80%, 85%, 90%, 95%, 96%, 97%, 98% or 99% sequence identity to any of nucleic acids chosen from SEQ ID NO: 1 through SEQ ID NO: 1543. In some embodiments, at least one substrate comprising a fluorophore, a chemiluminescent agent, and/or a quenching agent is used in the detecting step of the disclosed method.

[0037] In some embodiments, the subject of any of the disclosed methods is a human diagnosed with or suspected as having a cancer of adrenal gland, bile ducts, bladder, blood, bone, bone marrow, brain, breast, cervix, colon, esophagus, eye, gall bladder, ganglia, gastrointestinal tract, heart, lymphatic system, liver, lung, kidney, muscle, ovary, pancreas, parathyroid, penis, prostate, prostate glands, rectum, salivary glands, skin, spine, stomach, spleen, testis, thymus, thyroid, or uterus. In some embodiments, the subject is a human diagnosed with or suspected as having a cancer chosen from: adrenal cancer, bile duct cancer, blood cancer, brain cancer, breast cancer, bone cancer, bladder cancer, cervical cancer, colon cancer, esophageal cancer, gynecologic tumors, kidney cancer, liver cancer, lung cancer, lymphocytic lymphomas, ovarian cancer, pancreatic cancer, parathyroid cancer, prostate cancer, rectal cancer, skin cancer, stomach cancer, sarcomas of soft tissues, thyroid cancer, testicular cancer, uterine cancer, cancer of the eye, cancer of the head and neck, and neoplasms of the central nervous system. In some embodiments, the subject is a human diagnosed with or suspected as having a cancer chosen from any of the cancers listed in TABLE 1. In some embodiments, the subject is a human diagnosed with or suspected as having a cancer chosen from lung cancer, breast cancer, prostate cancer, colorectal cancer, pancreas cancer, liver cancer, and ovarian cancer.

[0038] The disclosure also relates to a system comprising:
[0039] a) one or a plurality of probes and/or stains that bind to at least one non-coding RNA or functional fragment thereof; and
[0040] b) one or more devices capable of quantifying the presence, absence and/or amount of the at least one probe or stain that binds the at least one non-coding RNA and/or functional fragment thereof.

[0041] The disclosure also relates to a system comprising:
[0042] a) a sample;
[0043] b) one or a plurality of probes and/or stains that bind to at least one non-coding RNA or functional fragment thereof; and
[0044] c) one or more devices capable of quantifying the presence, absence and/or amount of the at least one probe or stain that binds the at least one non-coding RNA and/or functional fragment thereof.

[0045] In some embodiments, the one or plurality of probes comprised in the disclosed system comprise nucleotide sequences complementary to one or a plurality of sequences chosen from SEQ ID NO: 1 through SEQ ID NO: 1543, or one or a plurality of sequences that comprise at least about 70%, 80%, 85%, 90%, 95%, 96%, 97%, 98% or 99% sequence identity to any of nucleic acids chosen from SEQ ID NO: 1 through SEQ ID NO: 1543. In some embodiments, the sample is taken from a subject identified as having or suspected of having a cancer of adrenal gland, bile ducts, bladder, blood, bone, bone marrow, brain, breast, cervix, colon, esophagus, eye, gall bladder, ganglia, gastrointestinal tract, heart, lymphatic system, liver, lung, kidney, muscle, ovary, pancreas, parathyroid, penis, prostate, prostate glands, rectum, salivary glands, skin, spine, stomach, spleen, testis, thymus, thyroid, or uterus. In some embodiments, the sample is taken from a subject identified as having or suspected of having a cancer chosen from: adrenal cancer, bile duct cancer, blood cancer, brain cancer, breast cancer, bone cancer, bladder cancer, cervical cancer, colon cancer, esophageal cancer, gynecologic tumors, kidney cancer, liver cancer, lung cancer, lymphocytic lymphomas, ovarian cancer, pancreatic cancer, parathyroid cancer, prostate cancer, rectal cancer, skin cancer, stomach cancer, sarcomas of soft tissues, thyroid cancer, testicular cancer, uterine cancer, cancer of the eye, cancer of the head and neck, and neoplasms of the central nervous system. In some embodiments, the sample is taken from a subject identified as having or suspected of having a cancer chosen from any of the cancers listed in TABLE 1. In some embodiments, the subject is a human diagnosed with or suspected as having a cancer chosen from lung cancer, breast cancer, prostate cancer, colorectal cancer, pancreas cancer, liver cancer, and ovarian cancer.

[0046] The disclosure additionally relates to a method for characterizing the stage of development or pathology of a sample comprising a hyperproliferative cell, said method comprising:
[0047] a) contacting a plurality of probes specific for at least one non-coding RNA or functional fragment thereof with the sample;
[0048] b) quantifying the amount of the at least one non-coding RNA or functional fragment thereof in the sample;
[0049] c) calculating one or more normalized scores based upon the presence, absence, or quantity of the at least one non-coding RNA or functional fragment thereof; and
[0050] d) correlating the one or more scores to the quantity of the at least one non-coding RNA or functional fragment thereof, such that if the amount of the at least one non-coding RNA or functional fragment thereof is greater than the quantity of the at least one non-coding RNA or functional fragment thereof in a control sample, the correlating step comprises characterizing the sample as comprising a hyperproliferative cell.

[0051] The disclosure further relates to a method of determining whether a subject has a malignant growth, said method comprising detecting the presence, absence, or quantity of at least one non-coding RNA or functional fragment thereof in a sample of the subject by contacting the sample with:
[0052] a) a probe specific for the at least one non-coding RNA or functional fragment thereof; or
[0053] b) a substrate specific for the at least one non-coding RNA or functional fragment thereof.

[0054] In some embodiments, the one or plurality of probes used in the disclosed methods comprise nucleotide sequences complementary to one or a plurality of sequences chosen from SEQ ID NO: 1 through SEQ ID NO: 1543, or one or a plurality of sequences that comprise at least about 70%, 80%, 85%, 90%, 95%, 96%, 97%, 98% or 99% sequence identity to any of nucleic acids chosen from SEQ ID NO: 1 through SEQ ID NO: 1543. In some embodiments, the sample used in the disclosed methods is taken from a subject identified as having or suspected of having a cancer of adrenal gland, bile ducts, bladder, blood, bone, bone marrow, brain, breast, cervix, colon, esophagus, eye, gall bladder, ganglia, gastrointestinal tract, heart, lymphatic system, liver, lung, kidney, muscle, ovary, pancreas, parathyroid, penis, prostate, prostate glands, rectum, salivary glands, skin, spine, stomach, spleen, testis, thymus, thyroid, or uterus. In some embodiments, the sample used in the disclosed methods is taken from a subject identified as having or suspected of having a cancer chosen from: adrenal cancer, bile duct cancer, blood cancer, brain cancer, breast cancer, bone cancer, bladder cancer, cervical cancer, colon cancer, esophageal cancer, gynecologic tumors, kidney cancer, liver cancer, lung cancer, lymphocytic lymphomas, ovarian cancer, pancreatic cancer, parathyroid cancer, prostate cancer, rectal cancer, skin cancer, stomach cancer, sarcomas of soft tissues, thyroid cancer, testicular cancer, uterine cancer, cancer of the eye, cancer of the head and neck, and neoplasms of the central nervous system.

[0055] The disclosure relates to a method of processing RNA from a sample of a subject comprising: (i) separating small noncoding RNA in the total RNA from total mRNA; and (ii) analyzing the small noncoding RNA. In some embodiments, the method of processing further comprises obtaining a sample from a subject. In some embodiments, the method of processing further comprises the step of isolating the total RNA in the sample from other component of the sample by centrifugation. In some embodiments, the step of separating the small non-encoding RNA from the sample comprise centrifugation of the sample and removal of whole cells from the sample. In some embodiments, the step of separating the small non-encoding RNA from the sample comprises removal of exosomes from whole blood of the subject, where the sample is whole blood. In some embodiments, the analysis step comprises detecting the presence, absence or quantity of oncRNAs in the sample. In some embodiments, the oncRNA is an RNA sequence corresponding to any one or plurality of oncRNAs chosen from Table 2. In some embodiments, the analysis step comprises detecting the presence, absence or quantity of oncRNAs in the sample. In some embodiments, the oncRNA is an RNA sequence corresponding to any one or plurality of oncRNAs chosen from SEQ ID NO: SEQ ID NO: 1544 through SEQ ID NO: 6834. In some embodiments, the method of detecting the presence or absence of oncRNA in a sample comprises sequencing the RNA from a pool of isolated small, noncoding RNA in a sample. In some embodiments, the step of detecting comprises amplifying the oncRNA or cDNA complement of oncRNA from a pool of isolated, small noncoding RNA in the sample. In some embodiments, the step of detecting comprises exposing a pool of isolated, small noncoding RNA to a probe or plurality of probes specific for an RNA sequence encoded by any of cDNA sequences SEQ ID NO:1 through SEQ ID NO: 1543 or the RNA sequences of Table 2. In some embodiments, the one or plurality of probes comprise one or a plurality of the DNA sequences of Table 2 or fragments thereof. In some embodiments, the probe or plurality of probes comprises a fluorescent label. In some embodiments, the detecting comprises amplifying the RNA or cDNA sequence of oncRNA by polymerase chain reaction (PCR). In some embodiments, the probes or primers for amplifying the RNA or cDNA sequences are nucleotide sequences that are from about 4 to about 100, 200, 300, or 400 nucleotides in length. In some embodiments, the probe or primers are one or a plurality of cDNAs chosen from SEQ ID NO: 6835 through SEQ ID NO:18676 or fragment thereof that are from about 4 to about 50 nucleotides in length nested within from SEQ ID NO: 6835 through SEQ ID NO:18676.

[0056] The disclosure also relates to a composition, including, for instance a kit, tube or system, comprising or consistently essentially of one or a plurality of cDNAs chosen from SEQ ID NO: 6835 through SEQ ID NO:18676. In some embodiments, the composition comprises a cDNA that has at least about 70%, 80%, 85%, 90%, 91%, 92%, 93%, 94%, 95%, 96%, 97%, 98%, 99% sequence identity to SEQ ID N: 6835 through SEQ ID NO: 18676. In some embodiments, the composition comprises one or a plurality of cDNA molecules labeled with a fluorescent moiety.

### BRIEF DESCRIPTION OF THE DRAWINGS

[0057] FIG. 1A and FIG. 1B depict confusion matrices of the gradient boosting classifier. The TCGA data was split into training and testing sets (80/20 split), and a gradient boosting classifier was trained using the identified oncRNAs as features on the training set. A confusion matrix was computed using the classifier predictions of the test set. The confusion matrix was then normalized by row (FIG. 1A) and by column (FIG. 1B) separately for visualization purposes.

[0058] FIG. 2 depicts a bar plot of number of oncRNAs present for each cancer type. The counts represent the number of oncRNAs identified that satisfied all the filtering conditions for each cancer.

[0059] FIG. 3A, FIG. 3B and FIG. 3C depict heatmaps of oncRNAs present within breast invasive carcinoma (FIG. 3A), colon adenocarcinoma (FIG. 3B) and lung adenocarcinoma (FIG. 3C). The heatmap was generated from RNA expression data (cpm) of the oncRNAs found within each of the cancer types and plotted with all the normal samples across all tissue types. Expression data were max normalized for visualization purposes.

### DETAILED DESCRIPTION

[0060] The disclosure provides novel, small non-coding RNAs that serve as biomarkers which are indicative of various types of cancers, and which may be used to accurately diagnose or grade cancer in a subject. In some embodiments, the methods entail detection of extracellular, circulating small RNAs in a suitable sample.

### Definitions

[0061] Before the present methods are described, it is to be understood that the present disclosure is not limited to the particular processes, compositions, or methodologies described, as these may vary. It is also to be understood that the terminology used in the description is for the purposes of describing the particular versions or embodiments only, and is not intended to limit the scope of the present disclosure. Unless defined otherwise, all technical and scientific terms used herein have the same meanings as commonly understood by one of ordinary skill in the art. For example, Singleton et al., Dictionary of Microbiology and Molecular Biology 2nd Ed., J. Wiley & Sons (New York, NY 1994), provide one skilled in the art with a general guide to many of the terms used in the present disclosure. Moreover, the practice of the present disclosure will employ, unless otherwise indicated, conventional techniques of molecular biology (including recombinant techniques), microbiology, cell biology, and biochemistry, which are within the skill of the art. Such techniques are explained fully in the literature, such as, “Molecular Cloning: A Laboratory Manual,” 2nd Ed. (Sambrook et al., 1989); “Oligonucleotide Synthesis” (M. J. Gait, Ed., 1984); “Animal Cell Culture” (R. I. Freshney, Ed., 1987); “Methods in Enzymology” (Academic Press, Inc.); “Handbook of Experimental Immunology,” 4th Ed. (D. M. Weir & C. C. Blackwell, Eds., Blackwell Science Inc., 1987); “Gene Transfer Vectors for Mammalian Cells” (J. M. Miller & M. P. Calos, Eds., 1987); “Current Protocols in Molecular Biology” (F. M. Ausubel et al., Eds., 1987); and “PCR: The Polymerase Chain Reaction,” (Mullis et al., Eds., 1994). Although any methods and materials similar or equivalent to those described herein can be used in the practice or testing of embodiments of the present disclosure, the methods, devices, and materials in some embodiments are now described. All publications mentioned herein are incorporated by reference in their entirety. Nothing herein is to be construed as an admission that the present disclosure is not entitled to antedate such disclosure by virtue of prior invention.

[0062] It must be noted that as used herein and in the appended claims, the singular forms “a,” “an,” and “the” include plural reference unless the context clearly dictates otherwise. Thus, for example, reference to a “peptide” is a reference to one or more peptides and equivalents thereof known to those skilled in the art, and so forth.

[0063] The term “about” or “approximately” is used herein to mean within the typical ranges of tolerances in the art. For example, “about” can be understood as about 2 standard deviations from the mean. According to certain embodiments, when referring to a measurable value such as an amount and the like, “about” is meant to encompass variations of ±20%, ±10%, ±5%, ±1%, ±0.9%, ±0.8%, ±0.7%, ±0.6%, ±0.5%, ±0.4%, ±0.3%, ±0.2% or ±0.1% from the specified value as such variations are appropriate to perform the disclosed methods. When “about” is present before a series of numbers or a range, it is understood that “about” can modify each of the numbers in the series or range.

[0064] The term “and/or” as used in a phrase such as “A and/or B” herein is intended to include both A and B; A or B; A (alone); and B (alone). Likewise, the term “and/or” as used in a phrase such as “A, B, and/or C” is intended to encompass each of the following embodiments: A, B, and C; A, B, or C; A or C; A or B; B or C; A and C; A and B; B and C; A (alone); B (alone); and C (alone).

[0065] The term “antibody” as used herein refers to an immunoglobulin molecule that recognizes and specifically binds a target, such as a protein, polypeptide, peptide, carbohydrate, polynucleotide, lipid, or combinations of the foregoing, through at least one antigen-binding site. As used herein, the term encompasses intact polyclonal antibodies, intact monoclonal antibodies, single chain antibodies, antibody fragments (such as Fab, Fab′, F(ab′)2, and Fv fragments), single chain Fv (scFv) antibodies, multispecific antibodies such as bispecific antibodies, monospecific antibodies, monovalent antibodies, chimeric antibodies, humanized antibodies, human antibodies, fusion proteins comprising an antigen-binding site of an antibody, and any other modified immunoglobulin molecule comprising an antigen-binding site as long as the antibodies exhibit the desired biological binding activity. An antibody can be any of the five major classes of immunoglobulins: IgA, IgD, IgE, IgG, and IgM, or subclasses (isotypes) thereof (e.g., IgG1, IgG2, IgG3, IgG4, IgA1, and IgA2), based on the identity of their heavy chain constant domains referred to as alpha, delta, epsilon, gamma, and mu, respectively. The different classes of immunoglobulins have different and well-known subunit structures and three-dimensional configurations. Antibodies can be naked or conjugated to other molecules, including but not limited to, toxins and radioisotopes.

[0066] The term “antibody fragment” refers to a portion of an intact antibody and refers to the antigenic determining variable regions of an intact antibody. Examples of antibody fragments include, but are not limited to, Fab, Fab′, F(ab′)2, and Fv fragments, linear antibodies, single chain antibodies, and multispecific antibodies formed from antibody fragments. “Antibody fragment” as used herein comprises at least one antigen-binding site or epitope-binding site. The term“variable region” of an antibody refers to the variable region of an antibody light chain, or the variable region of an antibody heavy chain, either alone or in combination. The variable region of a heavy chain or a light chain generally consists of four framework regions (FR) connected by three complementarity determining regions (CDRs), also known as“hypervariable regions.” The CDRs in each chain are held together in close proximity by the framework regions and contribute to the formation of the antigen-binding site(s) of the antibody. There are at least two techniques for determining CDRs: (1) an approach based on cross-species sequence variability (i.e., Kabat et al., 1991, Sequences of Proteins of Immunological Interest, 5th Edition, National Institutes of Health, Bethesda, MD), and (2) an approach based on crystallographic studies of antigen-antibody complexes (Al-Lazikani et al., 1997, J. Mol. Biol., 273:927-948). In addition, combinations of these two approaches are sometimes used in the art to determine CDRs.

[0067] The term “biomarker” as used herein refers to a biological molecule present in an individual at varying concentrations useful in predicting the cancer status of an individual. A biomarker may include but is not limited to, nucleic acids, proteins and variants and fragments thereof. A biomarker may be DNA comprising the entire or partial nucleic acid sequence encoding the biomarker, or the complement of such a sequence. Biomarker nucleic acids useful in the invention are considered to include both DNA and RNA comprising the entire or partial sequence of any of the nucleic acid sequences of interest. In some embodiments, the biomarker is an RNA within an exosome in a sample.

[0068] The term “bodily fluid” as used herein refers to a bodily fluid including blood (or a fraction of blood such as plasma or serum), lymph, mucus, tears, saliva, sweat, sputum, urine, semen, stool, cerebrospinal fluid (CSF), breast milk, and, ascites fluid. In some embodiments, the bodily fluid is blood. In some embodiments, the bodily fluid is a fraction of blood. In some embodiments, the bodily fluid is plasma. In some embodiments, the bodily fluid is serum. In some embodiments, the bodily fluid is urine.

[0069] The terms “cancer” and “cancerous” as used herein refer to or describe a physiological condition in mammals in which a population of cells are characterized by unregulated cell growth. Thus, the term “cancer” refers to a group of diseases involving abnormal cell growth with the potential to invade or spread to other parts of the body. Examples of cancer include, but not limited to, lung cancer, bone cancer, blood cancer, chronic myelomonocytic leukemia (CMML), bile duct cancer, cervical cancer, liver cancer, pancreatic cancer, skin cancer, cancer of the head and neck, cancer of the eye, cutaneous or intraocular melanoma, uterine cancer, ovarian cancer, rectal cancer, cancer of the anal region, stomach cancer, colon cancer, breast cancer, testicular cancer, gynecologic tumors (e.g., uterine sarcomas, carcinoma of the fallopian tubes, carcinoma of the endometrium, carcinoma of the cervix, carcinoma of the vagina or carcinoma of the vulva), Hodgkin's disease, cancer of the esophagus, cancer of the small intestine, cancer of the endocrine system (e.g., cancer of the thyroid, parathyroid or adrenal glands), sarcomas of soft tissues, cancer of the urethra, cancer of the penis, prostate cancer, chronic or acute leukemia, solid tumors of childhood, lymphocytic lymphomas, cancer of the bladder, cancer of the kidney or ureter (e.g., renal cell carcinoma, carcinoma of the renal pelvis), or neoplasms of the central nervous system (e.g., primary CNS lymphoma, spinal axis tumors, brain stem gliomas or pituitary adenomas).

[0070] As used herein, the term “characterizing cancer in a subject” refers to the identification of one or more properties of a cancer sample in a subject, including but not limited to, the presence of benign, pre-cancerous or cancerous tissue, the stage of the cancer, the type of the cancer, the tissue of origin of the cancer, and the subject's prognosis. Cancers may be characterized by the identification of the expression of one or more cancer marker genes, including but not limited to, the ncRNAs and/or oncRNAs disclosed herein. As used herein, the term “stage of cancer” refers to a qualitative or quantitative assessment of the level of advancement of a cancer. Criteria used to determine the stage of a cancer include, but are not limited to, the size of the tumor and the extent of metastases (e.g., localized or distant).

[0071] As used herein, the terms “complementary” or “complementarity” are used in reference to polynucleotides (i.e., a sequence of nucleotides) related by the base-pairing rules. For example, the sequence “5′-A-G-T-3′,” is complementary to the sequence “3′-T-C-A-5′.” Complementarity may be “partial,” in which only some of the nucleic acid bases are matched according to the base pairing rules. Alternatively, there may be “complete” or “total” complementarity between the nucleic acids. The degree of complementarity between nucleic acid strands has significant effects on the efficiency and strength of hybridization between nucleic acid strands. This is of particular importance in amplification reactions, as well as detection methods that depend upon binding between nucleic acids.

[0072] As used in the specification and in the claims, the term “comprising” can include the aspects “consisting of” and “consisting essentially of.” Comprising can also mean “including but not limited to.”

[0073] The term “correlate” or “correlating” as used herein refers to a statistical association between instances of two events, where events may include numbers, data sets, and the like. For example, when the events involve numbers, a positive correlation (also referred to herein as a “direct correlation”) means that as one increases, the other increases as well. A negative correlation (also referred to herein as an “inverse correlation”) means that as one increases, the other decreases. The present disclosure provides small non-coding RNAs, the levels of which are correlated with a particular outcome measure, such as between the level of a particular small non-coding RNA and the likelihood of developing a particular type of cancer. For example, the increased level of a small non-coding RNA may be negatively correlated with a likelihood of good clinical outcome for the patient. In this case, for example, the patient may have a decreased likelihood of long-term survival without recurrence of the cancer and/or a positive response to a chemotherapy, and the like. Such a negative correlation indicates that the patient likely has a poor prognosis or will respond poorly to a chemotherapy, and this may be demonstrated statistically in various ways, e.g., by a high hazard ratio.

[0074] As used herein, the terms “detect,” “detecting” or “detection” refer to either the general act of discovering or discerning or the specific observation of a composition. Detecting a composition may comprise determining the presence or absence of a composition. Detecting may comprise quantifying a composition. For example, detecting comprises determining the expression level of a composition. The composition may comprise a nucleic acid molecule. For example, the composition may comprise at least a portion of the ncRNAs and/or oncRNAs disclosed herein. Alternatively, or additionally, the composition may be a detectably labeled composition.

[0075] The term “diagnosed,” as used herein, refers to the recognition of a disease by the presence or detection of signs and symptoms, or genetic analysis, pathological analysis, histological analysis, and the like.

[0076] By “fragment” is meant a portion of a polypeptide or nucleic acid molecule. This portion contains, preferably, at least about 5%, 10%, 20%, 30%, 40%, 50%, 60%, 70%, 80%, 90%, 91%, 92%, 93%, 94%, 95%, 96%, 97%, 98% or about 99% of the entire length of the reference nucleic acid molecule or polypeptide. A fragment may contain about 5, 10, 20, 30, 40, 50, 60, 70, 80, 90, or 100, 200, 300, 400, 500, 600, 700, 800, 900, 1000 or more nucleotides or amino acids.

[0077] The terms “functional fragment” means any portion of a polypeptide or nucleic acid sequence from which the respective full-length polypeptide or nucleic acid relates, that portion is of a sufficient length and has a sufficient structure to confer a biological affect that is at least similar or substantially similar to the full-length polypeptide or nucleic acid upon which the fragment is based. In some embodiments, a functional fragment is a portion of a full-length or wild-type nucleic acid sequence that encodes any one of the nucleic acid sequences disclosed herein, and said portion encodes a polypeptide of a certain length and/or structure that is less than full-length but encodes a domain that still biologically functional as compared to the full-length or wild-type protein. In some embodiments, the functional fragment may have a reduced biological activity, about equivalent biological activity, or an enhanced biological activity as compared to the wild-type or full-length polypeptide sequence upon which the fragment is based. In some embodiments, the functional fragment is derived from the sequence of an organism, such as a human. In such embodiments, the functional fragment may retain 99%, 98%, 97%, 96%, 95%, 94%, 93%, 92%, 91%, or 90% sequence identity to the wild-type human sequence upon which the sequence is derived. In some embodiments, the functional fragment may retain 85%, 80%, 75%, 70%, 65%, or 60% sequence identity to the wild-type sequence upon which the sequence is derived.

[0078] The term “gene” refers to a nucleic acid (e.g., DNA) sequence that comprises coding sequences necessary for the production of a polypeptide, precursor, or RNA (e.g., rRNA, tRNA). The polypeptide or RNA can be encoded by a full-length coding sequence or by any portion of the coding sequence so long as the desired activity or functional properties (e.g., enzymatic activity, ligand binding, signal transduction, immunogenicity, etc.) of the full-length or fragments are retained. In some embodiments, the cells or sample of the subject comprise a hyperproliferative cell that expresses and/or secretes an oncRNA that is not present in the genome of a noncancerous cell. The term also encompasses the coding region of a structural gene and the sequences located adjacent to the coding region on both the 5′ and 3′ ends for a distance of about 1 kb or more on either end such that the gene corresponds to the length of the full-length mRNA. Sequences located 5′ of the coding region and present on the mRNA are referred to as 5′ non-translated sequences. Sequences located 3′ or downstream of the coding region and present on the mRNA are referred to as 3′ non-translated sequences. The term “gene” encompasses both cDNA and genomic forms of a gene. A genomic form or clone of a gene contains the coding region interrupted with non-coding sequences termed “introns” or “intervening regions” or “intervening sequences.” Introns are segments of a gene that are transcribed into nuclear RNA (hnRNA); introns may contain regulatory elements such as enhancers. Introns are removed or “spliced out” from the nuclear or primary transcript; introns therefore are absent in the messenger RNA (mRNA) transcript. The mRNA functions during translation to specify the sequence or order of amino acids in a nascent polypeptide.

[0079] The term “hybridization” or “hybridizes” as used herein refers to the formation of a duplex between nucleotide sequences that are sufficiently complementary to form duplexes via Watson-Crick base pairing. Two nucleotide sequences are “complementary” to one another when those molecules share base pair organization homology. “Complementary” nucleotide sequences will combine with specificity to form a stable duplex under appropriate hybridization conditions. For instance, two sequences are complementary when a section of a first sequence can bind to a section of a second sequence in an anti-parallel sense wherein the 3′-end of each sequence binds to the 5′-end of the other sequence and each A, T(U), G and C of one sequence is then aligned with a T(U), A, C and G, respectively, of the other sequence. RNA sequences can also include complementary G=U or U=G base pairs. Thus, two sequences need not have perfect homology to be “complementary.” Usually two sequences are sufficiently complementary when at least about 90% (preferably at least about 95%) of the nucleotides share base pair organization over a defined length of the molecule. In the present disclosure, the capture domain of each spatial index primer comprises a region of complementarity for the nucleic acid, e.g. RNA (preferably mRNA) of the tissue sample. In some embodiments, such a region of complementarity comprised in the capture domain of each spatial index primer comprises a polythymidine sequence to capture mRNA via the poly-A tail.

[0080] The term “hyperproliferative cell” refers to a cell located in a tissue or organ having or exhibiting a “hyperproliferative disorder,” a disease or disorder characterized by abnormal proliferation, abnormal growth, abnormal senescence, abnormal quiescence, or abnormal removal of cells in an organism, and includes all forms of hyperplasias, neoplasias, and cancer. In some embodiments, a hyperproliferative cell comprises at least one or a plurality of genetic mutations that confer a co-opt or dys-regulation event of existing growth regulatory pathways within the cell. In some embodiments, the hyperproliferative cells cancer cells adopt one or a plurality of myriad strategies, such as somatic mutations, gene fusions, epigenetic modifications, and regulatory mechanism disruptions to over-activate oncogenic and to down-regulate tumor suppressive pathways. In some embodiments, the hyperproliferative disease is a cancer derived from the gastrointestinal tract or urinary system. In some embodiments, a hyperproliferative disease is a cancer of the adrenal gland, bile ducts, bladder, blood, bone, bone marrow, brain, breast, cervix, colon, esophagus, eye, gall bladder, ganglia, gastrointestinal tract, heart, lymphatic system, liver, lung, kidney, muscle, ovary, pancreas, parathyroid, penis, prostate, prostate glands, rectum, salivary glands, skin, spine, stomach, spleen, testis, thymus, thyroid, or uterus. In some embodiments, the term hyperproliferative disease is a cancer chosen from: lung cancer, bone cancer, blood cancer, chronic myelomonocytic leukemia (CMML), bile duct cancer, cervical cancer, liver cancer, pancreatic cancer, skin cancer, cancer of the head and neck, cancer of the eye, cutaneous or intraocular melanoma, uterine cancer, ovarian cancer, rectal cancer, cancer of the anal region, stomach cancer, colon cancer, breast cancer, testicular cancer, gynecologic tumors (e.g., uterine sarcomas, carcinoma of the fallopian tubes, carcinoma of the endometrium, carcinoma of the cervix, carcinoma of the vagina or carcinoma of the vulva), Hodgkin's disease, cancer of the esophagus, cancer of the small intestine, cancer of the endocrine system (e.g., cancer of the thyroid, parathyroid or adrenal glands), sarcomas of soft tissues, cancer of the urethra, cancer of the penis, prostate cancer, chronic or acute leukemia, solid tumors of childhood, lymphocytic lymphomas, cancer of the bladder, cancer of the kidney or ureter (e.g., renal cell carcinoma, carcinoma of the renal pelvis), or neoplasms of the central nervous system (e.g., primary CNS lymphoma, spinal axis tumors, brain stem gliomas or pituitary adenomas).

[0081] As used herein, the phrase “in need thereof” means that the animal or mammal has been identified or suspected as having a need for the particular method or treatment. In some embodiments, the identification can be by any means of diagnosis or observation. In any of the methods and treatments described herein, the animal or mammal can be in need thereof.

[0082] The term “label” as used herein refers to any atom or molecule that can be used to provide a detectable (preferably quantifiable) effect, and that can be attached to a nucleic acid or protein. Labels include but are not limited to dyes; radiolabels such as 2P; binding moieties such as biotin; haptens such as digoxigenin; luminogenic, phosphorescent or fluorogenic moieties; and fluorescent dyes alone or in combination with moieties that can suppress or shift emission spectra by fluorescence resonance energy transfer (FRET). Labels may provide signals detectable by fluorescence, radioactivity, colorimetry, gravimetry, X-ray diffraction or absorption, magnetism, enzymatic activity, and the like. A label may be a charged moiety (positive or negative charge) or alternatively, may be charge neutral. Labels can include or consist of nucleic acid or protein sequence, so long as the sequence comprising the label is detectable. In some embodiments, nucleic acids are detected directly without a label (e.g., directly reading a sequence).

[0083] The term “level” as used herein refers to qualitative or quantitative determination of the number of copies of a non-coding RNA transcript. An RNA transcript exhibits an “increased level” when the level of the RNA transcript is higher in a first sample, such as in a clinically relevant subpopulation of patients (e.g., patients who have cancer), than in a second sample, such as in a related subpopulation (e.g., patients who do not have cancer). In the context of an analysis of a level of an RNA transcript in a tumor sample obtained from an individual patient, an RNA transcript exhibits “increased level” when the level of the RNA transcript in the subject trends toward, or more closely approximates, the level characteristic of a clinically relevant subpopulation of patients.

[0084] The term “metastasis” as used herein refers to the process by which a cancer spreads or transfers from the site of origin to other regions of the body with the development of a similar cancerous lesion at a new location. A “metastatic” or “metastasizing” cell is one that loses adhesive contacts with neighboring cells and migrates (e.g., via the bloodstream or lymph) from the primary site of disease to secondary sites.

[0085] The term “monoclonal antibody” as used herein refers to a homogeneous antibody population involved in the highly specific recognition and binding of a single antigenic determinant or epitope. This is in contrast to polyclonal antibodies that typically include a mixture of different antibodies directed against a variety of different antigenic determinants. The term “monoclonal antibody” encompasses both intact and full-length monoclonal antibodies as well as antibody fragments (e.g., Fab, Fab′, F(ab′)2, Fv), single chain (scFv) antibodies, fusion proteins comprising an antibody portion, and any other modified immunoglobulin molecule comprising an antigen-binding site. Furthermore, “monoclonal antibody” refers to such antibodies made by any number of techniques, including but not limited to, hybridoma production, phage selection, recombinant expression, and transgenic animals.

[0086] The term “normalized” as used herein with regard to non-coding RNA transcript, refers to the level of the RNA transcript, relative to the mean levels of a set or control set of reference RNA transcripts. The reference RNA transcripts are based on their minimal variation across patients, tissues, or treatments. Alternatively, the non-coding RNA transcript may be normalized to the totality of tested RNA transcripts, or a subset of such tested RNA transcripts.

[0087] The term “oligonucleotide” as used herein refers to a short length of single-stranded polynucleotide chain. Oligonucleotides are typically less than 200 residues long (e.g., between 15 and 100); however, as used herein, the term is also intended to encompass longer polynucleotide chains. Oligonucleotides are often referred to by their length. For example, a 24 residue oligonucleotide is referred to as a “24-mer.” Oligonucleotides can form secondary and tertiary structures by self-hybridizing or by hybridizing to other polynucleotides. Such structures can include, but are not limited to, duplexes, hairpins, cruciforms, bends, and triplexes.

[0088] The word “or” as used herein means any one member of a particular list and also includes any combination of members of that list.

[0089] As used herein, the term “patient” refers to a subject afflicted with a disease or disorder. The term “patient” includes human and veterinary subjects. In some embodiments, the “patient” has been diagnosed with or suspected as having a cancer. In some embodiments, the “patient” has been diagnosed with a need for cancer treatment. In some embodiments, the “patient” has not been diagnosed with or is not suspected of having breast cancer.

[0090] A “patient response” may be assessed using any endpoint indicating a benefit to the patient, including, without limitation, (1) inhibition, to some extent, of tumor growth, including slowing down and complete growth arrest; (2) reduction in the number of tumor cells; (3) reduction in tumor size; (4) inhibition (i.e., reduction, slowing down or complete stopping) of tumor cell infiltration into adjacent peripheral organs and/or tissues; (5) inhibition (i.e. reduction, slowing down or complete stopping) of metastasis; (6) enhancement of anti-tumor immune response, which may, but does not have to, result in the regression or rejection of the tumor; (7) relief, to some extent, of one or more symptoms associated with the cancer, (8) increase in the length of survival following treatment; and/or (9) decreased mortality at a given point of time following treatment.

[0091] The terms “percent identity” or “percent homology” of two polynucleotide or two polypeptide sequences is determined by comparing the sequences using the GAP computer program (a part of the GCG Wisconsin Package, version 10.3 (Accelrys, San Diego, Calif.)) using its default parameters. “Identical” or “identity” as used herein in the context of two or more nucleic acids or amino acid sequences, may mean that the sequences have a specified percentage of residues that are the same over a specified region. The percentage may be calculated by optimally aligning the two sequences, comparing the two sequences over the specified region, determining the number of positions at which the identical residue occurs in both sequences to yield the number of matched positions, dividing the number of matched positions by the total number of positions in the specified region, and multiplying the result by 100 to yield the percentage of sequence identity. In cases where the two sequences are of different lengths or the alignment produces one or more staggered ends and the specified region of comparison includes only a single sequence, the residues of single sequence are included in the denominator but not the numerator of the calculation. When comparing DNA and RNA, thymine (T) and uracil (U) may be considered equivalent. Identity may be performed manually or by using a computer sequence algorithm such as BLAST or BLAST 2.0. Briefly, the BLAST algorithm, which stands for Basic Local Alignment Search Tool is suitable for determining sequence similarity. Software for performing BLAST analyses is publicly available through the National Center for Biotechnology Information (ncbi.nlm.nih.gov). This algorithm involves first identifying high scoring sequence pair (HSPs) by identifying short words of length Win the query sequence that either match or satisfy some positive-valued threshold score T when aligned with a word of the same length in a database sequence. T is referred to as the neighborhood word score threshold (Altschul et al.). These initial neighborhood word hits act as seeds for initiating searches to find HSPs containing them. The word hits are extended in both directions along each sequence for as far as the cumulative alignment score can be increased. Extension for the word hits in each direction are halted when: 1) the cumulative alignment score falls off by the quantity X from its maximum achieved value; 2) the cumulative score goes to zero or below, due to the accumulation of one or more negative-scoring residue alignments; or 3) the end of either sequence is reached. The Blast algorithm parameters W, T and X determine the sensitivity and speed of the alignment. The Blast program uses as defaults a word length (W) of 11, the BLOSUM62 scoring matrix (see Henikoff et al., Proc. Natl. Acad. Sci. USA, 1992, 89, 10915-10919, which is incorporated herein by reference in its entirety) alignments (B) of 50, expectation (E) of 10, M=5, N=4, and a comparison of both strands. The BLAST algorithm (Karlin et al., Proc. Natl. Acad. Sci. USA, 1993, 90, 5873-5787, which is incorporated herein by reference in its entirety) and Gapped BLAST perform a statistical analysis of the similarity between two sequences. One measure of similarity provided by the BLAST algorithm is the smallest sum probability (P(N)), which provides an indication of the probability by which a match between two nucleotide sequences would occur by chance. For example, a nucleic acid is considered similar to another if the smallest sum probability in comparison of the test nucleic acid to the other nucleic acid is less than about 1, less than about 0.1, less than about 0.01, and less than about 0.001. Two single-stranded polynucleotides are “the complement” of each other if their sequences can be aligned in an anti-parallel orientation such that every nucleotide in one polynucleotide is opposite its complementary nucleotide in the other polynucleotide, without the introduction of gaps, and without unpaired nucleotides at the 5′ or the 3′ end of either sequence. A polynucleotide is “complementary” to another polynucleotide if the two polynucleotides can hybridize to one another under moderately stringent conditions. Thus, a polynucleotide can be complementary to another polynucleotide without being its complement.

[0092] The terms “polynucleotide” and “nucleic acid” and “nucleic acid molecule” are used interchangeably herein and refer to polymers of nucleotides of any length, and include DNA and RNA. The polynucleotides can be deoxyribonucleotides, ribonucleotides, modified nucleotides or bases, and/or their analogs, or any substrate that can be incorporated into a polymer by DNA or RNA polymerase.

[0093] The terms “polypeptide” and “peptide” and “protein” are used interchangeably herein and refer to polymers of amino acids of any length. The polymer may be linear or branched, it may comprise modified amino acids, and it may be interrupted by non-amino acids. The terms also encompass an amino acid polymer that has been modified naturally or by intervention; for example, disulfide bond formation, glycosylation, lipidation, acetylation, phosphorylation, or any other manipulation or modification, such as conjugation with a labeling component. Also included within the definition are, for example, polypeptides containing one or more analogs of an amino acid (including, for example, unnatural amino acids), as well as other modifications known in the art. It is understood that, because the polypeptides of this disclosure may be based upon antibodies or fusion proteins, in certain embodiments, the polypeptides can occur as single chains or associated chains (e.g., dimers).

[0094] The term “prognosis” as used herein refers to the prediction of the likelihood of cancer-attributable death or progression, including recurrence, metastatic spread, and drug resistance, of neoplastic disease, such as breast cancer.

[0095] The term “reference” RNA transcript as used herein refers to an RNA transcript whose level can be used to compare the level of an RNA transcript in a test sample. In some embodiments, reference RNA transcripts include housekeeping genes, such as beta-globin, alcohol dehydrogenase, or any other RNA transcript, the level or expression of which does not vary depending on the disease status of the cell containing the RNA transcript. In another embodiments, all of the assayed RNA transcripts, or a subset thereof, may serve as reference RNA transcripts.

[0096] The term “salt” refers to acidic salts formed with inorganic and/or organic acids, as well as basic salts formed with inorganic and/or organic bases. Examples of these acids and bases are well known to those of ordinary skill in the art. Such acid addition salts will normally be pharmaceutically acceptable although salts of non-pharmaceutically acceptable acids may be of utility in the preparation and purification of the compound in question. Acid addition salts of the compounds of the disclosure are most suitably formed from pharmaceutically acceptable acids, and include for example those formed with inorganic acids e.g. hydrochloric, hydrobromic, sulphuric or phosphoric acids and organic acids e.g. succinic, maleic, acetic or fumaric acid. Other non-pharmaceutically acceptable salts e.g. oxalates can be used for example in the isolation of the compounds of the disclosure, for laboratory use, or for subsequent conversion to a pharmaceutically acceptable acid addition salt. Also included within the scope of the disclosure are solvates and hydrates. In vivo hydrolyzable esters or amides of certain compounds of the disclosure can be formed by treating those compounds having a free hydroxy or amino functionality with the acid chloride of the desired ester in the presence of a base in an inert solvent such as methylene chloride or chloroform. Suitable bases include triethylamine or pyridine. Conversely, compounds of the disclosure having a free carboxy group can be esterified using standard conditions which can include activation followed by treatment with the desired alcohol in the presence of a suitable base. Examples of pharmaceutically acceptable addition salts include, without limitation, the non-toxic inorganic and organic acid addition salts such as the hydrochloride derived from hydrochloric acid, the hydrobromide derived from hydrobromic acid, the nitrate derived from nitric acid, the perchlorate derived from perchloric acid, the phosphate derived from phosphoric acid, the sulphate derived from sulphuric acid, the formate derived from formic acid, the acetate derived from acetic acid, the aconite derived from aconitic acid, the ascorbate derived from ascorbic acid, the benzenesulphonate derived from benzenesulphonic acid, the benzoate derived from benzoic acid, the cinnamate derived from cinnamic acid, the citrate derived from citric acid, the embonate derived from embonic acid, the enanthate derived from enanthic acid, the fumarate derived from fumaric acid, the glutamate derived from glutamic acid, the glycolate derived from glycolic acid, the lactate derived from lactic acid, the maleate derived from maleic acid, the malonate derived from malonic acid, the mandelate derived from mandelic acid, the methanesulphonate derived from methane sulphonic acid, the naphthalene-2-sulphonate derived from naphtalene-2-sulphonic acid, the phthalate derived from phthalic acid, the salicylate derived from salicylic acid, the sorbate derived from sorbic acid, the stearate derived from stearic acid, the succinate derived from succinic acid, the tartrate derived from tartaric acid, the toluene-p-sulphonate derived from p-toluene sulphonic acid, and the like. In some embodiments, the salts are sodium, lysine and arginine salts of the compounds of the disclosure. Such salts can be formed by procedures well known and described in the art.

[0097] Other acids such as oxalic acid, which cannot be considered pharmaceutically acceptable, can be useful in the preparation of salts useful as intermediates in obtaining a chemical compound of the disclosure and its pharmaceutically acceptable acid addition salt. Metal salts of a chemical compound of the disclosure include alkali metal salts, such as the sodium salt of a chemical compound of the disclosure containing a carboxy group. Mixtures of isomers obtainable according to the disclosure can be separated in a manner known per se into the individual isomers; diastereoisomers can be separated, for example, by partitioning between polyphasic solvent mixtures, recrystallization and/or chromatographic separation, for example over silica gel or by, e.g., medium pressure liquid chromatography over a reversed phase column, and racemates can be separated, for example, by the formation of salts with optically pure salt-forming reagents and separation of the mixture of diastereoisomers so obtainable, for example by means of fractional crystallization, or by chromatography over optically active column materials.

[0098] As used herein, the term “sample” refers to a biological sample obtained or derived from a source of interest, as described herein. In some embodiments, a source of interest comprises an organism, such as an animal or human. In some embodiments, a biological sample comprises biological tissue or fluid. In some embodiments, a biological sample may be or comprise bone marrow, blood, blood cells, ascites, tissue or fine needle biopsy samples, cell-containing body fluids, free floating nucleic acids, sputum, saliva, urine, cerebrospinal fluid, peritoneal fluid, pleural fluid, feces, lymph, gynecological fluids, skin swabs, vaginal swabs, oral swabs, nasal swabs, washings or lavages such as a ductal lavages or broncheoalveolar lavages, aspirates, scrapings, bone marrow specimens, tissue biopsy specimens, surgical specimens, feces, other body fluids, secretions and/or excretions, and/or cells therefrom, etc. In some embodiments, a biological sample is or comprises cells obtained from an individual. In some embodiments, the sample comprises an exosome or oncRNA sequences disclosed herein (or fragments thereof—such as nucleic acid sequences that have from about 75% to about 99% sequence identity to nucleic acid sequences identified in TABLE 1). In some embodiments, the sample comprises an exosome or oncRNA sequences within an exosome or plurality of exosomes, optionally in serum or blood, wherein the sequences comprise one or a plurality of sequences chosen from TABLE 2. the sample comprises an exosome or oncRNA sequences within an exosome or plurality of exosomes, optionally in serum or blood, wherein the sequence comprise one or a plurality of sequences that are fragments have from about 75% to about 99% sequence identity to nucleic acid sequences identified in TABLE 2. In some embodiments, the oncRNA sequences are disassociated from a whole cell. In some embodiments, the sample comprises an exosome and/or nucleic acid sequences disassociated from a whole cell and the sample is free of whole cells. In some embodiments, a sample is a “primary sample” obtained directly from a source of interest by any appropriate means. For example, in some embodiments, a primary biological sample is obtained by methods selected from the group consisting of biopsy (e.g., fine needle aspiration or tissue biopsy), surgery, collection of body fluid (e.g., blood, lymph, feces etc.), etc. In some embodiments, as will be clear from context, the term “sample” refers to a preparation that is obtained by processing (e.g., by removing one or more components of and/or by adding one or more agents to) a primary sample. For example, filtering using a semi-permeable membrane. Such a “processed sample” may comprise, for example nucleic acids or proteins extracted from a sample or obtained by subjecting a primary sample to techniques such as amplification or reverse transcription of mRNA, isolation and/or purification of certain components, etc. In some embodiments, the “sample” is a sample containing circulating small non-coding RNAs. In some embodiments, the sample is a processed sample that has been passed through a filter, or is centrifuged and resuspended to remove whole cells.

[0099] A “score” is a numerical value that may be assigned or generated after normalization of the value based upon the presence, absence, or quantity of one or a plurality of non-coding RNAs in a subject. In some embodiments, the score is normalized in respect to a control data value. In some embodiments, the control dataset is a negative control dataset.

[0100] The term “small non-coding RNA” or “small ncRNA” (sRNA) as used herein, refers to RNA that is not translated into protein and includes transfer RNA (tRNA), ribosomal RNA (rRNA), small nucleolar RNA (snoRNA), microRNA (miRNA), small interfering RNA (siRNA), small nuclear (snRNA), Y RNA, vault RNA, antisense RNA, transcription initiation RNA (tiRNA), transcriptional start-site associated RNA (TSSa-RNA) and piwi interacting RNA (piRNA). Small ncRNAs are generally 18 to 200 nucleotides in length. In some embodiments, a small ncRNA as used herein is between 50 and 100 nucleotides. A ncRNA may be of endogenous origin (e.g., a human small non-coding RNA) or exogenous origin (e.g., virus, bacteria, parasite). “Canonical” ncRNA refers to the sequence of the RNA as predicted from the genome sequence and is the most abundant sequence identified for a particular RNA. “Trimmed” ncRNA refers to an ncRNA in which exonuclease-mediated nucleotide trimming has removed one or more nucleotides at the 5′ and/or 3′ end of the molecule. “Extended ncRNA” refers to an small non-coding RNA that is longer than the canonical small non-coding RNA sequence and is a term recognized in the art. “Orphan ncRNA” or “oncRNA” refers to a small ncRNA that is cancer-specific with unknown function. The nucleotides making up the extension correspond to nucleotides of the precursor sequence and are therefore encoded by the genome in contrast to non-templated nucleotide addition. In some embodiments, any of the methods disclosed herein comprise detecting any one or a combination of small ncRNAs disclosed above.

[0101] The term “stringency” is used in reference to the conditions of temperature, ionic strength, and the presence of other compounds such as organic solvents, under which nucleic acid hybridizations are conducted. Under “low stringency conditions,” a nucleic acid sequence of interest will hybridize to its exact complement, sequences with single base mismatches, closely related sequences (e.g., sequences with 90% or greater identity), and sequences having only partial identity (e.g., sequences with 50-90% identity). Under “medium stringency conditions,” a nucleic acid sequence of interest will hybridize only to its exact complement, sequences with single base mismatches, and closely relation sequences (e.g., 90% or greater identity). Under “high stringency conditions,” a nucleic acid sequence of interest will hybridize only to its exact complement, and (depending on conditions such a temperature) sequences with single base mismatches. In other words, under conditions of high stringency, the temperature can be raised so as to exclude hybridization to sequences with single base mismatches. Thus, the term “high stringency” as used herein refers to conditions that: (1) employ low ionic strength and high temperature for washing, for example 15 mM sodium chloride/1.5 mM sodium citrate/0.1% sodium dodecyl sulfate at 50° C.; (2) employ during hybridization a denaturing agent, such as formamide, for example, 50% (v/v) formamide with 0.1% bovine serum albumin/0.1% Ficoll/0.1% polyvinylpyrrolidone/50 mM sodium phosphate buffer at pH 6.5 in 5×SSC (0.75M NaCl, 75 mM sodium citrate) at 42° C.; or (3) employ during hybridization 50% formamide in 5×SSC, 50 mM sodium phosphate (pH 6.8), 0.1% sodium pyrophosphate, 5×Denhardt's solution, sonicated salmon sperm DNA (50 μg/ml), 0.1% SDS, and 10% dextran sulfate at 42° C., with washes at 42° C. in 0.2×SSC and 50% formamide, followed by a wash consisting of 0.1×SSC containing EDTA at 55° C.

[0102] The term “subject” used herein refers to a vertebrate, such as a mammal, a fish, a bird, a reptile, or an amphibian. The term “subject” also includes domesticated animals (e.g., cats, dogs, etc.), livestock (e.g., cattle, horses, pigs, sheep, goats, etc.), and laboratory animals (e.g., mouse, rabbit, rat, guinea pig, fruit fly, etc.). In one aspect, a subject is a mammal. In another aspect, a subject is a human. The term does not denote a particular age or sex. Thus, adult, child and adolescent, whether male or female, are intended to be covered. In some embodiments, the subject is any organisms that are screened using the diagnostic methods described herein. In some embodiments, the subject is a human diagnosed with or suspected as having a cancer. In some embodiments, the subject is a human in need of treatment for an underlying disease or disorder, such as but not limited to cancer.

[0103] By “substantially identical” is meant a nucleic acid molecule (or polypeptide) comprises at least about 50% sequence identity to a reference nucleic acid sequence (for example, any one of the nucleic acid sequences described herein) or amino acid sequence. In some embodiments, such a sequence is at least about 60%, 70%, 80%, 85%, 90%, 95% or even 99% identical at the nucleic acid level or amino acid level to the reference sequence used for comparison.

[0104] The term “therapeutically effective amount” means a quantity sufficient to achieve a desired therapeutic effect, for example, an amount which results in the prevention or amelioration of or a decrease in the symptoms associated with a disease that is being treated, e.g., disorders associated with cancer growth or a hyperproliferative disorder. The amount of compound administered to the subject will depend on the type and severity of the disease and on the characteristics of the individual, such as general health, age, sex, body weight and tolerance to drugs. It will also depend on the degree, severity and type of disease. The skilled artisan will be able to determine appropriate dosages depending on these and other factors. The regimen of administration can affect what constitutes an effective amount. Further, several divided dosages, as well as staggered dosages, can be administered daily or sequentially, or the dose can be continuously infused, or can be a bolus injection. Further, the dosages of the compound(s) of the disclosure can be proportionally increased or decreased as indicated by the exigencies of the therapeutic or prophylactic situation. Typically, an effective amount of the compounds of the present disclosure, sufficient for achieving a therapeutic effect, range from about 0.000001 mg per kilogram body weight per day to about 10,000 mg per kilogram body weight per day. Preferably, the dosage ranges are from about 0.0001 mg per kilogram body weight per day to about 100 mg per kilogram body weight per day. The compounds disclosed herein can also be administered in combination with each other, or with one or more additional therapeutic compounds.

[0105] The terms “treatment” or “treating” as used herein is an approach for obtaining beneficial or desired results including clinical results for the subject. For purposes herein, beneficial or desired clinical results include, but are not limited to, one or more of the following: (1) preventing or delaying the appearance of clinical symptoms of the state, disorder, or condition developing in a person who may be afflicted with or predisposed to the state, disorder or condition but does not yet experience or display clinical symptoms of the state, disorder or condition; (2) inhibiting the state, disorder or condition, i.e., arresting, reducing or delaying the development of the disease or a relapse thereof (in case of maintenance treatment) or at least one clinical symptom, sign, or test, thereof; or (3) relieving the disease, i.e., causing regression of the state, disorder or condition or at least one of its clinical or sub-clinical symptoms or signs. In some embodiments, a subject is successfully “treated” according to the methods of the present disclosure if the patient shows one or more of the following: a reduction in the number of and/or complete absence of cancer cells; a reduction in the tumor size; an inhibition of tumor growth; inhibition of and/or an absence of cancer cell infiltration into peripheral organs including the spread of cancer cells into soft tissue and bone; inhibition of and/or an absence of tumor or cancer cell metastasis; inhibition and/or an absence of cancer growth; relief of one or more symptoms associated with the specific cancer; reduced morbidity and mortality; improvement in quality of life; reduction in tumorigenicity; reduction in the number or frequency of cancer stem cells; or some combination of such effects.

[0106] The term “tumor” as used herein, refers to all neoplastic cell growth and proliferation, whether malignant or benign, and all pre-cancerous and cancerous cells and tissues. A “benign” tumor is not cancerous and it does not invade nearby tissue or spread to other parts of the body. A “premalignant” tumor is a tumor which is not yet cancerous but has the potential to become malignant. A “malignant” tumor, on the other hand, is cancerous and can grow and spread to other parts of the body.

[0107] The term “tumor sample” as used herein refers to a sample comprising tumor material obtained from a cancer patient. The term encompasses tumor tissue samples, for example, tissue obtained by surgical resection and tissue obtained by biopsy, such as for example, a core biopsy or a fine needle biopsy. In some embodiments, the tumor sample is a fixed, wax-embedded tissue sample, such as a formalin-fixed, paraffin-embedded tissue sample. Additionally, the term “tumor sample” encompasses a sample comprising tumor cells obtained from sites other than the primary tumor, e.g., circulating tumor cells. The term also encompasses cells that are the progeny of the patient's tumor cells, e.g. cell culture samples derived from primary tumor cells or circulating tumor cells. The term further encompasses samples that may comprise protein or nucleic acid material shed from tumor cells in vivo, e.g., bone marrow, blood, plasma, serum, and the like. The term also encompasses samples that have been enriched for tumor cells or otherwise manipulated after their procurement and samples comprising polynucleotides and/or polypeptides that are obtained from a patient's tumor material.

### Small Non-Coding RNA as Biomarkers for Cancer

[0108] The human genome encodes for a vast amount of non-coding RNA (ncRNA) transcripts. Non-coding RNAs can be grouped into two classes based on transcript size: small ncRNAs (smRNAs) and long ncRNAs (lncRNAs). Small ncRNAs are generally 18 to 200 nucleotides in length while lncRNAs are greater than 200 nucleotides. Small ncRNAs have diverse cellular functions and consist of several classes including the highly abundant transfer RNAs (tRNAs), ribosomal RNAs (rRNAs), small nucleolar RNAs (snoRNAs), microRNAs (miRNAs), small interfering RNAs (siRNAs), small nuclear RNAs (snRNAs), and piwi-interacting RNAs (piRNAs) (Amaral et al., 2008; Martens-Uzunova et al., 2013). Small non-coding RNAs act as translational repressors by binding to target mRNAs at sites with adequate sequence complementary (Ameres et al., 2007), while the highly abundant cytoplasmic Y RNAs function in RNA quality control by affecting the subcellular location of Ro proteins (Sim et al., 2009). The repressive activity of mature small non-coding RNAs on mRNA translation is shared by other classes of ncRNAs, including siRNAs and endo-siRNAs, in addition to piRNAs that silence retrotransposons at defined subcellular locations (Chuma and Pillai, 2009). Small non-coding RNA activity relies on sufficient levels of abundance in the cytoplasm, and interaction with RNA-induced silencing complexes (RISC) localized at endosomal membranes (Gibbings et al., 2009; Lee et al., 2009a), whereas low abundant small non-coding RNAs have less impact on translational repression. As a consequence, subtle alterations in the levels of certain small non-coding RNA may already influence cellular processes, while strong perturbations can cause disease. Besides abundance, interactions with (RISC) proteins but also RNA partners and correct subcellular localization are interrelated factors that control small non-coding RNA physiology (Mullokandov et al., 2012; Wee et al., 2012).

[0109] Small RNAs can be secreted in cell-derived extracellular vesicles, such as exosomes. Both mRNA and small non-coding RNA species have been found contained in exosomes. As such, exosomes can provide a means for transfer and protection of RNA content from degradation in the environment, enabling a stable source for reliable detection of RNA biomarkers.

[0110] The disclosure relates to small non-coding RNA biomarkers found to be differentially present in biological samples derived from subjects having cancer, as compared with subjects who are “normal,” i.e., subjects who do not have cancer. A small non-coding RNA biomarker or set of small non-coding RNA biomarkers is differentially present between samples if the difference between the levels of expression of the small non-coding RNA biomarker or set of small non-coding RNA biomarkers in the samples is determined to be statistically significant. Common tests for statistical significance include, but are not limited to, t-test, ANOVA, Kniskal-Wallis, Wilcoxon, Mann-Whitney, and odds ratio. Small non-coding RNA biomarkers, alone or in combination, can be used to provide a measure of the relative risk that a subject has or does not have cancer.

[0111] Small non-coding RNA biomarkers of various types of cancer were discovered by small RNA sequencing of multiple types of cancer from various tissues of origin, and identifying previously unknown small non-coding RNAs that are specifically expressed in the cancer cells. Hundreds of previously unknown small non-coding RNAs that are specifically expressed in the cancer cells, particularly cancer cells from lung, breast, prostate, colorectal, pancreas, liver and ovarian, were identified in this manner and disclosed in TABLE 1 (SEQ ID NO: 1-1524) with their respective cancerous indications provided. These small non-coding RNAs can now be used as biomarkers to determine the type of cancer and the status thereof of a subject, for example, a subject whose cancer status was previously unknown or who is suspected to be suffering from cancer. This may be accomplished by determining the level of one or more of the small non-coding RNAs disclosed herein, or combinations thereof, in a biological sample of the subject. A difference in the level of one or more of these small non-coding RNA biomarkers as compared to that in a biological sample of a normal or healthy subject is an indication that the subject has cancer of the type and tissue of origin associated with the one or more of the small non-coding RNAs detected in the sample of the subject, which may be early-stage, moderate or mid-stage, or severe or late-stage of cancer.

[0112] In some embodiments, the level of one or more disclosed small non-coding RNA biomarkers may be used to detect and/or diagnose cancer in a subject suspected of having a cancer but otherwise having no symptoms associated with the cancer. In some embodiments, the level of one or more disclosed small non-coding RNA biomarkers may be used to detect and/or diagnose cancer in a subject having symptoms characteristic of early-stage cancer.

[0113] In some embodiments, the level of one or more disclosed small non-coding RNA biomarkers may be used to monitor the course of cancer progression in a subject. The cancer status of a subject can change over time. For example, the cancer may worsen or improve over time during the course of a treatment regime. With such worsening or improvement, the level of one or more small non-coding RNA biomarkers may change in a statistically significant fashion, as detected in samples of the subject. For example, the level of one or more disclosed small non-coding RNA biomarker may increase over time with the development of the cancer. Thus, the course of cancer progression in a subject can be monitored by determining the level of one or more disclosed small non-coding RNA biomarkers in a first sample obtained from the subject, and determining the level of the same one or more small non-coding RNA biomarkers in a second sample obtained from the subject, where the second sample is obtained after the first sample. The levels in the second sample relative to the levels in the first sample are indicative of disease progression. For example, an increase in the level of one or more disclosed small non-coding RNA biomarkers from TABLE 1 from the first sample as compared to the second sample is indicative that the subject has developed the type of cancer associated with the small non-coding RNA biomarkers used for detection as provided in TABLE 1, or that the disease has worsened. Conversely, a decrease in the level of one or more disclosed small non-coding RNA biomarkers from TABLE 1 from the first sample as compared to the second sample indicates that the disease has improved.

[0114] Whether or not the level of a small non-coding RNA biomarker in a biological sample obtained from a test subject is different from the level of the small non-coding RNA biomarker present in a normal subject may be ascertained by comparing the level of the small non-coding RNA biomarker in the sample from the test subject with a suitable control. The skilled person can select an appropriate control for the assay in question. For example, a suitable control may be a biological sample from a subject known to be healthy and does not have cancer (e.g., a negative control). If a suitable control is obtained from a normal subject, a statistically significant difference in the level of a small non-coding RNA biomarker in a test subject relative to the suitable control is indicative that the subject has the type of cancer associated with the particular small non-coding RNA biomarker detected. In some embodiments, the difference in the level of a small non-coding RNA biomarker is an increase in the test subject as compared to the control. A suitable control may also be a reference standard. A reference standard serves as a reference level for comparison, such that test samples can be compared to the reference standard in order to infer the type of cancer, tissue of origin, and status of the cancer in the test subject. A reference standard may be representative of the level of one or more disclosed small non-coding RNA biomarkers in a known subject, e.g., a subject known to be a normal subject, or a subject known to have cancer. Likewise, a reference standard may be representative of the level of one or more disclosed small non-coding RNA biomarkers in a population of known subjects, e.g., a population of subjects known to be normal subjects, or a population of subjects known to have a particular type of cancer. The reference standard may be obtained, for example, by pooling samples from a plurality of individuals and determining the level of a particular small non-coding RNA biomarker in the pooled samples, thereby producing a standard over an averaged population. Such a reference standard represents an average level of the particular small non-coding RNA biomarker among a population of individuals. A reference standard may also be obtained, for example, by averaging the level of a particular small non-coding RNA biomarker determined to be present in individual samples obtained from a plurality of individuals. Such a standard is also representative of an average level of the particular small non-coding RNA biomarker among a population of individuals. A reference standard may also be a collection of values each representing the level of a particular small non-coding RNA biomarker in a known subject in a population of individuals. In some embodiments, test samples may be compared against such a collection of values in order to infer the type of cancer, tissue of origin, and the status or stage of the cancer in a subject. In some embodiments, the reference standard is an absolute value. In such embodiments, test samples may be compared against the absolute value in order to infer the type of cancer, tissue of origin, and the status or stage of the cancer in a subject. In some embodiments, a comparison between the level of one or more disclosed small non-coding RNA biomarkers in a sample relative to a suitable control is made by executing a software classification algorithm.

[0115] In some embodiments, the increased expression of one or more disclosed small non-coding RNAs is an increase of about 10% or more expression than the expression of the same non-coding RNAs in a normal sample. In some embodiments, the increased expression of one or more disclosed small non-coding RNAs is an increase of about 20% or more expression than the expression of the same non-coding RNAs in a normal sample. In some embodiments, the increased expression of one or more disclosed small non-coding RNAs is an increase of about 30% or more expression than the expression of the same non-coding RNAs in a normal sample. In some embodiments, the increased expression of one or more disclosed small non-coding RNAs is an increase of about 40% or more expression than the expression of the same non-coding RNAs in a normal sample. In some embodiments, the increased expression of one or more disclosed small non-coding RNAs is an increase of about 50% or more expression than the expression of the same non-coding RNAs in a normal sample. In some embodiments, the increased expression of one or more disclosed small non-coding RNAs is an increase of about 60% or more expression than the expression of the same non-coding RNAs in a normal sample. In some embodiments, the increased expression of one or more disclosed small non-coding RNAs is an increase of about 70% or more expression than the expression of the same non-coding RNAs in a normal sample. In some embodiments, the increased expression of one or more disclosed small non-coding RNAs is an increase of about 80% or more expression than the expression of the same non-coding RNAs in a normal sample. In some embodiments, the increased expression of one or more disclosed small non-coding RNAs is an increase of about 90% or more expression than the expression of the same non-coding RNAs in a normal sample. In some embodiments, the increased expression of one or more disclosed small non-coding RNAs is an increase of about 100% or more expression than the expression of the same non-coding RNAs in a normal sample.

[0116] In some embodiments, the increased expression of one or more disclosed non-coding RNAs is an increase of about 2-fold or more expression than the expression of the same non-coding RNAs in a normal sample. In some embodiments, the increased expression of one or more disclosed non-coding RNAs is an increase of about 3-fold or more expression than the expression of the same non-coding RNAs in a normal sample. In some embodiments, the increased expression of one or more disclosed non-coding RNAs is an increase of about 4-fold or more expression than the expression of the same non-coding RNAs in a normal sample. In some embodiments, the increased expression of one or more disclosed non-coding RNAs is an increase of about 5-fold or more expression than the expression of the same non-coding RNAs in a normal sample. In some embodiments, the increased expression of one or more disclosed non-coding RNAs is an increase of about 6-fold or more expression than the expression of the same non-coding RNAs in a normal sample. In some embodiments, the increased expression of one or more disclosed non-coding RNAs is an increase of about 7-fold or more expression than the expression of the same non-coding RNAs in a normal sample. In some embodiments, the increased expression of one or more disclosed non-coding RNAs is an increase of about 8-fold or more expression than the expression of the same non-coding RNAs in a normal sample. In some embodiments, the increased expression of one or more disclosed non-coding RNAs is an increase of about 9-fold or more expression than the expression of the same non-coding RNAs in a normal sample. In some embodiments, the increased expression of one or more disclosed non-coding RNAs is an increase of about 10-fold or more expression than the expression of the same non-coding RNAs in a normal sample.

[0117] In some embodiments, the one or more non-coding RNAs detected in a sample comprise at least about 70%, 80%, 81%, 82%, 83%, 84, 85%, 86%, 87%, 88%, 89%, 90%, 91%, 92%, 93%, 94%, 95%, 96%, 97%, 98%, 99% or 100% sequence identity to any of the nucleic acid sequences disclosed in TABLE 1 (SEQ ID NO: 1 through SEQ ID NO: 1543). In some embodiments, the one or more non-coding RNAs detected in a sample comprise at least about 70%, 80%, 81%, 82%, 83%, 84, 85%, 86%, 87%, 88%, 89%, 90%, 91%, 92%, 93%, 94%, 95%, 96%, 97%, 98%, 99% or 100% sequence identity to any of the nucleic acid sequences disclosed in TABLE 2 (SEQ ID NO: 1544 through SEQ ID NO: 6834). In some embodiments, the one or more non-coding RNAs detected in a sample comprise at least about 70%, 75%, 80%, 85%, 90%, 91%, 92%, 93%, 94%, 95%, 96%, 97%, 98%, 99% or 100% sequence identity to SEQ ID NO: 1. In some embodiments, the one or more non-coding RNAs detected in a sample comprise at least about 70%, 75%, 80%, 85%, 90%, 91%, 92%, 93%, 94%, 95%, 96%, 97%, 98%, 99% or 100% sequence identity to SEQ ID NO: 2. In some embodiments, the one or more non-coding RNAs detected in a sample comprise at least about 70%, 75%, 80%, 85%, 90%, 91%, 92%, 93%, 94%, 95%, 96%, 97%, 98%, 99% or 100% sequence identity to SEQ ID NO: 3. In some embodiments, the one or more non-coding RNAs detected in a sample comprise at least about 70%, 75%, 80%, 85%, 90%, 91%, 92%, 93%, 94%, 95%, 96%, 97%, 98%, 99% or 100% sequence identity to SEQ ID NO: 4. In some embodiments, the one or more non-coding RNAs detected in a sample comprise at least about 70%, 75%, 80%, 85%, 90%, 91%, 92%, 93%, 94%, 95%, 96%, 97%, 98%, 99% or 100% sequence identity to SEQ ID NO: 5. In some embodiments, the one or more non-coding RNAs detected in a sample comprise at least about 70%, 75%, 80%, 85%, 90%, 91%, 92%, 93%, 94%, 95%, 96%, 97%, 98%, 99% or 100% sequence identity to SEQ ID NO: 6. In some embodiments, the one or more non-coding RNAs detected in a sample comprise at least about 70%, 75%, 80%, 85%, 90%, 91%, 92%, 93%, 94%, 95%, 96%, 97%, 98%, 99% or 100% sequence identity to SEQ ID NO: 7. In some embodiments, the one or more non-coding RNAs detected in a sample comprise at least about 70%, 75%, 80%, 85%, 90%, 91%, 92%, 93%, 94%, 95%, 96%, 97%, 98%, 99% or 100% sequence identity to SEQ ID NO: 8. In some embodiments, the one or more non-coding RNAs detected in a sample comprise at least about 70%, 75%, 80%, 85%, 90%, 91%, 92%, 93%, 94%, 95%, 96%, 97%, 98%, 99% or 100% sequence identity to SEQ ID NO: 9. In some embodiments, the one or more non-coding RNAs detected in a sample comprise at least about 70%, 75%, 80%, 85%, 90%, 91%, 92%, 93%, 94%, 95%, 96%, 97%, 98%, 99% or 100% sequence identity to SEQ ID NO: 10. In some embodiments, the one or more non-coding RNAs detected in a sample comprise at least about 70%, 75%, 80%, 85%, 90%, 91%, 92%, 93%, 94%, 95%, 96%, 97%, 98%, 99% or 100% sequence identity to SEQ ID NO: 11. In some embodiments, the one or more non-coding RNAs detected in a sample comprise at least about 70%, 75%, 80%, 85%, 90%, 91%, 92%, 93%, 94%, 95%, 96%, 97%, 98%, 99% or 100% sequence identity to SEQ ID NO: 12. In some embodiments, the one or more non-coding RNAs detected in a sample comprise at least about 70%, 75%, 80%, 85%, 90%, 91%, 92%, 93%, 94%, 95%, 96%, 97%, 98%, 99% or 100% sequence identity to SEQ ID NO: 13. In some embodiments, the one or more non-coding RNAs detected in a sample comprise at least about 70%, 75%, 80%, 85%, 90%, 91%, 92%, 93%, 94%, 95%, 96%, 97%, 98%, 99% or 100% sequence identity to SEQ ID NO: 14. In some embodiments, the one or more non-coding RNAs detected in a sample comprise at least about 70%, 75%, 80%, 85%, 90%, 91%, 92%, 93%, 94%, 95%, 96%, 97%, 98%, 99% or 100% sequence identity to SEQ ID NO: 15. In some embodiments, the one or more non-coding RNAs detected in a sample comprise at least about 70%, 75%, 80%, 85%, 90%, 91%, 92%, 93%, 94%, 95%, 96%, 97%, 98%, 99% or 100% sequence identity to SEQ ID NO: 16. In some embodiments, the one or more non-coding RNAs detected in a sample comprise at least about 70%, 75%, 80%, 85%, 90%, 91%, 92%, 93%, 94%, 95%, 96%, 97%, 98%, 99% or 100% sequence identity to SEQ ID NO: 17. In some embodiments, the one or more non-coding RNAs detected in a sample comprise at least about 70%, 75%, 80%, 85%, 90%, 91%, 92%, 93%, 94%, 95%, 96%, 97%, 98%, 99% or 100% sequence identity to SEQ ID NO: 18. In some embodiments, the one or more non-coding RNAs detected in a sample comprise at least about 70%, 75%, 80%, 85%, 90%, 91%, 92%, 93%, 94%, 95%, 96%, 97%, 98%, 99% or 100% sequence identity to SEQ ID NO: 19. In some embodiments, the one or more non-coding RNAs detected in a sample comprise at least about 70%, 75%, 80%, 85%, 90%, 91%, 92%, 93%, 94%, 95%, 96%, 97%, 98%, 99% or 100% sequence identity to SEQ ID NO: 20. In some embodiments, the one or more non-coding RNAs detected in a sample comprise at least about 70%, 75%, 80%, 85%, 90%, 91%, 92%, 93%, 94%, 95%, 96%, 97%, 98%, 99% or 100% sequence identity to SEQ ID NO: 21. In some embodiments, the one or more non-coding RNAs detected in a sample comprise at least about 70%, 75%, 80%, 85%, 90%, 91%, 92%, 93%, 94%, 95%, 96%, 97%, 98%, 99% or 100% sequence identity to SEQ ID NO: 22. In some embodiments, the one or more non-coding RNAs detected in a sample comprise at least about 70%, 75%, 80%, 85%, 90%, 91%, 92%, 93%, 94%, 95%, 96%, 97%, 98%, 99% or 100% sequence identity to SEQ ID NO: 23. In some embodiments, the one or more non-coding RNAs detected in a sample comprise at least about 70%, 75%, 80%, 85%, 90%, 91%, 92%, 93%, 94%, 95%, 96%, 97%, 98%, 99% or 100% sequence identity to SEQ ID NO: 24. In some embodiments, the one or more non-coding RNAs detected in a sample comprise at least about 70%, 75%, 80%, 85%, 90%, 91%, 92%, 93%, 94%, 95%, 96%, 97%, 98%, 99% or 100% sequence identity to SEQ ID NO: 25. In some embodiments, the one or more non-coding RNAs detected in a sample comprise at least about 70%, 75%, 80%, 85%, 90%, 91%, 92%, 93%, 94%, 95%, 96%, 97%, 98%, 99% or 100% sequence identity to SEQ ID NO: 26. In some embodiments, the one or more non-coding RNAs detected in a sample comprise at least about 70%, 75%, 80%, 85%, 90%, 91%, 92%, 93%, 94%, 95%, 96%, 97%, 98%, 99% or 100% sequence identity to SEQ ID NO: 27. In some embodiments, the one or more non-coding RNAs detected in a sample comprise at least 70%, 75%, 80%, 85%, 90%, 91%, 92%, 93%, 94%, 95%, 96%, 97%, 98%, 99% or 100% sequence identity to SEQ ID NO: 28. In some embodiments, the one or more non-coding RNAs detected in a sample comprise at least about 70%, 75%, 80%, 85%, 90%, 91%, 92%, 93%, 94%, 95%, 96%, 97%, 98%, 99% or 100% sequence identity to SEQ ID NO: 29. In some embodiments, the one or more non-coding RNAs detected in a sample comprise at least about 70%, 75%, 80%, 85%, 90%, 91%, 92%, 93%, 94%, 95%, 96%, 97%, 98%, 99% or 100% sequence identity to SEQ ID NO: 30. In some embodiments, the one or more non-coding RNAs detected in a sample comprise at least about 70%, 75%, 80%, 85%, 90%, 91%, 92%, 93%, 94%, 95%, 96%, 97%, 98%, 99% or 100% sequence identity to SEQ ID NO: 31. In some embodiments, the one or more non-coding RNAs detected in a sample comprise at least about 70%, 75%, 80%, 85%, 90%, 91%, 92%, 93%, 94%, 95%, 96%, 97%, 98%, 99% or 100% sequence identity to SEQ ID NO: 32. In some embodiments, the one or more non-coding RNAs detected in a sample comprise at least about 70%, 75%, 80%, 85%, 90%, 91%, 92%, 93%, 94%, 95%, 96%, 97%, 98%, 99% or 100% sequence identity to SEQ ID NO: 33. In some embodiments, the one or more non-coding RNAs detected in a sample comprise at least about 70%, 75%, 80%, 85%, 90%, 91%, 92%, 93%, 94%, 95%, 96%, 97%, 98%, 99% or 100% sequence identity to SEQ ID NO: 34. In some embodiments, the one or more non-coding RNAs detected in a sample comprise at least about 70%, 75%, 80%, 85%, 90%, 91%, 92%, 93%, 94%, 95%, 96%, 97%, 98%, 99% or 100% sequence identity to SEQ ID NO: 35. In some embodiments, the one or more non-coding RNAs detected in a sample comprise at least about 70%, 75%, 80%, 85%, 90%, 91%, 92%, 93%, 94%, 95%, 96%, 97%, 98%, 99% or 100% sequence identity to SEQ ID NO: 36. In some embodiments, the one or more non-coding RNAs detected in a sample comprise at least about 70%, 75%, 80%, 85%, 90%, 91%, 92%, 93%, 94%, 95%, 96%, 97%, 98%, 99% or 100% sequence identity to SEQ ID NO: 37. In some embodiments, the one or more non-coding RNAs detected in a sample comprise at least about 70%, 75%, 80%, 85%, 90%, 91%, 92%, 93%, 94%, 95%, 96%, 97%, 98%, 99% or 100% sequence identity to SEQ ID NO: 38. In some embodiments, the one or more non-coding RNAs detected in a sample comprise at least about 70%, 75%, 80%, 85%, 90%, 91%, 92%, 93%, 94%, 95%, 96%, 97%, 98%, 99% or 100% sequence identity to SEQ ID NO: 39. In some embodiments, the one or more non-coding RNAs detected in a sample comprise at least about 70%, 75%, 80%, 85%, 90%, 91%, 92%, 93%, 94%, 95%, 96%, 97%, 98%, 99% or 100% sequence identity to SEQ ID NO: 40. In some embodiments, the one or more non-coding RNAs detected in a sample comprise at least about 70%, 75%, 80%, 85%, 90%, 91%, 92%, 93%, 94%, 95%, 96%, 97%, 98%, 99% or 100% sequence identity to SEQ ID NO: 41. In some embodiments, the one or more non-coding RNAs detected in a sample comprise at least about 70%, 75%, 80%, 85%, 90%, 91%, 92%, 93%, 94%, 95%, 96%, 97%, 98%, 99% or 100% sequence identity to SEQ ID NO: 42. In some embodiments, the one or more non-coding RNAs detected in a sample comprise at least about 70%, 75%, 80%, 85%, 90%, 91%, 92%, 93%, 94%, 95%, 96%, 97%, 98%, 99% or 100% sequence identity to SEQ ID NO: 43. In some embodiments, the one or more non-coding RNAs detected in a sample comprise at least about 70%, 75%, 80%, 85%, 90%, 91%, 92%, 93%, 94%, 95%, 96%, 97%, 98%, 99% or 100% sequence identity to SEQ ID NO: 44. In some embodiments, the one or more non-coding RNAs detected in a sample comprise at least about 70%, 75%, 80%, 85%, 90%, 91%, 92%, 93%, 94%, 95%, 96%, 97%, 98%, 99% or 100% sequence identity to SEQ ID NO: 45. In some embodiments, the one or more non-coding RNAs detected in a sample comprise at least about 70%, 75%, 80%, 85%, 90%, 91%, 92%, 93%, 94%, 95%, 96%, 97%, 98%, 99% or 100% sequence identity to SEQ ID NO: 46. In some embodiments, the one or more non-coding RNAs detected in a sample comprise at least about 70%, 75%, 80%, 85%, 90%, 91%, 92%, 93%, 94%, 95%, 96%, 97%, 98%, 99% or 100% sequence identity to SEQ ID NO: 47. In some embodiments, the one or more non-coding RNAs detected in a sample comprise at least about 70%, 75%, 80%, 85%, 90%, 91%, 92%, 93%, 94%, 95%, 96%, 97%, 98%, 99% or 100% sequence identity to SEQ ID NO: 48. In some embodiments, the one or more non-coding RNAs detected in a sample comprise at least about 70%, 75%, 80%, 85%, 90%, 91%, 92%, 93%, 94%, 95%, 96%, 97%, 98%, 99% or 100% sequence identity to SEQ ID NO: 49. In some embodiments, the one or more non-coding RNAs detected in a sample comprise at least about 70%, 75%, 80%, 85%, 90%, 91%, 92%, 93%, 94%, 95%, 96%, 97%, 98%, 99% or 100% sequence identity to SEQ ID NO: 50. In some embodiments, the one or more non-coding RNAs detected in a sample comprise at least about 70%, 75%, 80%, 85%, 90%, 91%, 92%, 93%, 94%, 95%, 96%, 97%, 98%, 99% or 100% sequence identity to SEQ ID NO: 51. In some embodiments, the one or more non-coding RNAs detected in a sample comprise at least about 70%, 75%, 80%, 85%, 90%, 91%, 92%, 93%, 94%, 95%, 96%, 97%, 98%, 99% or 100% sequence identity to SEQ ID NO: 52. In some embodiments, the one or more non-coding RNAs detected in a sample comprise at least about 70%, 75%, 80%, 85%, 90%, 91%, 92%, 93%, 94%, 95%, 96%, 97%, 98%, 99% or 100% sequence identity to SEQ ID NO: 53. In some embodiments, the one or more non-coding RNAs detected in a sample comprise at least about 70%, 75%, 80%, 85%, 90%, 91%, 92%, 93%, 94%, 95%, 96%, 97%, 98%, 99% or 100% sequence identity to SEQ ID NO: 54. In some embodiments, the one or more non-coding RNAs detected in a sample comprise at least about 70%, 75%, 80%, 85%, 90%, 91%, 92%, 93%, 94%, 95%, 96%, 97%, 98%, 99% or 100% sequence identity to SEQ ID NO: 55. In some embodiments, the one or more non-coding RNAs detected in a sample comprise at least about 70%, 75%, 80%, 85%, 90%, 91%, 92%, 93%, 94%, 95%, 96%, 97%, 98%, 99% or 100% sequence identity to SEQ ID NO: 56. In some embodiments, the one or more non-coding RNAs detected in a sample comprise at least about 70%, 75%, 80%, 85%, 90%, 91%, 92%, 93%, 94%, 95%, 96%, 97%, 98%, 99% or 100% sequence identity to SEQ ID NO: 57. In some embodiments, the one or more non-coding RNAs detected in a sample comprise at least about 70%, 75%, 80%, 85%, 90%, 91%, 92%, 93%, 94%, 95%, 96%, 97%, 98%, 99% or 100% sequence identity to SEQ ID NO: 58. In some embodiments, the one or more non-coding RNAs detected in a sample comprise at least about 70%, 75%, 80%, 85%, 90%, 91%, 92%, 93%, 94%, 95%, 96%, 97%, 98%, 99% or 100% sequence identity to SEQ ID NO: 59. In some embodiments, the one or more non-coding RNAs detected in a sample comprise at least about 70%, 75%, 80%, 85%, 90%, 91%, 92%, 93%, 94%, 95%, 96%, 97%, 98%, 99% or 100% sequence identity to SEQ ID NO: 60. In some embodiments, the one or more non-coding RNAs detected in a sample comprise at least about 70%, 75%, 80%, 85%, 90%, 91%, 92%, 93%, 94%, 95%, 96%, 97%, 98%, 99% or 100% sequence identity to SEQ ID NO: 61. In some embodiments, the one or more non-coding RNAs detected in a sample comprise at least about 70%, 75%, 80%, 85%, 90%, 91%, 92%, 93%, 94%, 95%, 96%, 97%, 98%, 99% or 100% sequence identity to SEQ ID NO: 62. In some embodiments, the one or more non-coding RNAs detected in a sample comprise at least about 70%, 75%, 80%, 85%, 90%, 91%, 92%, 93%, 94%, 95%, 96%, 97%, 98%, 99% or 100% sequence identity to SEQ ID NO: 63. In some embodiments, the one or more non-coding RNAs detected in a sample comprise at least about 70%, 75%, 80%, 85%, 90%, 91%, 92%, 93%, 94%, 95%, 96%, 97%, 98%, 99% or 100% sequence identity to SEQ ID NO: 64. In some embodiments, the one or more non-coding RNAs detected in a sample comprise at least about 70%, 75%, 80%, 85%, 90%, 91%, 92%, 93%, 94%, 95%, 96%, 97%, 98%, 99% or 100% sequence identity to SEQ ID NO: 65. In some embodiments, the one or more non-coding RNAs detected in a sample comprise at least about 70%, 75%, 80%, 85%, 90%, 91%, 92%, 93%, 94%, 95%, 96%, 97%, 98%, 99% or 100% sequence identity to SEQ ID NO: 66. In some embodiments, the one or more non-coding RNAs detected in a sample comprise at least about 70%, 75%, 80%, 85%, 90%, 91%, 92%, 93%, 94%, 95%, 96%, 97%, 98%, 99% or 100% sequence identity to SEQ ID NO: 67. In some embodiments, the one or more non-coding RNAs detected in a sample comprise at least about 70%, 75%, 80%, 85%, 90%, 91%, 92%, 93%, 94%, 95%, 96%, 97%, 98%, 99% or 100% sequence identity to SEQ ID NO: 68. In some embodiments, the one or more non-coding RNAs detected in a sample comprise at least about 70%, 75%, 80%, 85%, 90%, 91%, 92%, 93%, 94%, 95%, 96%, 97%, 98%, 99% or 100% sequence identity to SEQ ID NO: 69. In some embodiments, the one or more non-coding RNAs detected in a sample comprise at least about 70%, 75%, 80%, 85%, 90%, 91%, 92%, 93%, 94%, 95%, 96%, 97%, 98%, 99% or 100% sequence identity to SEQ ID NO: 70. In some embodiments, the one or more non-coding RNAs detected in a sample comprise at least about 70%, 75%, 80%, 85%, 90%, 91%, 92%, 93%, 94%, 95%, 96%, 97%, 98%, 99% or 100% sequence identity to SEQ ID NO: 71. In some embodiments, the one or more non-coding RNAs detected in a sample comprise at least about 70%, 75%, 80%, 85%, 90%, 91%, 92%, 93%, 94%, 95%, 96%, 97%, 98%, 99% or 100% sequence identity to SEQ ID NO: 72. In some embodiments, the one or more non-coding RNAs detected in a sample comprise at least about 70%, 75%, 80%, 85%, 90%, 91%, 92%, 93%, 94%, 95%, 96%, 97%, 98%, 99% or 100% sequence identity to SEQ ID NO: 73. In some embodiments, the one or more non-coding RNAs detected in a sample comprise at least about 70%, 75%, 80%, 85%, 90%, 91%, 92%, 93%, 94%, 95%, 96%, 97%, 98%, 99% or 100% sequence identity to SEQ ID NO: 74. In some embodiments, the one or more non-coding RNAs detected in a sample comprise at least about 70%, 75%, 80%, 85%, 90%, 91%, 92%, 93%, 94%, 95%, 96%, 97%, 98%, 99% or 100% sequence identity to SEQ ID NO: 75. In some embodiments, the one or more non-coding RNAs detected in a sample comprise at least about 70%, 75%, 80%, 85%, 90%, 91%, 92%, 93%, 94%, 95%, 96%, 97%, 98%, 99% or 100% sequence identity to SEQ ID NO: 76. In some embodiments, the one or more non-coding RNAs detected in a sample comprise at least about 70%, 75%, 80%, 85%, 90%, 91%, 92%, 93%, 94%, 95%, 96%, 97%, 98%, 99% or 100% sequence identity to SEQ ID NO: 77. In some embodiments, the one or more non-coding RNAs detected in a sample comprise at least about 70%, 75%, 80%, 85%, 90%, 91%, 92%, 93%, 94%, 95%, 96%, 97%, 98%, 99% or 100% sequence identity to SEQ ID NO: 78. In some embodiments, the one or more non-coding RNAs detected in a sample comprise at least about 70%, 75%, 80%, 85%, 90%, 91%, 92%, 93%, 94%, 95%, 96%, 97%, 98%, 99% or 100% sequence identity to SEQ ID NO: 79. In some embodiments, the one or more non-coding RNAs detected in a sample comprise at least about 70%, 75%, 80%, 85%, 90%, 91%, 92%, 93%, 94%, 95%, 96%, 97%, 98%, 99% or 100% sequence identity to SEQ ID NO: 80. In some embodiments, the one or more non-coding RNAs detected in a sample comprise at least about 70%, 75%, 80%, 85%, 90%, 91%, 92%, 93%, 94%, 95%, 96%, 97%, 98%, 99% or 100% sequence identity to SEQ ID NO: 81. In some embodiments, the one or more non-coding RNAs detected in a sample comprise at least about 70%, 75%, 80%, 85%, 90%, 91%, 92%, 93%, 94%, 95%, 96%, 97%, 98%, 99% or 100% sequence identity to SEQ ID NO: 82. In some embodiments, the one or more non-coding RNAs detected in a sample comprise at least about 70%, 75%, 80%, 85%, 90%, 91%, 92%, 93%, 94%, 95%, 96%, 97%, 98%, 99% or 100% sequence identity to SEQ ID NO: 83. In some embodiments, the one or more non-coding RNAs detected in a sample comprise at least about 70%, 75%, 80%, 85%, 90%, 91%, 92%, 93%, 94%, 95%, 96%, 97%, 98%, 99% or 100% sequence identity to SEQ ID NO: 84. In some embodiments, the one or more non-coding RNAs detected in a sample comprise at least about 70%, 75%, 80%, 85%, 90%, 91%, 92%, 93%, 94%, 95%, 96%, 97%, 98%, 99% or 100% sequence identity to SEQ ID NO: 85. In some embodiments, the one or more non-coding RNAs detected in a sample comprise at least about 70%, 75%, 80%, 85%, 90%, 91%, 92%, 93%, 94%, 95%, 96%, 97%, 98%, 99% or 100% sequence identity to SEQ ID NO: 86. In some embodiments, the one or more non-coding RNAs detected in a sample comprise at least about 70%, 75%, 80%, 85%, 90%, 91%, 92%, 93%, 94%, 95%, 96%, 97%, 98%, 99% or 100% sequence identity to SEQ ID NO: 87. In some embodiments, the one or more non-coding RNAs detected in a sample comprise at least about 70%, 75%, 80%, 85%, 90%, 91%, 92%, 93%, 94%, 95%, 96%, 97%, 98%, 99% or 100% sequence identity to SEQ ID NO: 88. In some embodiments, the one or more non-coding RNAs detected in a sample comprise at least about 70%, 75%, 80%, 85%, 90%, 91%, 92%, 93%, 94%, 95%, 96%, 97%, 98%, 99% or 100% sequence identity to SEQ ID NO: 89. In some embodiments, the one or more non-coding RNAs detected in a sample comprise at least about 70%, 75%, 80%, 85%, 90%, 91%, 92%, 93%, 94%, 95%, 96%, 97%, 98%, 99% or 100% sequence identity to SEQ ID NO: 90. In some embodiments, the one or more non-coding RNAs detected in a sample comprise at least about 70%, 75%, 80%, 85%, 90%, 91%, 92%, 93%, 94%, 95%, 96%, 97%, 98%, 99% or 100% sequence identity to SEQ ID NO: 91. In some embodiments, the one or more non-coding RNAs detected in a sample comprise at least about 70%, 75%, 80%, 85%, 90%, 91%, 92%, 93%, 94%, 95%, 96%, 97%, 98%, 99% or 100% sequence identity to SEQ ID NO: 92. In some embodiments, the one or more non-coding RNAs detected in a sample comprise at least about 70%, 75%, 80%, 85%, 90%, 91%, 92%, 93%, 94%, 95%, 96%, 97%, 98%, 99% or 100% sequence identity to SEQ ID NO: 93. In some embodiments, the one or more non-coding RNAs detected in a sample comprise at least about 70%, 75%, 80%, 85%, 90%, 91%, 92%, 93%, 94%, 95%, 96%, 97%, 98%, 99% or 100% sequence identity to SEQ ID NO: 94. In some embodiments, the one or more non-coding RNAs detected in a sample comprise at least about 70%, 75%, 80%, 85%, 90%, 91%, 92%, 93%, 94%, 95%, 96%, 97%, 98%, 99% or 100% sequence identity to SEQ ID NO: 95. In some embodiments, the one or more non-coding RNAs detected in a sample comprise at least about 70%, 75%, 80%, 85%, 90%, 91%, 92%, 93%, 94%, 95%, 96%, 97%, 98%, 99% or 100% sequence identity to SEQ ID NO: 96. In some embodiments, the one or more non-coding RNAs detected in a sample comprise at least about 70%, 75%, 80%, 85%, 90%, 91%, 92%, 93%, 94%, 95%, 96%, 97%, 98%, 99% or 100% sequence identity to SEQ ID NO: 97. In some embodiments, the one or more non-coding RNAs detected in a sample comprise at least about 70%, 75%, 80%, 85%, 90%, 91%, 92%, 93%, 94%, 95%, 96%, 97%, 98%, 99% or 100% sequence identity to SEQ ID NO: 98. In some embodiments, the one or more non-coding RNAs detected in a sample comprise at least about 70%, 75%, 80%, 85%, 90%, 91%, 92%, 93%, 94%, 95%, 96%, 97%, 98%, 99% or 100% sequence identity to SEQ ID NO: 99. In some embodiments, the one or more non-coding RNAs detected in a sample comprise at least about 70%, 75%, 80%, 85%, 90%, 91%, 92%, 93%, 94%, 95%, 96%, 97%, 98%, 99% or 100% sequence identity to SEQ ID NO: 100. In some embodiments, the one or more non-coding RNAs detected in a sample comprise at least about 70%, 75%, 80%, 85%, 90%, 91%, 92%, 93%, 94%, 95%, 96%, 97%, 98%, 99% or 100% sequence identity to SEQ ID NO: 101. In some embodiments, the one or more non-coding RNAs detected in a sample comprise at least about 70%, 75%, 80%, 85%, 90%, 91%, 92%, 93%, 94%, 95%, 96%, 97%, 98%, 99% or 100% sequence identity to SEQ ID NO: 102. In some embodiments, the one or more non-coding RNAs detected in a sample comprise at least about 70%, 75%, 80%, 85%, 90%, 91%, 92%, 93%, 94%, 95%, 96%, 97%, 98%, 99% or 100% sequence identity to SEQ ID NO: 103. In some embodiments, the one or more non-coding RNAs detected in a sample comprise at least about 70%, 75%, 80%, 85%, 90%, 91%, 92%, 93%, 94%, 95%, 96%, 97%, 98%, 99% or 100% sequence identity to SEQ ID NO: 104. In some embodiments, the one or more non-coding RNAs detected in a sample comprise at least about 70%, 75%, 80%, 85%, 90%, 91%, 92%, 93%, 94%, 95%, 96%, 97%, 98%, 99% or 100% sequence identity to SEQ ID NO: 105. In some embodiments, the one or more non-coding RNAs detected in a sample comprise at least about 70%, 75%, 80%, 85%, 90%, 91%, 92%, 93%, 94%, 95%, 96%, 97%, 98%, 99% or 100% sequence identity to SEQ ID NO: 106. In some embodiments, the one or more non-coding RNAs detected in a sample comprise at least about 70%, 75%, 80%, 85%, 90%, 91%, 92%, 93%, 94%, 95%, 96%, 97%, 98%, 99% or 100% sequence identity to SEQ ID NO: 107. In some embodiments, the one or more non-coding RNAs detected in a sample comprise at least about 70%, 75%, 80%, 85%, 90%, 91%, 92%, 93%, 94%, 95%, 96%, 97%, 98%, 99% or 100% sequence identity to SEQ ID NO: 108. In some embodiments, the one or more non-coding RNAs detected in a sample comprise at least about 70%, 75%, 80%, 85%, 90%, 91%, 92%, 93%, 94%, 95%, 96%, 97%, 98%, 99% or 100% sequence identity to SEQ ID NO: 109. In some embodiments, the one or more non-coding RNAs detected in a sample comprise at least about 70%, 75%, 80%, 85%, 90%, 91%, 92%, 93%, 94%, 95%, 96%, 97%, 98%, 99% or 100% sequence identity to SEQ ID NO: 110. In some embodiments, the one or more non-coding RNAs detected in a sample comprise at least about 70%, 75%, 80%, 85%, 90%, 91%, 92%, 93%, 94%, 95%, 96%, 97%, 98%, 99% or 100% sequence identity to SEQ ID NO: 111. In some embodiments, the one or more non-coding RNAs detected in a sample comprise at least about 70%, 75%, 80%, 85%, 90%, 91%, 92%, 93%, 94%, 95%, 96%, 97%, 98%, 99% or 100% sequence identity to SEQ ID NO: 112. In some embodiments, the one or more non-coding RNAs detected in a sample comprise at least about 70%, 75%, 80%, 85%, 90%, 91%, 92%, 93%, 94%, 95%, 96%, 97%, 98%, 99% or 100% sequence identity to SEQ ID NO: 113. In some embodiments, the one or more non-coding RNAs detected in a sample comprise at least about 70%, 75%, 80%, 85%, 90%, 91%, 92%, 93%, 94%, 95%, 96%, 97%, 98%, 99% or 100% sequence identity to SEQ ID NO: 114. In some embodiments, the one or more non-coding RNAs detected in a sample comprise at least about 70%, 75%, 80%, 85%, 90%, 91%, 92%, 93%, 94%, 95%, 96%, 97%, 98%, 99% or 100% sequence identity to SEQ ID NO: 115. In some embodiments, the one or more non-coding RNAs detected in a sample comprise at least about 70%, 75%, 80%, 85%, 90%, 91%, 92%, 93%, 94%, 95%, 96%, 97%, 98%, 99% or 100% sequence identity to SEQ ID NO: 116. In some embodiments, the one or more non-coding RNAs detected in a sample comprise at least about 70%, 75%, 80%, 85%, 90%, 91%, 92%, 93%, 94%, 95%, 96%, 97%, 98%, 99% or 100% sequence identity to SEQ ID NO: 117. In some embodiments, the one or more non-coding RNAs detected in a sample comprise at least about 70%, 75%, 80%, 85%, 90%, 91%, 92%, 93%, 94%, 95%, 96%, 97%, 98%, 99% or 100% sequence identity to SEQ ID NO: 118. In some embodiments, the one or more non-coding RNAs detected in a sample comprise at least about 70%, 75%, 80%, 85%, 90%, 91%, 92%, 93%, 94%, 95%, 96%, 97%, 98%, 99% or 100% sequence identity to SEQ ID NO: 119. In some embodiments, the one or more non-coding RNAs detected in a sample comprise at least about 70%, 75%, 80%, 85%, 90%, 91%, 92%, 93%, 94%, 95%, 96%, 97%, 98%, 99% or 100% sequence identity to SEQ ID NO: 120. In some embodiments, the one or more non-coding RNAs detected in a sample comprise at least about 70%, 75%, 80%, 85%, 90%, 91%, 92%, 93%, 94%, 95%, 96%, 97%, 98%, 99% or 100% sequence identity to SEQ ID NO: 121. In some embodiments, the one or more non-coding RNAs detected in a sample comprise at least about 70%, 75%, 80%, 85%, 90%, 91%, 92%, 93%, 94%, 95%, 96%, 97%, 98%, 99% or 100% sequence identity to SEQ ID NO: 122. In some embodiments, the one or more non-coding RNAs detected in a sample comprise at least about 70%, 75%, 80%, 85%, 90%, 91%, 92%, 93%, 94%, 95%, 96%, 97%, 98%, 99% or 100% sequence identity to SEQ ID NO: 123. In some embodiments, the one or more non-coding RNAs detected in a sample comprise at least about 70%, 75%, 80%, 85%, 90%, 91%, 92%, 93%, 94%, 95%, 96%, 97%, 98%, 99% or 100% sequence identity to SEQ ID NO: 124. In some embodiments, the one or more non-coding RNAs detected in a sample comprise at least about 70%, 75%, 80%, 85%, 90%, 91%, 92%, 93%, 94%, 95%, 96%, 97%, 98%, 99% or 100% sequence identity to SEQ ID NO: 125. In some embodiments, the one or more non-coding RNAs detected in a sample comprise at least about 70%, 75%, 80%, 85%, 90%, 91%, 92%, 93%, 94%, 95%, 96%, 97%, 98%, 99% or 100% sequence identity to SEQ ID NO: 126. In some embodiments, the one or more non-coding RNAs detected in a sample comprise at least about 70%, 75%, 80%, 85%, 90%, 91%, 92%, 93%, 94%, 95%, 96%, 97%, 98%, 99% or 100% sequence identity to SEQ ID NO: 127. In some embodiments, the one or more non-coding RNAs detected in a sample comprise at least about 70%, 75%, 80%, 85%, 90%, 91%, 92%, 93%, 94%, 95%, 96%, 97%, 98%, 99% or 100% sequence identity to SEQ ID NO: 128. In some embodiments, the one or more non-coding RNAs detected in a sample comprise at least about 70%, 75%, 80%, 85%, 90%, 91%, 92%, 93%, 94%, 95%, 96%, 97%, 98%, 99% or 100% sequence identity to SEQ ID NO: 129. In some embodiments, the one or more non-coding RNAs detected in a sample comprise at least about 70%, 75%, 80%, 85%, 90%, 91%, 92%, 93%, 94%, 95%, 96%, 97%, 98%, 99% or 100% sequence identity to SEQ ID NO: 130. In some embodiments, the one or more non-coding RNAs detected in a sample comprise at least about 70%, 75%, 80%, 85%, 90%, 91%, 92%, 93%, 94%, 95%, 96%, 97%, 98%, 99% or 100% sequence identity to SEQ ID NO:131. In some embodiments, the one or more non-coding RNAs detected in a sample comprise at least about 70%, 75%, 80%, 85%, 90%, 91%, 92%, 93%, 94%, 95%, 96%, 97%, 98%, 99% or 100% sequence identity to SEQ ID NO: 132. In some embodiments, the one or more non-coding RNAs detected in a sample comprise at least about 70%, 75%, 80%, 85%, 90%, 91%, 92%, 93%, 94%, 95%, 96%, 97%, 98%, 99% or 100% sequence identity to SEQ ID NO: 133. In some embodiments, the one or more non-coding RNAs detected in a sample comprise at least about 70%, 75%, 80%, 85%, 90%, 91%, 92%, 93%, 94%, 95%, 96%, 97%, 98%, 99% or 100% sequence identity to SEQ ID NO: 134. In some embodiments, the one or more non-coding RNAs detected in a sample comprise at least about 70%, 75%, 80%, 85%, 90%, 91%, 92%, 93%, 94%, 95%, 96%, 97%, 98%, 99% or 100% sequence identity to SEQ ID NO: 135. In some embodiments, the one or more non-coding RNAs detected in a sample comprise at least about 70%, 75%, 80%, 85%, 90%, 91%, 92%, 93%, 94%, 95%, 96%, 97%, 98%, 99% or 100% sequence identity to SEQ ID NO: 136. In some embodiments, the one or more non-coding RNAs detected in a sample comprise at least about 70%, 75%, 80%, 85%, 90%, 91%, 92%, 93%, 94%, 95%, 96%, 97%, 98%, 99% or 100% sequence identity to SEQ ID NO: 137. In some embodiments, the one or more non-coding RNAs detected in a sample comprise at least about 70%, 75%, 80%, 85%, 90%, 91%, 92%, 93%, 94%, 95%, 96%, 97%, 98%, 99% or 100% sequence identity to SEQ ID NO: 138. In some embodiments, the one or more non-coding RNAs detected in a sample comprise at least about 70%, 75%, 80%, 85%, 90%, 91%, 92%, 93%, 94%, 95%, 96%, 97%, 98%, 99% or 100% sequence identity to SEQ ID NO: 139. In some embodiments, the one or more non-coding RNAs detected in a sample comprise at least about 70%, 75%, 80%, 85%, 90%, 91%, 92%, 93%, 94%, 95%, 96%, 97%, 98%, 99% or 100% sequence identity to SEQ ID NO: 140. In some embodiments, the one or more non-coding RNAs detected in a sample comprise at least about 70%, 75%, 80%, 85%, 90%, 91%, 92%, 93%, 94%, 95%, 96%, 97%, 98%, 99% or 100% sequence identity to SEQ ID NO: 141. In some embodiments, the one or more non-coding RNAs detected in a sample comprise at least about 70%, 75%, 80%, 85%, 90%, 91%, 92%, 93%, 94%, 95%, 96%, 97%, 98%, 99% or 100% sequence identity to SEQ ID NO: 142. In some embodiments, the one or more non-coding RNAs detected in a sample comprise at least about 70%, 75%, 80%, 85%, 90%, 91%, 92%, 93%, 94%, 95%, 96%, 97%, 98%, 99% or 100% sequence identity to SEQ ID NO: 143. In some embodiments, the one or more non-coding RNAs detected in a sample comprise at least about 70%, 75%, 80%, 85%, 90%, 91%, 92%, 93%, 94%, 95%, 96%, 97%, 98%, 99% or 100% sequence identity to SEQ ID NO: 144. In some embodiments, the one or more non-coding RNAs detected in a sample comprise at least about 70%, 75%, 80%, 85%, 90%, 91%, 92%, 93%, 94%, 95%, 96%, 97%, 98%, 99% or 100% sequence identity to SEQ ID NO: 145. In some embodiments, the one or more non-coding RNAs detected in a sample comprise at least about 70%, 75%, 80%, 85%, 90%, 91%, 92%, 93%, 94%, 95%, 96%, 97%, 98%, 99% or 100% sequence identity to SEQ ID NO: 146. In some embodiments, the one or more non-coding RNAs detected in a sample comprise at least about 70%, 75%, 80%, 85%, 90%, 91%, 92%, 93%, 94%, 95%, 96%, 97%, 98%, 99% or 100% sequence identity to SEQ ID NO: 147. In some embodiments, the one or more non-coding RNAs detected in a sample comprise at least about 70%, 75%, 80%, 85%, 90%, 91%, 92%, 93%, 94%, 95%, 96%, 97%, 98%, 99% or 100% sequence identity to SEQ ID NO: 148. In some embodiments, the one or more non-coding RNAs detected in a sample comprise at least about 70%, 75%, 80%, 85%, 90%, 91%, 92%, 93%, 94%, 95%, 96%, 97%, 98%, 99% or 100% sequence identity to SEQ ID NO: 149. In some embodiments, the one or more non-coding RNAs detected in a sample comprise at least about 70%, 75%, 80%, 85%, 90%, 91%, 92%, 93%, 94%, 95%, 96%, 97%, 98%, 99% or 100% sequence identity to SEQ ID NO: 150. In some embodiments, the one or more non-coding RNAs detected in a sample comprise at least about 70%, 75%, 80%, 85%, 90%, 91%, 92%, 93%, 94%, 95%, 96%, 97%, 98%, 99% or 100% sequence identity to SEQ ID NO: 151. In some embodiments, the one or more non-coding RNAs detected in a sample comprise at least about 70%, 75%, 80%, 85%, 90%, 91%, 92%, 93%, 94%, 95%, 96%, 97%, 98%, 99% or 100% sequence identity to SEQ ID NO: 152. In some embodiments, the one or more non-coding RNAs detected in a sample comprise at least about 70%, 75%, 80%, 85%, 90%, 91%, 92%, 93%, 94%, 95%, 96%, 97%, 98%, 99% or 100% sequence identity to SEQ ID NO: 153. In some embodiments, the one or more non-coding RNAs detected in a sample comprise at least about 70%, 75%, 80%, 85%, 90%, 91%, 92%, 93%, 94%, 95%, 96%, 97%, 98%, 99% or 100% sequence identity to SEQ ID NO: 154. In some embodiments, the one or more non-coding RNAs detected in a sample comprise at least about 70%, 75%, 80%, 85%, 90%, 91%, 92%, 93%, 94%, 95%, 96%, 97%, 98%, 99% or 100% sequence identity to SEQ ID NO: 155. In some embodiments, the one or more non-coding RNAs detected in a sample comprise at least about 70%, 75%, 80%, 85%, 90%, 91%, 92%, 93%, 94%, 95%, 96%, 97%, 98%, 99% or 100% sequence identity to SEQ ID NO: 156. In some embodiments, the one or more non-coding RNAs detected in a sample comprise at least about 70%, 75%, 80%, 85%, 90%, 91%, 92%, 93%, 94%, 95%, 96%, 97%, 98%, 99% or 100% sequence identity to SEQ ID NO: 157. In some embodiments, the one or more non-coding RNAs detected in a sample comprise at least about 70%, 75%, 80%, 85%, 90%, 91%, 92%, 93%, 94%, 95%, 96%, 97%, 98%, 99% or 100% sequence identity to SEQ ID NO: 158. In some embodiments, the one or more non-coding RNAs detected in a sample comprise at least about 70%, 75%, 80%, 85%, 90%, 91%, 92%, 93%, 94%, 95%, 96%, 97%, 98%, 99% or 100% sequence identity to SEQ ID NO: 159. In some embodiments, the one or more non-coding RNAs detected in a sample comprise at least about 70%, 75%, 80%, 85%, 90%, 91%, 92%, 93%, 94%, 95%, 96%, 97%, 98%, 99% or 100% sequence identity to SEQ ID NO: 160. In some embodiments, the one or more non-coding RNAs detected in a sample comprise at least about 70%, 75%, 80%, 85%, 90%, 91%, 92%, 93%, 94%, 95%, 96%, 97%, 98%, 99% or 100% sequence identity to SEQ ID NO: 161. In some embodiments, the one or more non-coding RNAs detected in a sample comprise at least about 70%, 75%, 80%, 85%, 90%, 91%, 92%, 93%, 94%, 95%, 96%, 97%, 98%, 99% or 100% sequence identity to SEQ ID NO: 162. In some embodiments, the one or more non-coding RNAs detected in a sample comprise at least about 70%, 75%, 80%, 85%, 90%, 91%, 92%, 93%, 94%, 95%, 96%, 97%, 98%, 99% or 100% sequence identity to SEQ ID NO: 163. In some embodiments, the one or more non-coding RNAs detected in a sample comprise at least about 70%, 75%, 80%, 85%, 90%, 91%, 92%, 93%, 94%, 95%, 96%, 97%, 98%, 99% or 100% sequence identity to SEQ ID NO: 164. In some embodiments, the one or more non-coding RNAs detected in a sample comprise at least about 70%, 75%, 80%, 85%, 90%, 91%, 92%, 93%, 94%, 95%, 96%, 97%, 98%, 99% or 100% sequence identity to SEQ ID NO: 165. In some embodiments, the one or more non-coding RNAs detected in a sample comprise at least about 70%, 75%, 80%, 85%, 90%, 91%, 92%, 93%, 94%, 95%, 96%, 97%, 98%, 99% or 100% sequence identity to SEQ ID NO: 166. In some embodiments, the one or more non-coding RNAs detected in a sample comprise at least about 70%, 75%, 80%, 85%, 90%, 91%, 92%, 93%, 94%, 95%, 96%, 97%, 98%, 99% or 100% sequence identity to SEQ ID NO: 167. In some embodiments, the one or more non-coding RNAs detected in a sample comprise at least about 70%, 75%, 80%, 85%, 90%, 91%, 92%, 93%, 94%, 95%, 96%, 97%, 98%, 99% or 100% sequence identity to SEQ ID NO: 168. In some embodiments, the one or more non-coding RNAs detected in a sample comprise at least about 70%, 75%, 80%, 85%, 90%, 91%, 92%, 93%, 94%, 95%, 96%, 97%, 98%, 99% or 100% sequence identity to SEQ ID NO: 169. In some embodiments, the one or more non-coding RNAs detected in a sample comprise at least about 70%, 75%, 80%, 85%, 90%, 91%, 92%, 93%, 94%, 95%, 96%, 97%, 98%, 99% or 100% sequence identity to SEQ ID NO: 170. In some embodiments, the one or more non-coding RNAs detected in a sample comprise at least about 70%, 75%, 80%, 85%, 90%, 91%, 92%, 93%, 94%, 95%, 96%, 97%, 98%, 99% or 100% sequence identity to SEQ ID NO: 171. In some embodiments, the one or more non-coding RNAs detected in a sample comprise at least about 70%, 75%, 80%, 85%, 90%, 91%, 92%, 93%, 94%, 95%, 96%, 97%, 98%, 99% or 100% sequence identity to SEQ ID NO: 172. In some embodiments, the one or more non-coding RNAs detected in a sample comprise at least about 70%, 75%, 80%, 85%, 90%, 91%, 92%, 93%, 94%, 95%, 96%, 97%, 98%, 99% or 100% sequence identity to SEQ ID NO: 173. In some embodiments, the one or more non-coding RNAs detected in a sample comprise at least about 70%, 75%, 80%, 85%, 90%, 91%, 92%, 93%, 94%, 95%, 96%, 97%, 98%, 99% or 100% sequence identity to SEQ ID NO: 174. In some embodiments, the one or more non-coding RNAs detected in a sample comprise at least about 70%, 75%, 80%, 85%, 90%, 91%, 92%, 93%, 94%, 95%, 96%, 97%, 98%, 99% or 100% sequence identity to SEQ ID NO: 175. In some embodiments, the one or more non-coding RNAs detected in a sample comprise at least about 70%, 75%, 80%, 85%, 90%, 91%, 92%, 93%, 94%, 95%, 96%, 97%, 98%, 99% or 100% sequence identity to SEQ ID NO: 176. In some embodiments, the one or more non-coding RNAs detected in a sample comprise at least about 70%, 75%, 80%, 85%, 90%, 91%, 92%, 93%, 94%, 95%, 96%, 97%, 98%, 99% or 100% sequence identity to SEQ ID NO: 177. In some embodiments, the one or more non-coding RNAs detected in a sample comprise at least about 70%, 75%, 80%, 85%, 90%, 91%, 92%, 93%, 94%, 95%, 96%, 97%, 98%, 99% or 100% sequence identity to SEQ ID NO: 178. In some embodiments, the one or more non-coding RNAs detected in a sample comprise at least about 70%, 75%, 80%, 85%, 90%, 91%, 92%, 93%, 94%, 95%, 96%, 97%, 98%, 99% or 100% sequence identity to SEQ ID NO: 179. In some embodiments, the one or more non-coding RNAs detected in a sample comprise at least about 70%, 75%, 80%, 85%, 90%, 91%, 92%, 93%, 94%, 95%, 96%, 97%, 98%, 99% or 100% sequence identity to SEQ ID NO: 180. In some embodiments, the one or more non-coding RNAs detected in a sample comprise at least about 70%, 75%, 80%, 85%, 90%, 91%, 92%, 93%, 94%, 95%, 96%, 97%, 98%, 99% or 100% sequence identity to SEQ ID NO: 181. In some embodiments, the one or more non-coding RNAs detected in a sample comprise at least about 70%, 75%, 80%, 85%, 90%, 91%, 92%, 93%, 94%, 95%, 96%, 97%, 98%, 99% or 100% sequence identity to SEQ ID NO: 182. In some embodiments, the one or more non-coding RNAs detected in a sample comprise at least about 70%, 75%, 80%, 85%, 90%, 91%, 92%, 93%, 94%, 95%, 96%, 97%, 98%, 99% or 100% sequence identity to SEQ ID NO: 183. In some embodiments, the one or more non-coding RNAs detected in a sample comprise at least about 70%, 75%, 80%, 85%, 90%, 91%, 92%, 93%, 94%, 95%, 96%, 97%, 98%, 99% or 100% sequence identity to SEQ ID NO: 184. In some embodiments, the one or more non-coding RNAs detected in a sample comprise at least about 70%, 75%, 80%, 85%, 90%, 91%, 92%, 93%, 94%, 95%, 96%, 97%, 98%, 99% or 100% sequence identity to SEQ ID NO: 185. In some embodiments, the one or more non-coding RNAs detected in a sample comprise at least about 70%, 75%, 80%, 85%, 90%, 91%, 92%, 93%, 94%, 95%, 96%, 97%, 98%, 99% or 100% sequence identity to SEQ ID NO: 186. In some embodiments, the one or more non-coding RNAs detected in a sample comprise at least about 70%, 75%, 80%, 85%, 90%, 91%, 92%, 93%, 94%, 95%, 96%, 97%, 98%, 99% or 100% sequence identity to SEQ ID NO: 187. In some embodiments, the one or more non-coding RNAs detected in a sample comprise at least about 70%, 75%, 80%, 85%, 90%, 91%, 92%, 93%, 94%, 95%, 96%, 97%, 98%, 99% or 100% sequence identity to SEQ ID NO: 188. In some embodiments, the one or more non-coding RNAs detected in a sample comprise at least about 70%, 75%, 80%, 85%, 90%, 91%, 92%, 93%, 94%, 95%, 96%, 97%, 98%, 99% or 100% sequence identity to SEQ ID NO: 189. In some embodiments, the one or more non-coding RNAs detected in a sample comprise at least about 70%, 75%, 80%, 85%, 90%, 91%, 92%, 93%, 94%, 95%, 96%, 97%, 98%, 99% or 100% sequence identity to SEQ ID NO: 190. In some embodiments, the one or more non-coding RNAs detected in a sample comprise at least about 70%, 75%, 80%, 85%, 90%, 91%, 92%, 93%, 94%, 95%, 96%, 97%, 98%, 99% or 100% sequence identity to SEQ ID NO: 191. In some embodiments, the one or more non-coding RNAs detected in a sample comprise at least about 70%, 75%, 80%, 85%, 90%, 91%, 92%, 93%, 94%, 95%, 96%, 97%, 98%, 99% or 100% sequence identity to SEQ ID NO: 192. In some embodiments, the one or more non-coding RNAs detected in a sample comprise at least about 70%, 75%, 80%, 85%, 90%, 91%, 92%, 93%, 94%, 95%, 96%, 97%, 98%, 99% or 100% sequence identity to SEQ ID NO: 193. In some embodiments, the one or more non-coding RNAs detected in a sample comprise at least about 70%, 75%, 80%, 85%, 90%, 91%, 92%, 93%, 94%, 95%, 96%, 97%, 98%, 99% or 100% sequence identity to SEQ ID NO: 194. In some embodiments, the one or more non-coding RNAs detected in a sample comprise at least about 70%, 75%, 80%, 85%, 90%, 91%, 92%, 93%, 94%, 95%, 96%, 97%, 98%, 99% or 100% sequence identity to SEQ ID NO: 195. In some embodiments, the one or more non-coding RNAs detected in a sample comprise at least about 70%, 75%, 80%, 85%, 90%, 91%, 92%, 93%, 94%, 95%, 96%, 97%, 98%, 99% or 100% sequence identity to SEQ ID NO: 196. In some embodiments, the one or more non-coding RNAs detected in a sample comprise at least about 70%, 75%, 80%, 85%, 90%, 91%, 92%, 93%, 94%, 95%, 96%, 97%, 98%, 99% or 100% sequence identity to SEQ ID NO: 197. In some embodiments, the one or more non-coding RNAs detected in a sample comprise at least about 70%, 75%, 80%, 85%, 90%, 91%, 92%, 93%, 94%, 95%, 96%, 97%, 98%, 99% or 100% sequence identity to SEQ ID NO: 198. In some embodiments, the one or more non-coding RNAs detected in a sample comprise at least about 70%, 75%, 80%, 85%, 90%, 91%, 92%, 93%, 94%, 95%, 96%, 97%, 98%, 99% or 100% sequence identity to SEQ ID NO: 199. In some embodiments, the one or more non-coding RNAs detected in a sample comprise at least about 70%, 75%, 80%, 85%, 90%, 91%, 92%, 93%, 94%, 95%, 96%, 97%, 98%, 99% or 100% sequence identity to SEQ ID NO: 200. In some embodiments, the one or more non-coding RNAs detected in a sample comprise at least about 70%, 75%, 80%, 85%, 90%, 91%, 92%, 93%, 94%, 95%, 96%, 97%, 98%, 99% or 100% sequence identity to SEQ ID NO: 201. In some embodiments, the one or more non-coding RNAs detected in a sample comprise at least about 70%, 75%, 80%, 85%, 90%, 91%, 92%, 93%, 94%, 95%, 96%, 97%, 98%, 99% or 100% sequence identity to SEQ ID NO: 202. In some embodiments, the one or more non-coding RNAs detected in a sample comprise at least about 70%, 75%, 80%, 85%, 90%, 91%, 92%, 93%, 94%, 95%, 96%, 97%, 98%, 99% or 100% sequence identity to SEQ ID NO: 203. In some embodiments, the one or more non-coding RNAs detected in a sample comprise at least about 70%, 75%, 80%, 85%, 90%, 91%, 92%, 93%, 94%, 95%, 96%, 97%, 98%, 99% or 100% sequence identity to SEQ ID NO: 204. In some embodiments, the one or more non-coding RNAs detected in a sample comprise at least about 70%, 75%, 80%, 85%, 90%, 91%, 92%, 93%, 94%, 95%, 96%, 97%, 98%, 99% or 100% sequence identity to SEQ ID NO: 205. In some embodiments, the one or more non-coding RNAs detected in a sample comprise at least about 70%, 75%, 80%, 85%, 90%, 91%, 92%, 93%, 94%, 95%, 96%, 97%, 98%, 99% or 100% sequence identity to SEQ ID NO: 206. In some embodiments, the one or more non-coding RNAs detected in a sample comprise at least about 70%, 75%, 80%, 85%, 90%, 91%, 92%, 93%, 94%, 95%, 96%, 97%, 98%, 99% or 100% sequence identity to SEQ ID NO: 207. In some embodiments, the one or more non-coding RNAs detected in a sample comprise at least about 70%, 75%, 80%, 85%, 90%, 91%, 92%, 93%, 94%, 95%, 96%, 97%, 98%, 99% or 100% sequence identity to SEQ ID NO: 208. In some embodiments, the one or more non-coding RNAs detected in a sample comprise at least about 70%, 75%, 80%, 85%, 90%, 91%, 92%, 93%, 94%, 95%, 96%, 97%, 98%, 99% or 100% sequence identity to SEQ ID NO: 209. In some embodiments, the one or more non-coding RNAs detected in a sample comprise at least about 70%, 75%, 80%, 85%, 90%, 91%, 92%, 93%, 94%, 95%, 96%, 97%, 98%, 99% or 100% sequence identity to SEQ ID NO: 210. In some embodiments, the one or more non-coding RNAs detected in a sample comprise at least about 70%, 75%, 80%, 85%, 90%, 91%, 92%, 93%, 94%, 95%, 96%, 97%, 98%, 99% or 100% sequence identity to SEQ ID NO: 211. In some embodiments, the one or more non-coding RNAs detected in a sample comprise at least about 70%, 75%, 80%, 85%, 90%, 91%, 92%, 93%, 94%, 95%, 96%, 97%, 98%, 99% or 100% sequence identity to SEQ ID NO: 212. In some embodiments, the one or more non-coding RNAs detected in a sample comprise at least about 70%, 75%, 80%, 85%, 90%, 91%, 92%, 93%, 94%, 95%, 96%, 97%, 98%, 99% or 100% sequence identity to SEQ ID NO: 213. In some embodiments, the one or more non-coding RNAs detected in a sample comprise at least about 70%, 75%, 80%, 85%, 90%, 91%, 92%, 93%, 94%, 95%, 96%, 97%, 98%, 99% or 100% sequence identity to SEQ ID NO: 214. In some embodiments, the one or more non-coding RNAs detected in a sample comprise at least about 70%, 75%, 80%, 85%, 90%, 91%, 92%, 93%, 94%, 95%, 96%, 97%, 98%, 99% or 100% sequence identity to SEQ ID NO: 215. In some embodiments, the one or more non-coding RNAs detected in a sample comprise at least about 70%, 75%, 80%, 85%, 90%, 91%, 92%, 93%, 94%, 95%, 96%, 97%, 98%, 99% or 100% sequence identity to SEQ ID NO: 216. In some embodiments, the one or more non-coding RNAs detected in a sample comprise at least about 70%, 75%, 80%, 85%, 90%, 91%, 92%, 93%, 94%, 95%, 96%, 97%, 98%, 99% or 100% sequence identity to SEQ ID NO: 217. In some embodiments, the one or more non-coding RNAs detected in a sample comprise at least about 70%, 75%, 80%, 85%, 90%, 91%, 92%, 93%, 94%, 95%, 96%, 97%, 98%, 99% or 100% sequence identity to SEQ ID NO: 218. In some embodiments, the one or more non-coding RNAs detected in a sample comprise at least about 70%, 75%, 80%, 85%, 90%, 91%, 92%, 93%, 94%, 95%, 96%, 97%, 98%, 99% or 100% sequence identity to SEQ ID NO: 219. In some embodiments, the one or more non-coding RNAs detected in a sample comprise at least about 70%, 75%, 80%, 85%, 90%, 91%, 92%, 93%, 94%, 95%, 96%, 97%, 98%, 99% or 100% sequence identity to SEQ ID NO: 220. In some embodiments, the one or more non-coding RNAs detected in a sample comprise at least about 70%, 75%, 80%, 85%, 90%, 91%, 92%, 93%, 94%, 95%, 96%, 97%, 98%, 99% or 100% sequence identity to SEQ ID NO: 221. In some embodiments, the one or more non-coding RNAs detected in a sample comprise at least about 70%, 75%, 80%, 85%, 90%, 91%, 92%, 93%, 94%, 95%, 96%, 97%, 98%, 99% or 100% sequence identity to SEQ ID NO: 222. In some embodiments, the one or more non-coding RNAs detected in a sample comprise at least about 70%, 75%, 80%, 85%, 90%, 91%, 92%, 93%, 94%, 95%, 96%, 97%, 98%, 99% or 100% sequence identity to SEQ ID NO: 223. In some embodiments, the one or more non-coding RNAs detected in a sample comprise at least about 70%, 75%, 80%, 85%, 90%, 91%, 92%, 93%, 94%, 95%, 96%, 97%, 98%, 99% or 100% sequence identity to SEQ ID NO: 224. In some embodiments, the one or more non-coding RNAs detected in a sample comprise at least about 70%, 75%, 80%, 85%, 90%, 91%, 92%, 93%, 94%, 95%, 96%, 97%, 98%, 99% or 100% sequence identity to SEQ ID NO: 225. In some embodiments, the one or more non-coding RNAs detected in a sample comprise at least about 70%, 75%, 80%, 85%, 90%, 91%, 92%, 93%, 94%, 95%, 96%, 97%, 98%, 99% or 100% sequence identity to SEQ ID NO: 226. In some embodiments, the one or more non-coding RNAs detected in a sample comprise at least about 70%, 75%, 80%, 85%, 90%, 91%, 92%, 93%, 94%, 95%, 96%, 97%, 98%, 99% or 100% sequence identity to SEQ ID NO: 227. In some embodiments, the one or more non-coding RNAs detected in a sample comprise at least 70%, 75%, 80%, 85%, 90%, 91%, 92%, 93%, 94%, 95%, 96%, 97%, 98%, 99% or 100% sequence identity to SEQ ID NO: 228. In some embodiments, the one or more non-coding RNAs detected in a sample comprise at least about 70%, 75%, 80%, 85%, 90%, 91%, 92%, 93%, 94%, 95%, 96%, 97%, 98%, 99% or 100% sequence identity to SEQ ID NO: 229. In some embodiments, the one or more non-coding RNAs detected in a sample comprise at least about 70%, 75%, 80%, 85%, 90%, 91%, 92%, 93%, 94%, 95%, 96%, 97%, 98%, 99% or 100% sequence identity to SEQ ID NO: 230. In some embodiments, the one or more non-coding RNAs detected in a sample comprise at least about 70%, 75%, 80%, 85%, 90%, 91%, 92%, 93%, 94%, 95%, 96%, 97%, 98%, 99% or 100% sequence identity to SEQ ID NO: 231. In some embodiments, the one or more non-coding RNAs detected in a sample comprise at least about 70%, 75%, 80%, 85%, 90%, 91%, 92%, 93%, 94%, 95%, 96%, 97%, 98%, 99% or 100% sequence identity to SEQ ID NO: 232. In some embodiments, the one or more non-coding RNAs detected in a sample comprise at least about 70%, 75%, 80%, 85%, 90%, 91%, 92%, 93%, 94%, 95%, 96%, 97%, 98%, 99% or 100% sequence identity to SEQ ID NO: 233. In some embodiments, the one or more non-coding RNAs detected in a sample comprise at least about 70%, 75%, 80%, 85%, 90%, 91%, 92%, 93%, 94%, 95%, 96%, 97%, 98%, 99% or 100% sequence identity to SEQ ID NO: 234. In some embodiments, the one or more non-coding RNAs detected in a sample comprise at least about 70%, 75%, 80%, 85%, 90%, 91%, 92%, 93%, 94%, 95%, 96%, 97%, 98%, 99% or 100% sequence identity to SEQ ID NO: 235. In some embodiments, the one or more non-coding RNAs detected in a sample comprise at least about 70%, 75%, 80%, 85%, 90%, 91%, 92%, 93%, 94%, 95%, 96%, 97%, 98%, 99% or 100% sequence identity to SEQ ID NO: 236. In some embodiments, the one or more non-coding RNAs detected in a sample comprise at least about 70%, 75%, 80%, 85%, 90%, 91%, 92%, 93%, 94%, 95%, 96%, 97%, 98%, 99% or 100% sequence identity to SEQ ID NO: 237. In some embodiments, the one or more non-coding RNAs detected in a sample comprise at least about 70%, 75%, 80%, 85%, 90%, 91%, 92%, 93%, 94%, 95%, 96%, 97%, 98%, 99% or 100% sequence identity to SEQ ID NO: 238. In some embodiments, the one or more non-coding RNAs detected in a sample comprise at least about 70%, 75%, 80%, 85%, 90%, 91%, 92%, 93%, 94%, 95%, 96%, 97%, 98%, 99% or 100% sequence identity to SEQ ID NO: 239. In some embodiments, the one or more non-coding RNAs detected in a sample comprise at least about 70%, 75%, 80%, 85%, 90%, 91%, 92%, 93%, 94%, 95%, 96%, 97%, 98%, 99% or 100% sequence identity to SEQ ID NO: 240. In some embodiments, the one or more non-coding RNAs detected in a sample comprise at least about 70%, 75%, 80%, 85%, 90%, 91%, 92%, 93%, 94%, 95%, 96%, 97%, 98%, 99% or 100% sequence identity to SEQ ID NO: 241. In some embodiments, the one or more non-coding RNAs detected in a sample comprise at least about 70%, 75%, 80%, 85%, 90%, 91%, 92%, 93%, 94%, 95%, 96%, 97%, 98%, 99% or 100% sequence identity to SEQ ID NO: 242. In some embodiments, the one or more non-coding RNAs detected in a sample comprise at least about 70%, 75%, 80%, 85%, 90%, 91%, 92%, 93%, 94%, 95%, 96%, 97%, 98%, 99% or 100% sequence identity to SEQ ID NO: 243. In some embodiments, the one or more non-coding RNAs detected in a sample comprise at least about 70%, 75%, 80%, 85%, 90%, 91%, 92%, 93%, 94%, 95%, 96%, 97%, 98%, 99% or 100% sequence identity to SEQ ID NO: 244. In some embodiments, the one or more non-coding RNAs detected in a sample comprise at least about 70%, 75%, 80%, 85%, 90%, 91%, 92%, 93%, 94%, 95%, 96%, 97%, 98%, 99% or 100% sequence identity to SEQ ID NO: 245. In some embodiments, the one or more non-coding RNAs detected in a sample comprise at least about 70%, 75%, 80%, 85%, 90%, 91%, 92%, 93%, 94%, 95%, 96%, 97%, 98%, 99% or 100% sequence identity to SEQ ID NO: 246. In some embodiments, the one or more non-coding RNAs detected in a sample comprise at least about 70%, 75%, 80%, 85%, 90%, 91%, 92%, 93%, 94%, 95%, 96%, 97%, 98%, 99% or 100% sequence identity to SEQ ID NO: 247. In some embodiments, the one or more non-coding RNAs detected in a sample comprise at least about 70%, 75%, 80%, 85%, 90%, 91%, 92%, 93%, 94%, 95%, 96%, 97%, 98%, 99% or 100% sequence identity to SEQ ID NO: 248. In some embodiments, the one or more non-coding RNAs detected in a sample comprise at least about 70%, 75%, 80%, 85%, 90%, 91%, 92%, 93%, 94%, 95%, 96%, 97%, 98%, 99% or 100% sequence identity to SEQ ID NO: 249. In some embodiments, the one or more non-coding RNAs detected in a sample comprise at least about 70%, 75%, 80%, 85%, 90%, 91%, 92%, 93%, 94%, 95%, 96%, 97%, 98%, 99% or 100% sequence identity to SEQ ID NO: 250. In some embodiments, the one or more non-coding RNAs detected in a sample comprise at least about 70%, 75%, 80%, 85%, 90%, 91%, 92%, 93%, 94%, 95%, 96%, 97%, 98%, 99% or 100% sequence identity to SEQ ID NO: 251. In some embodiments, the one or more non-coding RNAs detected in a sample comprise at least about 70%, 75%, 80%, 85%, 90%, 91%, 92%, 93%, 94%, 95%, 96%, 97%, 98%, 99% or 100% sequence identity to SEQ ID NO: 252. In some embodiments, the one or more non-coding RNAs detected in a sample comprise at least about 70%, 75%, 80%, 85%, 90%, 91%, 92%, 93%, 94%, 95%, 96%, 97%, 98%, 99% or 100% sequence identity to SEQ ID NO: 253. In some embodiments, the one or more non-coding RNAs detected in a sample comprise at least about 70%, 75%, 80%, 85%, 90%, 91%, 92%, 93%, 94%, 95%, 96%, 97%, 98%, 99% or 100% sequence identity to SEQ ID NO: 254. In some embodiments, the one or more non-coding RNAs detected in a sample comprise at least about 70%, 75%, 80%, 85%, 90%, 91%, 92%, 93%, 94%, 95%, 96%, 97%, 98%, 99% or 100% sequence identity to SEQ ID NO: 255. In some embodiments, the one or more non-coding RNAs detected in a sample comprise at least about 70%, 75%, 80%, 85%, 90%, 91%, 92%, 93%, 94%, 95%, 96%, 97%, 98%, 99% or 100% sequence identity to SEQ ID NO: 256. In some embodiments, the one or more non-coding RNAs detected in a sample comprise at least about 70%, 75%, 80%, 85%, 90%, 91%, 92%, 93%, 94%, 95%, 96%, 97%, 98%, 99% or 100% sequence identity to SEQ ID NO: 257. In some embodiments, the one or more non-coding RNAs detected in a sample comprise at least about 70%, 75%, 80%, 85%, 90%, 91%, 92%, 93%, 94%, 95%, 96%, 97%, 98%, 99% or 100% sequence identity to SEQ ID NO: 258. In some embodiments, the one or more non-coding RNAs detected in a sample comprise at least about 70%, 75%, 80%, 85%, 90%, 91%, 92%, 93%, 94%, 95%, 96%, 97%, 98%, 99% or 100% sequence identity to SEQ ID NO: 259. In some embodiments, the one or more non-coding RNAs detected in a sample comprise at least about 70%, 75%, 80%, 85%, 90%, 91%, 92%, 93%, 94%, 95%, 96%, 97%, 98%, 99% or 100% sequence identity to SEQ ID NO: 260. In some embodiments, the one or more non-coding RNAs detected in a sample comprise at least about 70%, 75%, 80%, 85%, 90%, 91%, 92%, 93%, 94%, 95%, 96%, 97%, 98%, 99% or 100% sequence identity to SEQ ID NO: 261. In some embodiments, the one or more non-coding RNAs detected in a sample comprise at least about 70%, 75%, 80%, 85%, 90%, 91%, 92%, 93%, 94%, 95%, 96%, 97%, 98%, 99% or 100% sequence identity to SEQ ID NO: 262. In some embodiments, the one or more non-coding RNAs detected in a sample comprise at least about 70%, 75%, 80%, 85%, 90%, 91%, 92%, 93%, 94%, 95%, 96%, 97%, 98%, 99% or 100% sequence identity to SEQ ID NO: 263. In some embodiments, the one or more non-coding RNAs detected in a sample comprise at least about 70%, 75%, 80%, 85%, 90%, 91%, 92%, 93%, 94%, 95%, 96%, 97%, 98%, 99% or 100% sequence identity to SEQ ID NO: 264. In some embodiments, the one or more non-coding RNAs detected in a sample comprise at least about 70%, 75%, 80%, 85%, 90%, 91%, 92%, 93%, 94%, 95%, 96%, 97%, 98%, 99% or 100% sequence identity to SEQ ID NO: 265. In some embodiments, the one or more non-coding RNAs detected in a sample comprise at least about 70%, 75%, 80%, 85%, 90%, 91%, 92%, 93%, 94%, 95%, 96%, 97%, 98%, 99% or 100% sequence identity to SEQ ID NO: 266. In some embodiments, the one or more non-coding RNAs detected in a sample comprise at least about 70%, 75%, 80%, 85%, 90%, 91%, 92%, 93%, 94%, 95%, 96%, 97%, 98%, 99% or 100% sequence identity to SEQ ID NO: 267. In some embodiments, the one or more non-coding RNAs detected in a sample comprise at least about 70%, 75%, 80%, 85%, 90%, 91%, 92%, 93%, 94%, 95%, 96%, 97%, 98%, 99% or 100% sequence identity to SEQ ID NO: 268. In some embodiments, the one or more non-coding RNAs detected in a sample comprise at least about 70%, 75%, 80%, 85%, 90%, 91%, 92%, 93%, 94%, 95%, 96%, 97%, 98%, 99% or 100% sequence identity to SEQ ID NO: 269. In some embodiments, the one or more non-coding RNAs detected in a sample comprise at least about 70%, 75%, 80%, 85%, 90%, 91%, 92%, 93%, 94%, 95%, 96%, 97%, 98%, 99% or 100% sequence identity to SEQ ID NO: 270. In some embodiments, the one or more non-coding RNAs detected in a sample comprise at least about 70%, 75%, 80%, 85%, 90%, 91%, 92%, 93%, 94%, 95%, 96%, 97%, 98%, 99% or 100% sequence identity to SEQ ID NO: 271. In some embodiments, the one or more non-coding RNAs detected in a sample comprise at least about 70%, 75%, 80%, 85%, 90%, 91%, 92%, 93%, 94%, 95%, 96%, 97%, 98%, 99% or 100% sequence identity to SEQ ID NO: 272. In some embodiments, the one or more non-coding RNAs detected in a sample comprise at least about 70%, 75%, 80%, 85%, 90%, 91%, 92%, 93%, 94%, 95%, 96%, 97%, 98%, 99% or 100% sequence identity to SEQ ID NO: 273. In some embodiments, the one or more non-coding RNAs detected in a sample comprise at least about 70%, 75%, 80%, 85%, 90%, 91%, 92%, 93%, 94%, 95%, 96%, 97%, 98%, 99% or 100% sequence identity to SEQ ID NO: 274. In some embodiments, the one or more non-coding RNAs detected in a sample comprise at least about 70%, 75%, 80%, 85%, 90%, 91%, 92%, 93%, 94%, 95%, 96%, 97%, 98%, 99% or 100% sequence identity to SEQ ID NO: 275. In some embodiments, the one or more non-coding RNAs detected in a sample comprise at least about 70%, 75%, 80%, 85%, 90%, 91%, 92%, 93%, 94%, 95%, 96%, 97%, 98%, 99% or 100% sequence identity to SEQ ID NO: 276. In some embodiments, the one or more non-coding RNAs detected in a sample comprise at least about 70%, 75%, 80%, 85%, 90%, 91%, 92%, 93%, 94%, 95%, 96%, 97%, 98%, 99% or 100% sequence identity to SEQ ID NO: 277. In some embodiments, the one or more non-coding RNAs detected in a sample comprise at least about 70%, 75%, 80%, 85%, 90%, 91%, 92%, 93%, 94%, 95%, 96%, 97%, 98%, 99% or 100% sequence identity to SEQ ID NO: 278. In some embodiments, the one or more non-coding RNAs detected in a sample comprise at least about 70%, 75%, 80%, 85%, 90%, 91%, 92%, 93%, 94%, 95%, 96%, 97%, 98%, 99% or 100% sequence identity to SEQ ID NO: 279. In some embodiments, the one or more non-coding RNAs detected in a sample comprise at least about 70%, 75%, 80%, 85%, 90%, 91%, 92%, 93%, 94%, 95%, 96%, 97%, 98%, 99% or 100% sequence identity to SEQ ID NO: 280. In some embodiments, the one or more non-coding RNAs detected in a sample comprise at least about 70%, 75%, 80%, 85%, 90%, 91%, 92%, 93%, 94%, 95%, 96%, 97%, 98%, 99% or 100% sequence identity to SEQ ID NO: 281. In some embodiments, the one or more non-coding RNAs detected in a sample comprise at least about 70%, 75%, 80%, 85%, 90%, 91%, 92%, 93%, 94%, 95%, 96%, 97%, 98%, 99% or 100% sequence identity to SEQ ID NO: 282. In some embodiments, the one or more non-coding RNAs detected in a sample comprise at least about 70%, 75%, 80%, 85%, 90%, 91%, 92%, 93%, 94%, 95%, 96%, 97%, 98%, 99% or 100% sequence identity to SEQ ID NO: 283. In some embodiments, the one or more non-coding RNAs detected in a sample comprise at least about 70%, 75%, 80%, 85%, 90%, 91%, 92%, 93%, 94%, 95%, 96%, 97%, 98%, 99% or 100% sequence identity to SEQ ID NO: 284. In some embodiments, the one or more non-coding RNAs detected in a sample comprise at least about 70%, 75%, 80%, 85%, 90%, 91%, 92%, 93%, 94%, 95%, 96%, 97%, 98%, 99% or 100% sequence identity to SEQ ID NO: 285. In some embodiments, the one or more non-coding RNAs detected in a sample comprise at least about 70%, 75%, 80%, 85%, 90%, 91%, 92%, 93%, 94%, 95%, 96%, 97%, 98%, 99% or 100% sequence identity to SEQ ID NO: 286. In some embodiments, the one or more non-coding RNAs detected in a sample comprise at least about 70%, 75%, 80%, 85%, 90%, 91%, 92%, 93%, 94%, 95%, 96%, 97%, 98%, 99% or 100% sequence identity to SEQ ID NO: 287. In some embodiments, the one or more non-coding RNAs detected in a sample comprise at least about 70%, 75%, 80%, 85%, 90%, 91%, 92%, 93%, 94%, 95%, 96%, 97%, 98%, 99% or 100% sequence identity to SEQ ID NO: 288. In some embodiments, the one or more non-coding RNAs detected in a sample comprise at least about 70%, 75%, 80%, 85%, 90%, 91%, 92%, 93%, 94%, 95%, 96%, 97%, 98%, 99% or 100% sequence identity to SEQ ID NO: 289. In some embodiments, the one or more non-coding RNAs detected in a sample comprise at least about 70%, 75%, 80%, 85%, 90%, 91%, 92%, 93%, 94%, 95%, 96%, 97%, 98%, 99% or 100% sequence identity to SEQ ID NO: 290. In some embodiments, the one or more non-coding RNAs detected in a sample comprise at least about 70%, 75%, 80%, 85%, 90%, 91%, 92%, 93%, 94%, 95%, 96%, 97%, 98%, 99% or 100% sequence identity to SEQ ID NO: 291. In some embodiments, the one or more non-coding RNAs detected in a sample comprise at least about 70%, 75%, 80%, 85%, 90%, 91%, 92%, 93%, 94%, 95%, 96%, 97%, 98%, 99% or 100% sequence identity to SEQ ID NO: 292. In some embodiments, the one or more non-coding RNAs detected in a sample comprise at least about 70%, 75%, 80%, 85%, 90%, 91%, 92%, 93%, 94%, 95%, 96%, 97%, 98%, 99% or 100% sequence identity to SEQ ID NO: 293. In some embodiments, the one or more non-coding RNAs detected in a sample comprise at least about 70%, 75%, 80%, 85%, 90%, 91%, 92%, 93%, 94%, 95%, 96%, 97%, 98%, 99% or 100% sequence identity to SEQ ID NO: 294. In some embodiments, the one or more non-coding RNAs detected in a sample comprise at least about 70%, 75%, 80%, 85%, 90%, 91%, 92%, 93%, 94%, 95%, 96%, 97%, 98%, 99% or 100% sequence identity to SEQ ID NO: 295. In some embodiments, the one or more non-coding RNAs detected in a sample comprise at least about 70%, 75%, 80%, 85%, 90%, 91%, 92%, 93%, 94%, 95%, 96%, 97%, 98%, 99% or 100% sequence identity to SEQ ID NO: 296. In some embodiments, the one or more non-coding RNAs detected in a sample comprise at least about 70%, 75%, 80%, 85%, 90%, 91%, 92%, 93%, 94%, 95%, 96%, 97%, 98%, 99% or 100% sequence identity to SEQ ID NO: 297. In some embodiments, the one or more non-coding RNAs detected in a sample comprise at least about 70%, 75%, 80%, 85%, 90%, 91%, 92%, 93%, 94%, 95%, 96%, 97%, 98%, 99% or 100% sequence identity to SEQ ID NO: 298. In some embodiments, the one or more non-coding RNAs detected in a sample comprise at least about 70%, 75%, 80%, 85%, 90%, 91%, 92%, 93%, 94%, 95%, 96%, 97%, 98%, 99% or 100% sequence identity to SEQ ID NO: 299. In some embodiments, the one or more non-coding RNAs detected in a sample comprise at least about 70%, 75%, 80%, 85%, 90%, 91%, 92%, 93%, 94%, 95%, 96%, 97%, 98%, 99% or 100% sequence identity to SEQ ID NO: 300. In some embodiments, the one or more non-coding RNAs detected in a sample comprise at least about 70%, 75%, 80%, 85%, 90%, 91%, 92%, 93%, 94%, 95%, 96%, 97%, 98%, 99% or 100% sequence identity to SEQ ID NO: 301. In some embodiments, the one or more non-coding RNAs detected in a sample comprise at least about 70%, 75%, 80%, 85%, 90%, 91%, 92%, 93%, 94%, 95%, 96%, 97%, 98%, 99% or 100% sequence identity to SEQ ID NO: 302. In some embodiments, the one or more non-coding RNAs detected in a sample comprise at least about 70%, 75%, 80%, 85%, 90%, 91%, 92%, 93%, 94%, 95%, 96%, 97%, 98%, 99% or 100% sequence identity to SEQ ID NO: 303. In some embodiments, the one or more non-coding RNAs detected in a sample comprise at least about 70%, 75%, 80%, 85%, 90%, 91%, 92%, 93%, 94%, 95%, 96%, 97%, 98%, 99% or 100% sequence identity to SEQ ID NO: 304. In some embodiments, the one or more non-coding RNAs detected in a sample comprise at least about 70%, 75%, 80%, 85%, 90%, 91%, 92%, 93%, 94%, 95%, 96%, 97%, 98%, 99% or 100% sequence identity to SEQ ID NO: 305. In some embodiments, the one or more non-coding RNAs detected in a sample comprise at least about 70%, 75%, 80%, 85%, 90%, 91%, 92%, 93%, 94%, 95%, 96%, 97%, 98%, 99% or 100% sequence identity to SEQ ID NO: 306. In some embodiments, the one or more non-coding RNAs detected in a sample comprise at least about 70%, 75%, 80%, 85%, 90%, 91%, 92%, 93%, 94%, 95%, 96%, 97%, 98%, 99% or 100% sequence identity to SEQ ID NO: 307. In some embodiments, the one or more non-coding RNAs detected in a sample comprise at least about 70%, 75%, 80%, 85%, 90%, 91%, 92%, 93%, 94%, 95%, 96%, 97%, 98%, 99% or 100% sequence identity to SEQ ID NO: 308. In some embodiments, the one or more non-coding RNAs detected in a sample comprise at least about 70%, 75%, 80%, 85%, 90%, 91%, 92%, 93%, 94%, 95%, 96%, 97%, 98%, 99% or 100% sequence identity to SEQ ID NO: 309. In some embodiments, the one or more non-coding RNAs detected in a sample comprise at least about 70%, 75%, 80%, 85%, 90%, 91%, 92%, 93%, 94%, 95%, 96%, 97%, 98%, 99% or 100% sequence identity to SEQ ID NO: 310. In some embodiments, the one or more non-coding RNAs detected in a sample comprise at least about 70%, 75%, 80%, 85%, 90%, 91%, 92%, 93%, 94%, 95%, 96%, 97%, 98%, 99% or 100% sequence identity to SEQ ID NO: 311. In some embodiments, the one or more non-coding RNAs detected in a sample comprise at least about 70%, 75%, 80%, 85%, 90%, 91%, 92%, 93%, 94%, 95%, 96%, 97%, 98%, 99% or 100% sequence identity to SEQ ID NO: 312. In some embodiments, the one or more non-coding RNAs detected in a sample comprise at least about 70%, 75%, 80%, 85%, 90%, 91%, 92%, 93%, 94%, 95%, 96%, 97%, 98%, 99% or 100% sequence identity to SEQ ID NO: 313. In some embodiments, the one or more non-coding RNAs detected in a sample comprise at least about 70%, 75%, 80%, 85%, 90%, 91%, 92%, 93%, 94%, 95%, 96%, 97%, 98%, 99% or 100% sequence identity to SEQ ID NO: 314. In some embodiments, the one or more non-coding RNAs detected in a sample comprise at least about 70%, 75%, 80%, 85%, 90%, 91%, 92%, 93%, 94%, 95%, 96%, 97%, 98%, 99% or 100% sequence identity to SEQ ID NO: 315. In some embodiments, the one or more non-coding RNAs detected in a sample comprise at least about 70%, 75%, 80%, 85%, 90%, 91%, 92%, 93%, 94%, 95%, 96%, 97%, 98%, 99% or 100% sequence identity to SEQ ID NO: 316. In some embodiments, the one or more non-coding RNAs detected in a sample comprise at least about 70%, 75%, 80%, 85%, 90%, 91%, 92%, 93%, 94%, 95%, 96%, 97%, 98%, 99% or 100% sequence identity to SEQ ID NO: 317. In some embodiments, the one or more non-coding RNAs detected in a sample comprise at least about 70%, 75%, 80%, 85%, 90%, 91%, 92%, 93%, 94%, 95%, 96%, 97%, 98%, 99% or 100% sequence identity to SEQ ID NO: 318. In some embodiments, the one or more non-coding RNAs detected in a sample comprise at least about 70%, 75%, 80%, 85%, 90%, 91%, 92%, 93%, 94%, 95%, 96%, 97%, 98%, 99% or 100% sequence identity to SEQ ID NO: 319. In some embodiments, the one or more non-coding RNAs detected in a sample comprise at least about 70%, 75%, 80%, 85%, 90%, 91%, 92%, 93%, 94%, 95%, 96%, 97%, 98%, 99% or 100% sequence identity to SEQ ID NO: 320. In some embodiments, the one or more non-coding RNAs detected in a sample comprise at least about 70%, 75%, 80%, 85%, 90%, 91%, 92%, 93%, 94%, 95%, 96%, 97%, 98%, 99% or 100% sequence identity to SEQ ID NO: 321. In some embodiments, the one or more non-coding RNAs detected in a sample comprise at least about 70%, 75%, 80%, 85%, 90%, 91%, 92%, 93%, 94%, 95%, 96%, 97%, 98%, 99% or 100% sequence identity to SEQ ID NO: 322. In some embodiments, the one or more non-coding RNAs detected in a sample comprise at least about 70%, 75%, 80%, 85%, 90%, 91%, 92%, 93%, 94%, 95%, 96%, 97%, 98%, 99% or 100% sequence identity to SEQ ID NO: 323. In some embodiments, the one or more non-coding RNAs detected in a sample comprise at least about 70%, 75%, 80%, 85%, 90%, 91%, 92%, 93%, 94%, 95%, 96%, 97%, 98%, 99% or 100% sequence identity to SEQ ID NO: 324. In some embodiments, the one or more non-coding RNAs detected in a sample comprise at least about 70%, 75%, 80%, 85%, 90%, 91%, 92%, 93%, 94%, 95%, 96%, 97%, 98%, 99% or 100% sequence identity to SEQ ID NO: 325. In some embodiments, the one or more non-coding RNAs detected in a sample comprise at least about 70%, 75%, 80%, 85%, 90%, 91%, 92%, 93%, 94%, 95%, 96%, 97%, 98%, 99% or 100% sequence identity to SEQ ID NO: 326. In some embodiments, the one or more non-coding RNAs detected in a sample comprise at least about 70%, 75%, 80%, 85%, 90%, 91%, 92%, 93%, 94%, 95%, 96%, 97%, 98%, 99% or 100% sequence identity to SEQ ID NO: 327. In some embodiments, the one or more non-coding RNAs detected in a sample comprise at least 70%, 75%, 80%, 85%, 90%, 91%, 92%, 93%, 94%, 95%, 96%, 97%, 98%, 99% or 100% sequence identity to SEQ ID NO: 328. In some embodiments, the one or more non-coding RNAs detected in a sample comprise at least about 70%, 75%, 80%, 85%, 90%, 91%, 92%, 93%, 94%, 95%, 96%, 97%, 98%, 99% or 100% sequence identity to SEQ ID NO: 329. In some embodiments, the one or more non-coding RNAs detected in a sample comprise at least about 70%, 75%, 80%, 85%, 90%, 91%, 92%, 93%, 94%, 95%, 96%, 97%, 98%, 99% or 100% sequence identity to SEQ ID NO: 330. In some embodiments, the one or more non-coding RNAs detected in a sample comprise at least about 70%, 75%, 80%, 85%, 90%, 91%, 92%, 93%, 94%, 95%, 96%, 97%, 98%, 99% or 100% sequence identity to SEQ ID NO: 331. In some embodiments, the one or more non-coding RNAs detected in a sample comprise at least about 70%, 75%, 80%, 85%, 90%, 91%, 92%, 93%, 94%, 95%, 96%, 97%, 98%, 99% or 100% sequence identity to SEQ ID NO: 332. In some embodiments, the one or more non-coding RNAs detected in a sample comprise at least about 70%, 75%, 80%, 85%, 90%, 91%, 92%, 93%, 94%, 95%, 96%, 97%, 98%, 99% or 100% sequence identity to SEQ ID NO: 333. In some embodiments, the one or more non-coding RNAs detected in a sample comprise at least about 70%, 75%, 80%, 85%, 90%, 91%, 92%, 93%, 94%, 95%, 96%, 97%, 98%, 99% or 100% sequence identity to SEQ ID NO: 334. In some embodiments, the one or more non-coding RNAs detected in a sample comprise at least about 70%, 75%, 80%, 85%, 90%, 91%, 92%, 93%, 94%, 95%, 96%, 97%, 98%, 99% or 100% sequence identity to SEQ ID NO: 335. In some embodiments, the one or more non-coding RNAs detected in a sample comprise at least about 70%, 75%, 80%, 85%, 90%, 91%, 92%, 93%, 94%, 95%, 96%, 97%, 98%, 99% or 100% sequence identity to SEQ ID NO: 336. In some embodiments, the one or more non-coding RNAs detected in a sample comprise at least about 70%, 75%, 80%, 85%, 90%, 91%, 92%, 93%, 94%, 95%, 96%, 97%, 98%, 99% or 100% sequence identity to SEQ ID NO: 337. In some embodiments, the one or more non-coding RNAs detected in a sample comprise at least about 70%, 75%, 80%, 85%, 90%, 91%, 92%, 93%, 94%, 95%, 96%, 97%, 98%, 99% or 100% sequence identity to SEQ ID NO: 338. In some embodiments, the one or more non-coding RNAs detected in a sample comprise at least about 70%, 75%, 80%, 85%, 90%, 91%, 92%, 93%, 94%, 95%, 96%, 97%, 98%, 99% or 100% sequence identity to SEQ ID NO: 339. In some embodiments, the one or more non-coding RNAs detected in a sample comprise at least about 70%, 75%, 80%, 85%, 90%, 91%, 92%, 93%, 94%, 95%, 96%, 97%, 98%, 99% or 100% sequence identity to SEQ ID NO: 340. In some embodiments, the one or more non-coding RNAs detected in a sample comprise at least about 70%, 75%, 80%, 85%, 90%, 91%, 92%, 93%, 94%, 95%, 96%, 97%, 98%, 99% or 100% sequence identity to SEQ ID NO: 341. In some embodiments, the one or more non-coding RNAs detected in a sample comprise at least about 70%, 75%, 80%, 85%, 90%, 91%, 92%, 93%, 94%, 95%, 96%, 97%, 98%, 99% or 100% sequence identity to SEQ ID NO: 342. In some embodiments, the one or more non-coding RNAs detected in a sample comprise at least about 70%, 75%, 80%, 85%, 90%, 91%, 92%, 93%, 94%, 95%, 96%, 97%, 98%, 99% or 100% sequence identity to SEQ ID NO: 343. In some embodiments, the one or more non-coding RNAs detected in a sample comprise at least about 70%, 75%, 80%, 85%, 90%, 91%, 92%, 93%, 94%, 95%, 96%, 97%, 98%, 99% or 100% sequence identity to SEQ ID NO: 344. In some embodiments, the one or more non-coding RNAs detected in a sample comprise at least about 70%, 75%, 80%, 85%, 90%, 91%, 92%, 93%, 94%, 95%, 96%, 97%, 98%, 99% or 100% sequence identity to SEQ ID NO: 345. In some embodiments, the one or more non-coding RNAs detected in a sample comprise at least about 70%, 75%, 80%, 85%, 90%, 91%, 92%, 93%, 94%, 95%, 96%, 97%, 98%, 99% or 100% sequence identity to SEQ ID NO: 346. In some embodiments, the one or more non-coding RNAs detected in a sample comprise at least about 70%, 75%, 80%, 85%, 90%, 91%, 92%, 93%, 94%, 95%, 96%, 97%, 98%, 99% or 100% sequence identity to SEQ ID NO: 347. In some embodiments, the one or more non-coding RNAs detected in a sample comprise at least about 70%, 75%, 80%, 85%, 90%, 91%, 92%, 93%, 94%, 95%, 96%, 97%, 98%, 99% or 100% sequence identity to SEQ ID NO: 348. In some embodiments, the one or more non-coding RNAs detected in a sample comprise at least about 70%, 75%, 80%, 85%, 90%, 91%, 92%, 93%, 94%, 95%, 96%, 97%, 98%, 99% or 100% sequence identity to SEQ ID NO: 349. In some embodiments, the one or more non-coding RNAs detected in a sample comprise at least about 70%, 75%, 80%, 85%, 90%, 91%, 92%, 93%, 94%, 95%, 96%, 97%, 98%, 99% or 100% sequence identity to SEQ ID NO: 350. In some embodiments, the one or more non-coding RNAs detected in a sample comprise at least about 70%, 75%, 80%, 85%, 90%, 91%, 92%, 93%, 94%, 95%, 96%, 97%, 98%, 99% or 100% sequence identity to SEQ ID NO: 351. In some embodiments, the one or more non-coding RNAs detected in a sample comprise at least about 70%, 75%, 80%, 85%, 90%, 91%, 92%, 93%, 94%, 95%, 96%, 97%, 98%, 99% or 100% sequence identity to SEQ ID NO: 352. In some embodiments, the one or more non-coding RNAs detected in a sample comprise at least about 70%, 75%, 80%, 85%, 90%, 91%, 92%, 93%, 94%, 95%, 96%, 97%, 98%, 99% or 100% sequence identity to SEQ ID NO: 353. In some embodiments, the one or more non-coding RNAs detected in a sample comprise at least about 70%, 75%, 80%, 85%, 90%, 91%, 92%, 93%, 94%, 95%, 96%, 97%, 98%, 99% or 100% sequence identity to SEQ ID NO: 354. In some embodiments, the one or more non-coding RNAs detected in a sample comprise at least about 70%, 75%, 80%, 85%, 90%, 91%, 92%, 93%, 94%, 95%, 96%, 97%, 98%, 99% or 100% sequence identity to SEQ ID NO: 355. In some embodiments, the one or more non-coding RNAs detected in a sample comprise at least about 70%, 75%, 80%, 85%, 90%, 91%, 92%, 93%, 94%, 95%, 96%, 97%, 98%, 99% or 100% sequence identity to SEQ ID NO: 356. In some embodiments, the one or more non-coding RNAs detected in a sample comprise at least about 70%, 75%, 80%, 85%, 90%, 91%, 92%, 93%, 94%, 95%, 96%, 97%, 98%, 99% or 100% sequence identity to SEQ ID NO: 357. In some embodiments, the one or more non-coding RNAs detected in a sample comprise at least about 70%, 75%, 80%, 85%, 90%, 91%, 92%, 93%, 94%, 95%, 96%, 97%, 98%, 99% or 100% sequence identity to SEQ ID NO: 358. In some embodiments, the one or more non-coding RNAs detected in a sample comprise at least about 70%, 75%, 80%, 85%, 90%, 91%, 92%, 93%, 94%, 95%, 96%, 97%, 98%, 99% or 100% sequence identity to SEQ ID NO: 359. In some embodiments, the one or more non-coding RNAs detected in a sample comprise at least about 70%, 75%, 80%, 85%, 90%, 91%, 92%, 93%, 94%, 95%, 96%, 97%, 98%, 99% or 100% sequence identity to SEQ ID NO: 360. In some embodiments, the one or more non-coding RNAs detected in a sample comprise at least about 70%, 75%, 80%, 85%, 90%, 91%, 92%, 93%, 94%, 95%, 96%, 97%, 98%, 99% or 100% sequence identity to SEQ ID NO: 361. In some embodiments, the one or more non-coding RNAs detected in a sample comprise at least about 70%, 75%, 80%, 85%, 90%, 91%, 92%, 93%, 94%, 95%, 96%, 97%, 98%, 99% or 100% sequence identity to SEQ ID NO: 362. In some embodiments, the one or more non-coding RNAs detected in a sample comprise at least about 70%, 75%, 80%, 85%, 90%, 91%, 92%, 93%, 94%, 95%, 96%, 97%, 98%, 99% or 100% sequence identity to SEQ ID NO: 363. In some embodiments, the one or more non-coding RNAs detected in a sample comprise at least about 70%, 75%, 80%, 85%, 90%, 91%, 92%, 93%, 94%, 95%, 96%, 97%, 98%, 99% or 100% sequence identity to SEQ ID NO: 364. In some embodiments, the one or more non-coding RNAs detected in a sample comprise at least about 70%, 75%, 80%, 85%, 90%, 91%, 92%, 93%, 94%, 95%, 96%, 97%, 98%, 99% or 100% sequence identity to SEQ ID NO: 365. In some embodiments, the one or more non-coding RNAs detected in a sample comprise at least about 70%, 75%, 80%, 85%, 90%, 91%, 92%, 93%, 94%, 95%, 96%, 97%, 98%, 99% or 100% sequence identity to SEQ ID NO: 366. In some embodiments, the one or more non-coding RNAs detected in a sample comprise at least about 70%, 75%, 80%, 85%, 90%, 91%, 92%, 93%, 94%, 95%, 96%, 97%, 98%, 99% or 100% sequence identity to SEQ ID NO: 367. In some embodiments, the one or more non-coding RNAs detected in a sample comprise at least about 70%, 75%, 80%, 85%, 90%, 91%, 92%, 93%, 94%, 95%, 96%, 97%, 98%, 99% or 100% sequence identity to SEQ ID NO: 368. In some embodiments, the one or more non-coding RNAs detected in a sample comprise at least about 70%, 75%, 80%, 85%, 90%, 91%, 92%, 93%, 94%, 95%, 96%, 97%, 98%, 99% or 100% sequence identity to SEQ ID NO: 369. In some embodiments, the one or more non-coding RNAs detected in a sample comprise at least about 70%, 75%, 80%, 85%, 90%, 91%, 92%, 93%, 94%, 95%, 96%, 97%, 98%, 99% or 100% sequence identity to SEQ ID NO: 370. In some embodiments, the one or more non-coding RNAs detected in a sample comprise at least about 70%, 75%, 80%, 85%, 90%, 91%, 92%, 93%, 94%, 95%, 96%, 97%, 98%, 99% or 100% sequence identity to SEQ ID NO: 371. In some embodiments, the one or more non-coding RNAs detected in a sample comprise at least about 70%, 75%, 80%, 85%, 90%, 91%, 92%, 93%, 94%, 95%, 96%, 97%, 98%, 99% or 100% sequence identity to SEQ ID NO: 372. In some embodiments, the one or more non-coding RNAs detected in a sample comprise at least about 70%, 75%, 80%, 85%, 90%, 91%, 92%, 93%, 94%, 95%, 96%, 97%, 98%, 99% or 100% sequence identity to SEQ ID NO: 373. In some embodiments, the one or more non-coding RNAs detected in a sample comprise at least about 70%, 75%, 80%, 85%, 90%, 91%, 92%, 93%, 94%, 95%, 96%, 97%, 98%, 99% or 100% sequence identity to SEQ ID NO: 374. In some embodiments, the one or more non-coding RNAs detected in a sample comprise at least about 70%, 75%, 80%, 85%, 90%, 91%, 92%, 93%, 94%, 95%, 96%, 97%, 98%, 99% or 100% sequence identity to SEQ ID NO: 375. In some embodiments, the one or more non-coding RNAs detected in a sample comprise at least about 70%, 75%, 80%, 85%, 90%, 91%, 92%, 93%, 94%, 95%, 96%, 97%, 98%, 99% or 100% sequence identity to SEQ ID NO: 376. In some embodiments, the one or more non-coding RNAs detected in a sample comprise at least about 70%, 75%, 80%, 85%, 90%, 91%, 92%, 93%, 94%, 95%, 96%, 97%, 98%, 99% or 100% sequence identity to SEQ ID NO: 377. In some embodiments, the one or more non-coding RNAs detected in a sample comprise at least about 70%, 75%, 80%, 85%, 90%, 91%, 92%, 93%, 94%, 95%, 96%, 97%, 98%, 99% or 100% sequence identity to SEQ ID NO: 378. In some embodiments, the one or more non-coding RNAs detected in a sample comprise at least about 70%, 75%, 80%, 85%, 90%, 91%, 92%, 93%, 94%, 95%, 96%, 97%, 98%, 99% or 100% sequence identity to SEQ ID NO: 379. In some embodiments, the one or more non-coding RNAs detected in a sample comprise at least about 70%, 75%, 80%, 85%, 90%, 91%, 92%, 93%, 94%, 95%, 96%, 97%, 98%, 99% or 100% sequence identity to SEQ ID NO: 380. In some embodiments, the one or more non-coding RNAs detected in a sample comprise at least about 70%, 75%, 80%, 85%, 90%, 91%, 92%, 93%, 94%, 95%, 96%, 97%, 98%, 99% or 100% sequence identity to SEQ ID NO: 381. In some embodiments, the one or more non-coding RNAs detected in a sample comprise at least about 70%, 75%, 80%, 85%, 90%, 91%, 92%, 93%, 94%, 95%, 96%, 97%, 98%, 99% or 100% sequence identity to SEQ ID NO: 382. In some embodiments, the one or more non-coding RNAs detected in a sample comprise at least about 70%, 75%, 80%, 85%, 90%, 91%, 92%, 93%, 94%, 95%, 96%, 97%, 98%, 99% or 100% sequence identity to SEQ ID NO: 383. In some embodiments, the one or more non-coding RNAs detected in a sample comprise at least about 70%, 75%, 80%, 85%, 90%, 91%, 92%, 93%, 94%, 95%, 96%, 97%, 98%, 99% or 100% sequence identity to SEQ ID NO: 384. In some embodiments, the one or more non-coding RNAs detected in a sample comprise at least about 70%, 75%, 80%, 85%, 90%, 91%, 92%, 93%, 94%, 95%, 96%, 97%, 98%, 99% or 100% sequence identity to SEQ ID NO: 385. In some embodiments, the one or more non-coding RNAs detected in a sample comprise at least about 70%, 75%, 80%, 85%, 90%, 91%, 92%, 93%, 94%, 95%, 96%, 97%, 98%, 99% or 100% sequence identity to SEQ ID NO: 386. In some embodiments, the one or more non-coding RNAs detected in a sample comprise at least about 70%, 75%, 80%, 85%, 90%, 91%, 92%, 93%, 94%, 95%, 96%, 97%, 98%, 99% or 100% sequence identity to SEQ ID NO: 387. In some embodiments, the one or more non-coding RNAs detected in a sample comprise at least about 70%, 75%, 80%, 85%, 90%, 91%, 92%, 93%, 94%, 95%, 96%, 97%, 98%, 99% or 100% sequence identity to SEQ ID NO: 388. In some embodiments, the one or more non-coding RNAs detected in a sample comprise at least about 70%, 75%, 80%, 85%, 90%, 91%, 92%, 93%, 94%, 95%, 96%, 97%, 98%, 99% or 100% sequence identity to SEQ ID NO: 389. In some embodiments, the one or more non-coding RNAs detected in a sample comprise at least about 70%, 75%, 80%, 85%, 90%, 91%, 92%, 93%, 94%, 95%, 96%, 97%, 98%, 99% or 100% sequence identity to SEQ ID NO: 390. In some embodiments, the one or more non-coding RNAs detected in a sample comprise at least about 70%, 75%, 80%, 85%, 90%, 91%, 92%, 93%, 94%, 95%, 96%, 97%, 98%, 99% or 100% sequence identity to SEQ ID NO: 391. In some embodiments, the one or more non-coding RNAs detected in a sample comprise at least about 70%, 75%, 80%, 85%, 90%, 91%, 92%, 93%, 94%, 95%, 96%, 97%, 98%, 99% or 100% sequence identity to SEQ ID NO: 392. In some embodiments, the one or more non-coding RNAs detected in a sample comprise at least about 70%, 75%, 80%, 85%, 90%, 91%, 92%, 93%, 94%, 95%, 96%, 97%, 98%, 99% or 100% sequence identity to SEQ ID NO: 393. In some embodiments, the one or more non-coding RNAs detected in a sample comprise at least about 70%, 75%, 80%, 85%, 90%, 91%, 92%, 93%, 94%, 95%, 96%, 97%, 98%, 99% or 100% sequence identity to SEQ ID NO: 394. In some embodiments, the one or more non-coding RNAs detected in a sample comprise at least about 70%, 75%, 80%, 85%, 90%, 91%, 92%, 93%, 94%, 95%, 96%, 97%, 98%, 99% or 100% sequence identity to SEQ ID NO: 395. In some embodiments, the one or more non-coding RNAs detected in a sample comprise at least about 70%, 75%, 80%, 85%, 90%, 91%, 92%, 93%, 94%, 95%, 96%, 97%, 98%, 99% or 100% sequence identity to SEQ ID NO: 396. In some embodiments, the one or more non-coding RNAs detected in a sample comprise at least about 70%, 75%, 80%, 85%, 90%, 91%, 92%, 93%, 94%, 95%, 96%, 97%, 98%, 99% or 100% sequence identity to SEQ ID NO: 397. In some embodiments, the one or more non-coding RNAs detected in a sample comprise at least about 70%, 75%, 80%, 85%, 90%, 91%, 92%, 93%, 94%, 95%, 96%, 97%, 98%, 99% or 100% sequence identity to SEQ ID NO: 398. In some embodiments, the one or more non-coding RNAs detected in a sample comprise at least about 70%, 75%, 80%, 85%, 90%, 91%, 92%, 93%, 94%, 95%, 96%, 97%, 98%, 99% or 100% sequence identity to SEQ ID NO: 399. In some embodiments, the one or more non-coding RNAs detected in a sample comprise at least about 70%, 75%, 80%, 85%, 90%, 91%, 92%, 93%, 94%, 95%, 96%, 97%, 98%, 99% or 100% sequence identity to SEQ ID NO: 400. In some embodiments, the one or more non-coding RNAs detected in a sample comprise at least about 70%, 75%, 80%, 85%, 90%, 91%, 92%, 93%, 94%, 95%, 96%, 97%, 98%, 99% or 100% sequence identity to SEQ ID NO: 401. In some embodiments, the one or more non-coding RNAs detected in a sample comprise at least about 70%, 75%, 80%, 85%, 90%, 91%, 92%, 93%, 94%, 95%, 96%, 97%, 98%, 99% or 100% sequence identity to SEQ ID NO: 402. In some embodiments, the one or more non-coding RNAs detected in a sample comprise at least about 70%, 75%, 80%, 85%, 90%, 91%, 92%, 93%, 94%, 95%, 96%, 97%, 98%, 99% or 100% sequence identity to SEQ ID NO: 403. In some embodiments, the one or more non-coding RNAs detected in a sample comprise at least about 70%, 75%, 80%, 85%, 90%, 91%, 92%, 93%, 94%, 95%, 96%, 97%, 98%, 99% or 100% sequence identity to SEQ ID NO: 404. In some embodiments, the one or more non-coding RNAs detected in a sample comprise at least about 70%, 75%, 80%, 85%, 90%, 91%, 92%, 93%, 94%, 95%, 96%, 97%, 98%, 99% or 100% sequence identity to SEQ ID NO: 405. In some embodiments, the one or more non-coding RNAs detected in a sample comprise at least about 70%, 75%, 80%, 85%, 90%, 91%, 92%, 93%, 94%, 95%, 96%, 97%, 98%, 99% or 100% sequence identity to SEQ ID NO: 406. In some embodiments, the one or more non-coding RNAs detected in a sample comprise at least about 70%, 75%, 80%, 85%, 90%, 91%, 92%, 93%, 94%, 95%, 96%, 97%, 98%, 99% or 100% sequence identity to SEQ ID NO: 407. In some embodiments, the one or more non-coding RNAs detected in a sample comprise at least about 70%, 75%, 80%, 85%, 90%, 91%, 92%, 93%, 94%, 95%, 96%, 97%, 98%, 99% or 100% sequence identity to SEQ ID NO: 408. In some embodiments, the one or more non-coding RNAs detected in a sample comprise at least about 70%, 75%, 80%, 85%, 90%, 91%, 92%, 93%, 94%, 95%, 96%, 97%, 98%, 99% or 100% sequence identity to SEQ ID NO: 409. In some embodiments, the one or more non-coding RNAs detected in a sample comprise at least about 70%, 75%, 80%, 85%, 90%, 91%, 92%, 93%, 94%, 95%, 96%, 97%, 98%, 99% or 100% sequence identity to SEQ ID NO: 410. In some embodiments, the one or more non-coding RNAs detected in a sample comprise at least about 70%, 75%, 80%, 85%, 90%, 91%, 92%, 93%, 94%, 95%, 96%, 97%, 98%, 99% or 100% sequence identity to SEQ ID NO: 411. In some embodiments, the one or more non-coding RNAs detected in a sample comprise at least about 70%, 75%, 80%, 85%, 90%, 91%, 92%, 93%, 94%, 95%, 96%, 97%, 98%, 99% or 100% sequence identity to SEQ ID NO: 412. In some embodiments, the one or more non-coding RNAs detected in a sample comprise at least about 70%, 75%, 80%, 85%, 90%, 91%, 92%, 93%, 94%, 95%, 96%, 97%, 98%, 99% or 100% sequence identity to SEQ ID NO: 413. In some embodiments, the one or more non-coding RNAs detected in a sample comprise at least about 70%, 75%, 80%, 85%, 90%, 91%, 92%, 93%, 94%, 95%, 96%, 97%, 98%, 99% or 100% sequence identity to SEQ ID NO: 414. In some embodiments, the one or more non-coding RNAs detected in a sample comprise at least about 70%, 75%, 80%, 85%, 90%, 91%, 92%, 93%, 94%, 95%, 96%, 97%, 98%, 99% or 100% sequence identity to SEQ ID NO: 415. In some embodiments, the one or more non-coding RNAs detected in a sample comprise at least about 70%, 75%, 80%, 85%, 90%, 91%, 92%, 93%, 94%, 95%, 96%, 97%, 98%, 99% or 100% sequence identity to SEQ ID NO: 416. In some embodiments, the one or more non-coding RNAs detected in a sample comprise at least about 70%, 75%, 80%, 85%, 90%, 91%, 92%, 93%, 94%, 95%, 96%, 97%, 98%, 99% or 100% sequence identity to SEQ ID NO: 417. In some embodiments, the one or more non-coding RNAs detected in a sample comprise at least about 70%, 75%, 80%, 85%, 90%, 91%, 92%, 93%, 94%, 95%, 96%, 97%, 98%, 99% or 100% sequence identity to SEQ ID NO: 418. In some embodiments, the one or more non-coding RNAs detected in a sample comprise at least about 70%, 75%, 80%, 85%, 90%, 91%, 92%, 93%, 94%, 95%, 96%, 97%, 98%, 99% or 100% sequence identity to SEQ ID NO: 419. In some embodiments, the one or more non-coding RNAs detected in a sample comprise at least about 70%, 75%, 80%, 85%, 90%, 91%, 92%, 93%, 94%, 95%, 96%, 97%, 98%, 99% or 100% sequence identity to SEQ ID NO: 420. In some embodiments, the one or more non-coding RNAs detected in a sample comprise at least about 70%, 75%, 80%, 85%, 90%, 91%, 92%, 93%, 94%, 95%, 96%, 97%, 98%, 99% or 100% sequence identity to SEQ ID NO: 421. In some embodiments, the one or more non-coding RNAs detected in a sample comprise at least about 70%, 75%, 80%, 85%, 90%, 91%, 92%, 93%, 94%, 95%, 96%, 97%, 98%, 99% or 100% sequence identity to SEQ ID NO: 422. In some embodiments, the one or more non-coding RNAs detected in a sample comprise at least about 70%, 75%, 80%, 85%, 90%, 91%, 92%, 93%, 94%, 95%, 96%, 97%, 98%, 99% or 100% sequence identity to SEQ ID NO: 423. In some embodiments, the one or more non-coding RNAs detected in a sample comprise at least about 70%, 75%, 80%, 85%, 90%, 91%, 92%, 93%, 94%, 95%, 96%, 97%, 98%, 99% or 100% sequence identity to SEQ ID NO: 424. In some embodiments, the one or more non-coding RNAs detected in a sample comprise at least about 70%, 75%, 80%, 85%, 90%, 91%, 92%, 93%, 94%, 95%, 96%, 97%, 98%, 99% or 100% sequence identity to SEQ ID NO: 425. In some embodiments, the one or more non-coding RNAs detected in a sample comprise at least about 70%, 75%, 80%, 85%, 90%, 91%, 92%, 93%, 94%, 95%, 96%, 97%, 98%, 99% or 100% sequence identity to SEQ ID NO: 426. In some embodiments, the one or more non-coding RNAs detected in a sample comprise at least about 70%, 75%, 80%, 85%, 90%, 91%, 92%, 93%, 94%, 95%, 96%, 97%, 98%, 99% or 100% sequence identity to SEQ ID NO: 427. In some embodiments, the one or more non-coding RNAs detected in a sample comprise at least 70%, 75%, 80%, 85%, 90%, 91%, 92%, 93%, 94%, 95%, 96%, 97%, 98%, 99% or 100% sequence identity to SEQ ID NO: 428. In some embodiments, the one or more non-coding RNAs detected in a sample comprise at least about 70%, 75%, 80%, 85%, 90%, 91%, 92%, 93%, 94%, 95%, 96%, 97%, 98%, 99% or 100% sequence identity to SEQ ID NO: 429. In some embodiments, the one or more non-coding RNAs detected in a sample comprise at least about 70%, 75%, 80%, 85%, 90%, 91%, 92%, 93%, 94%, 95%, 96%, 97%, 98%, 99% or 100% sequence identity to SEQ ID NO: 430. In some embodiments, the one or more non-coding RNAs detected in a sample comprise at least about 70%, 75%, 80%, 85%, 90%, 91%, 92%, 93%, 94%, 95%, 96%, 97%, 98%, 99% or 100% sequence identity to SEQ ID NO: 431. In some embodiments, the one or more non-coding RNAs detected in a sample comprise at least about 70%, 75%, 80%, 85%, 90%, 91%, 92%, 93%, 94%, 95%, 96%, 97%, 98%, 99% or 100% sequence identity to SEQ ID NO: 432. In some embodiments, the one or more non-coding RNAs detected in a sample comprise at least about 70%, 75%, 80%, 85%, 90%, 91%, 92%, 93%, 94%, 95%, 96%, 97%, 98%, 99% or 100% sequence identity to SEQ ID NO: 433. In some embodiments, the one or more non-coding RNAs detected in a sample comprise at least about 70%, 75%, 80%, 85%, 90%, 91%, 92%, 93%, 94%, 95%, 96%, 97%, 98%, 99% or 100% sequence identity to SEQ ID NO: 434. In some embodiments, the one or more non-coding RNAs detected in a sample comprise at least about 70%, 75%, 80%, 85%, 90%, 91%, 92%, 93%, 94%, 95%, 96%, 97%, 98%, 99% or 100% sequence identity to SEQ ID NO: 435. In some embodiments, the one or more non-coding RNAs detected in a sample comprise at least about 70%, 75%, 80%, 85%, 90%, 91%, 92%, 93%, 94%, 95%, 96%, 97%, 98%, 99% or 100% sequence identity to SEQ ID NO: 436. In some embodiments, the one or more non-coding RNAs detected in a sample comprise at least about 70%, 75%, 80%, 85%, 90%, 91%, 92%, 93%, 94%, 95%, 96%, 97%, 98%, 99% or 100% sequence identity to SEQ ID NO: 437. In some embodiments, the one or more non-coding RNAs detected in a sample comprise at least about 70%, 75%, 80%, 85%, 90%, 91%, 92%, 93%, 94%, 95%, 96%, 97%, 98%, 99% or 100% sequence identity to SEQ ID NO: 438. In some embodiments, the one or more non-coding RNAs detected in a sample comprise at least about 70%, 75%, 80%, 85%, 90%, 91%, 92%, 93%, 94%, 95%, 96%, 97%, 98%, 99% or 100% sequence identity to SEQ ID NO: 439. In some embodiments, the one or more non-coding RNAs detected in a sample comprise at least about 70%, 75%, 80%, 85%, 90%, 91%, 92%, 93%, 94%, 95%, 96%, 97%, 98%, 99% or 100% sequence identity to SEQ ID NO: 440. In some embodiments, the one or more non-coding RNAs detected in a sample comprise at least about 70%, 75%, 80%, 85%, 90%, 91%, 92%, 93%, 94%, 95%, 96%, 97%, 98%, 99% or 100% sequence identity to SEQ ID NO: 441. In some embodiments, the one or more non-coding RNAs detected in a sample comprise at least about 70%, 75%, 80%, 85%, 90%, 91%, 92%, 93%, 94%, 95%, 96%, 97%, 98%, 99% or 100% sequence identity to SEQ ID NO: 442. In some embodiments, the one or more non-coding RNAs detected in a sample comprise at least about 70%, 75%, 80%, 85%, 90%, 91%, 92%, 93%, 94%, 95%, 96%, 97%, 98%, 99% or 100% sequence identity to SEQ ID NO: 443. In some embodiments, the one or more non-coding RNAs detected in a sample comprise at least about 70%, 75%, 80%, 85%, 90%, 91%, 92%, 93%, 94%, 95%, 96%, 97%, 98%, 99% or 100% sequence identity to SEQ ID NO: 444. In some embodiments, the one or more non-coding RNAs detected in a sample comprise at least about 70%, 75%, 80%, 85%, 90%, 91%, 92%, 93%, 94%, 95%, 96%, 97%, 98%, 99% or 100% sequence identity to SEQ ID NO: 445. In some embodiments, the one or more non-coding RNAs detected in a sample comprise at least about 70%, 75%, 80%, 85%, 90%, 91%, 92%, 93%, 94%, 95%, 96%, 97%, 98%, 99% or 100% sequence identity to SEQ ID NO: 446. In some embodiments, the one or more non-coding RNAs detected in a sample comprise at least about 70%, 75%, 80%, 85%, 90%, 91%, 92%, 93%, 94%, 95%, 96%, 97%, 98%, 99% or 100% sequence identity to SEQ ID NO: 447. In some embodiments, the one or more non-coding RNAs detected in a sample comprise at least about 70%, 75%, 80%, 85%, 90%, 91%, 92%, 93%, 94%, 95%, 96%, 97%, 98%, 99% or 100% sequence identity to SEQ ID NO: 448. In some embodiments, the one or more non-coding RNAs detected in a sample comprise at least about 70%, 75%, 80%, 85%, 90%, 91%, 92%, 93%, 94%, 95%, 96%, 97%, 98%, 99% or 100% sequence identity to SEQ ID NO: 449. In some embodiments, the one or more non-coding RNAs detected in a sample comprise at least about 70%, 75%, 80%, 85%, 90%, 91%, 92%, 93%, 94%, 95%, 96%, 97%, 98%, 99% or 100% sequence identity to SEQ ID NO: 450. In some embodiments, the one or more non-coding RNAs detected in a sample comprise at least about 70%, 75%, 80%, 85%, 90%, 91%, 92%, 93%, 94%, 95%, 96%, 97%, 98%, 99% or 100% sequence identity to SEQ ID NO: 451. In some embodiments, the one or more non-coding RNAs detected in a sample comprise at least about 70%, 75%, 80%, 85%, 90%, 91%, 92%, 93%, 94%, 95%, 96%, 97%, 98%, 99% or 100% sequence identity to SEQ ID NO: 452. In some embodiments, the one or more non-coding RNAs detected in a sample comprise at least about 70%, 75%, 80%, 85%, 90%, 91%, 92%, 93%, 94%, 95%, 96%, 97%, 98%, 99% or 100% sequence identity to SEQ ID NO: 453. In some embodiments, the one or more non-coding RNAs detected in a sample comprise at least about 70%, 75%, 80%, 85%, 90%, 91%, 92%, 93%, 94%, 95%, 96%, 97%, 98%, 99% or 100% sequence identity to SEQ ID NO: 454. In some embodiments, the one or more non-coding RNAs detected in a sample comprise at least about 70%, 75%, 80%, 85%, 90%, 91%, 92%, 93%, 94%, 95%, 96%, 97%, 98%, 99% or 100% sequence identity to SEQ ID NO: 455. In some embodiments, the one or more non-coding RNAs detected in a sample comprise at least about 70%, 75%, 80%, 85%, 90%, 91%, 92%, 93%, 94%, 95%, 96%, 97%, 98%, 99% or 100% sequence identity to SEQ ID NO: 456. In some embodiments, the one or more non-coding RNAs detected in a sample comprise at least about 70%, 75%, 80%, 85%, 90%, 91%, 92%, 93%, 94%, 95%, 96%, 97%, 98%, 99% or 100% sequence identity to SEQ ID NO: 457. In some embodiments, the one or more non-coding RNAs detected in a sample comprise at least about 70%, 75%, 80%, 85%, 90%, 91%, 92%, 93%, 94%, 95%, 96%, 97%, 98%, 99% or 100% sequence identity to SEQ ID NO: 458. In some embodiments, the one or more non-coding RNAs detected in a sample comprise at least about 70%, 75%, 80%, 85%, 90%, 91%, 92%, 93%, 94%, 95%, 96%, 97%, 98%, 99% or 100% sequence identity to SEQ ID NO: 459. In some embodiments, the one or more non-coding RNAs detected in a sample comprise at least about 70%, 75%, 80%, 85%, 90%, 91%, 92%, 93%, 94%, 95%, 96%, 97%, 98%, 99% or 100% sequence identity to SEQ ID NO: 460. In some embodiments, the one or more non-coding RNAs detected in a sample comprise at least about 70%, 75%, 80%, 85%, 90%, 91%, 92%, 93%, 94%, 95%, 96%, 97%, 98%, 99% or 100% sequence identity to SEQ ID NO: 461. In some embodiments, the one or more non-coding RNAs detected in a sample comprise at least about 70%, 75%, 80%, 85%, 90%, 91%, 92%, 93%, 94%, 95%, 96%, 97%, 98%, 99% or 100% sequence identity to SEQ ID NO: 462. In some embodiments, the one or more non-coding RNAs detected in a sample comprise at least about 70%, 75%, 80%, 85%, 90%, 91%, 92%, 93%, 94%, 95%, 96%, 97%, 98%, 99% or 100% sequence identity to SEQ ID NO: 463. In some embodiments, the one or more non-coding RNAs detected in a sample comprise at least about 70%, 75%, 80%, 85%, 90%, 91%, 92%, 93%, 94%, 95%, 96%, 97%, 98%, 99% or 100% sequence identity to SEQ ID NO: 464. In some embodiments, the one or more non-coding RNAs detected in a sample comprise at least about 70%, 75%, 80%, 85%, 90%, 91%, 92%, 93%, 94%, 95%, 96%, 97%, 98%, 99% or 100% sequence identity to SEQ ID NO: 465. In some embodiments, the one or more non-coding RNAs detected in a sample comprise at least about 70%, 75%, 80%, 85%, 90%, 91%, 92%, 93%, 94%, 95%, 96%, 97%, 98%, 99% or 100% sequence identity to SEQ ID NO: 466. In some embodiments, the one or more non-coding RNAs detected in a sample comprise at least about 70%, 75%, 80%, 85%, 90%, 91%, 92%, 93%, 94%, 95%, 96%, 97%, 98%, 99% or 100% sequence identity to SEQ ID NO: 467. In some embodiments, the one or more non-coding RNAs detected in a sample comprise at least about 70%, 75%, 80%, 85%, 90%, 91%, 92%, 93%, 94%, 95%, 96%, 97%, 98%, 99% or 100% sequence identity to SEQ ID NO: 468. In some embodiments, the one or more non-coding RNAs detected in a sample comprise at least about 70%, 75%, 80%, 85%, 90%, 91%, 92%, 93%, 94%, 95%, 96%, 97%, 98%, 99% or 100% sequence identity to SEQ ID NO: 469. In some embodiments, the one or more non-coding RNAs detected in a sample comprise at least about 70%, 75%, 80%, 85%, 90%, 91%, 92%, 93%, 94%, 95%, 96%, 97%, 98%, 99% or 100% sequence identity to SEQ ID NO: 470. In some embodiments, the one or more non-coding RNAs detected in a sample comprise at least about 70%, 75%, 80%, 85%, 90%, 91%, 92%, 93%, 94%, 95%, 96%, 97%, 98%, 99% or 100% sequence identity to SEQ ID NO: 471. In some embodiments, the one or more non-coding RNAs detected in a sample comprise at least about 70%, 75%, 80%, 85%, 90%, 91%, 92%, 93%, 94%, 95%, 96%, 97%, 98%, 99% or 100% sequence identity to SEQ ID NO: 472. In some embodiments, the one or more non-coding RNAs detected in a sample comprise at least about 70%, 75%, 80%, 85%, 90%, 91%, 92%, 93%, 94%, 95%, 96%, 97%, 98%, 99% or 100% sequence identity to SEQ ID NO: 473. In some embodiments, the one or more non-coding RNAs detected in a sample comprise at least about 70%, 75%, 80%, 85%, 90%, 91%, 92%, 93%, 94%, 95%, 96%, 97%, 98%, 99% or 100% sequence identity to SEQ ID NO: 474. In some embodiments, the one or more non-coding RNAs detected in a sample comprise at least about 70%, 75%, 80%, 85%, 90%, 91%, 92%, 93%, 94%, 95%, 96%, 97%, 98%, 99% or 100% sequence identity to SEQ ID NO: 475. In some embodiments, the one or more non-coding RNAs detected in a sample comprise at least about 70%, 75%, 80%, 85%, 90%, 91%, 92%, 93%, 94%, 95%, 96%, 97%, 98%, 99% or 100% sequence identity to SEQ ID NO: 476. In some embodiments, the one or more non-coding RNAs detected in a sample comprise at least about 70%, 75%, 80%, 85%, 90%, 91%, 92%, 93%, 94%, 95%, 96%, 97%, 98%, 99% or 100% sequence identity to SEQ ID NO: 477. In some embodiments, the one or more non-coding RNAs detected in a sample comprise at least about 70%, 75%, 80%, 85%, 90%, 91%, 92%, 93%, 94%, 95%, 96%, 97%, 98%, 99% or 100% sequence identity to SEQ ID NO: 478. In some embodiments, the one or more non-coding RNAs detected in a sample comprise at least about 70%, 75%, 80%, 85%, 90%, 91%, 92%, 93%, 94%, 95%, 96%, 97%, 98%, 99% or 100% sequence identity to SEQ ID NO: 479. In some embodiments, the one or more non-coding RNAs detected in a sample comprise at least about 70%, 75%, 80%, 85%, 90%, 91%, 92%, 93%, 94%, 95%, 96%, 97%, 98%, 99% or 100% sequence identity to SEQ ID NO: 480. In some embodiments, the one or more non-coding RNAs detected in a sample comprise at least about 70%, 75%, 80%, 85%, 90%, 91%, 92%, 93%, 94%, 95%, 96%, 97%, 98%, 99% or 100% sequence identity to SEQ ID NO: 481. In some embodiments, the one or more non-coding RNAs detected in a sample comprise at least about 70%, 75%, 80%, 85%, 90%, 91%, 92%, 93%, 94%, 95%, 96%, 97%, 98%, 99% or 100% sequence identity to SEQ ID NO: 482. In some embodiments, the one or more non-coding RNAs detected in a sample comprise at least about 70%, 75%, 80%, 85%, 90%, 91%, 92%, 93%, 94%, 95%, 96%, 97%, 98%, 99% or 100% sequence identity to SEQ ID NO: 483. In some embodiments, the one or more non-coding RNAs detected in a sample comprise at least about 70%, 75%, 80%, 85%, 90%, 91%, 92%, 93%, 94%, 95%, 96%, 97%, 98%, 99% or 100% sequence identity to SEQ ID NO: 484. In some embodiments, the one or more non-coding RNAs detected in a sample comprise at least about 70%, 75%, 80%, 85%, 90%, 91%, 92%, 93%, 94%, 95%, 96%, 97%, 98%, 99% or 100% sequence identity to SEQ ID NO: 485. In some embodiments, the one or more non-coding RNAs detected in a sample comprise at least about 70%, 75%, 80%, 85%, 90%, 91%, 92%, 93%, 94%, 95%, 96%, 97%, 98%, 99% or 100% sequence identity to SEQ ID NO: 486. In some embodiments, the one or more non-coding RNAs detected in a sample comprise at least about 70%, 75%, 80%, 85%, 90%, 91%, 92%, 93%, 94%, 95%, 96%, 97%, 98%, 99% or 100% sequence identity to SEQ ID NO: 487. In some embodiments, the one or more non-coding RNAs detected in a sample comprise at least about 70%, 75%, 80%, 85%, 90%, 91%, 92%, 93%, 94%, 95%, 96%, 97%, 98%, 99% or 100% sequence identity to SEQ ID NO: 488. In some embodiments, the one or more non-coding RNAs detected in a sample comprise at least about 70%, 75%, 80%, 85%, 90%, 91%, 92%, 93%, 94%, 95%, 96%, 97%, 98%, 99% or 100% sequence identity to SEQ ID NO: 489. In some embodiments, the one or more non-coding RNAs detected in a sample comprise at least about 70%, 75%, 80%, 85%, 90%, 91%, 92%, 93%, 94%, 95%, 96%, 97%, 98%, 99% or 100% sequence identity to SEQ ID NO: 490. In some embodiments, the one or more non-coding RNAs detected in a sample comprise at least about 70%, 75%, 80%, 85%, 90%, 91%, 92%, 93%, 94%, 95%, 96%, 97%, 98%, 99% or 100% sequence identity to SEQ ID NO: 491. In some embodiments, the one or more non-coding RNAs detected in a sample comprise at least about 70%, 75%, 80%, 85%, 90%, 91%, 92%, 93%, 94%, 95%, 96%, 97%, 98%, 99% or 100% sequence identity to SEQ ID NO: 492. In some embodiments, the one or more non-coding RNAs detected in a sample comprise at least about 70%, 75%, 80%, 85%, 90%, 91%, 92%, 93%, 94%, 95%, 96%, 97%, 98%, 99% or 100% sequence identity to SEQ ID NO: 493. In some embodiments, the one or more non-coding RNAs detected in a sample comprise at least about 70%, 75%, 80%, 85%, 90%, 91%, 92%, 93%, 94%, 95%, 96%, 97%, 98%, 99% or 100% sequence identity to SEQ ID NO: 494. In some embodiments, the one or more non-coding RNAs detected in a sample comprise at least about 70%, 75%, 80%, 85%, 90%, 91%, 92%, 93%, 94%, 95%, 96%, 97%, 98%, 99% or 100% sequence identity to SEQ ID NO: 495. In some embodiments, the one or more non-coding RNAs detected in a sample comprise at least about 70%, 75%, 80%, 85%, 90%, 91%, 92%, 93%, 94%, 95%, 96%, 97%, 98%, 99% or 100% sequence identity to SEQ ID NO: 496. In some embodiments, the one or more non-coding RNAs detected in a sample comprise at least about 70%, 75%, 80%, 85%, 90%, 91%, 92%, 93%, 94%, 95%, 96%, 97%, 98%, 99% or 100% sequence identity to SEQ ID NO: 497. In some embodiments, the one or more non-coding RNAs detected in a sample comprise at least about 70%, 75%, 80%, 85%, 90%, 91%, 92%, 93%, 94%, 95%, 96%, 97%, 98%, 99% or 100% sequence identity to SEQ ID NO: 498. In some embodiments, the one or more non-coding RNAs detected in a sample comprise at least about 70%, 75%, 80%, 85%, 90%, 91%, 92%, 93%, 94%, 95%, 96%, 97%, 98%, 99% or 100% sequence identity to SEQ ID NO: 499. In some embodiments, the one or more non-coding RNAs detected in a sample comprise at least about 70%, 75%, 80%, 85%, 90%, 91%, 92%, 93%, 94%, 95%, 96%, 97%, 98%, 99% or 100% sequence identity to SEQ ID NO: 500. In some embodiments, the one or more non-coding RNAs detected in a sample comprise at least about 70%, 75%, 80%, 85%, 90%, 91%, 92%, 93%, 94%, 95%, 96%, 97%, 98%, 99% or 100% sequence identity to SEQ ID NO: 501. In some embodiments, the one or more non-coding RNAs detected in a sample comprise at least about 70%, 75%, 80%, 85%, 90%, 91%, 92%, 93%, 94%, 95%, 96%, 97%, 98%, 99% or 100% sequence identity to SEQ ID NO: 502. In some embodiments, the one or more non-coding RNAs detected in a sample comprise at least about 70%, 75%, 80%, 85%, 90%, 91%, 92%, 93%, 94%, 95%, 96%, 97%, 98%, 99% or 100% sequence identity to SEQ ID NO: 503. In some embodiments, the one or more non-coding RNAs detected in a sample comprise at least about 70%, 75%, 80%, 85%, 90%, 91%, 92%, 93%, 94%, 95%, 96%, 97%, 98%, 99% or 100% sequence identity to SEQ ID NO: 504. In some embodiments, the one or more non-coding RNAs detected in a sample comprise at least about 70%, 75%, 80%, 85%, 90%, 91%, 92%, 93%, 94%, 95%, 96%, 97%, 98%, 99% or 100% sequence identity to SEQ ID NO: 505. In some embodiments, the one or more non-coding RNAs detected in a sample comprise at least about 70%, 75%, 80%, 85%, 90%, 91%, 92%, 93%, 94%, 95%, 96%, 97%, 98%, 99% or 100% sequence identity to SEQ ID NO: 506. In some embodiments, the one or more non-coding RNAs detected in a sample comprise at least about 70%, 75%, 80%, 85%, 90%, 91%, 92%, 93%, 94%, 95%, 96%, 97%, 98%, 99% or 100% sequence identity to SEQ ID NO: 507. In some embodiments, the one or more non-coding RNAs detected in a sample comprise at least about 70%, 75%, 80%, 85%, 90%, 91%, 92%, 93%, 94%, 95%, 96%, 97%, 98%, 99% or 100% sequence identity to SEQ ID NO: 508. In some embodiments, the one or more non-coding RNAs detected in a sample comprise at least about 70%, 75%, 80%, 85%, 90%, 91%, 92%, 93%, 94%, 95%, 96%, 97%, 98%, 99% or 100% sequence identity to SEQ ID NO: 509. In some embodiments, the one or more non-coding RNAs detected in a sample comprise at least about 70%, 75%, 80%, 85%, 90%, 91%, 92%, 93%, 94%, 95%, 96%, 97%, 98%, 99% or 100% sequence identity to SEQ ID NO: 510. In some embodiments, the one or more non-coding RNAs detected in a sample comprise at least about 70%, 75%, 80%, 85%, 90%, 91%, 92%, 93%, 94%, 95%, 96%, 97%, 98%, 99% or 100% sequence identity to SEQ ID NO: 511. In some embodiments, the one or more non-coding RNAs detected in a sample comprise at least about 70%, 75%, 80%, 85%, 90%, 91%, 92%, 93%, 94%, 95%, 96%, 97%, 98%, 99% or 100% sequence identity to SEQ ID NO: 512. In some embodiments, the one or more non-coding RNAs detected in a sample comprise at least about 70%, 75%, 80%, 85%, 90%, 91%, 92%, 93%, 94%, 95%, 96%, 97%, 98%, 99% or 100% sequence identity to SEQ ID NO: 513. In some embodiments, the one or more non-coding RNAs detected in a sample comprise at least about 70%, 75%, 80%, 85%, 90%, 91%, 92%, 93%, 94%, 95%, 96%, 97%, 98%, 99% or 100% sequence identity to SEQ ID NO: 514. In some embodiments, the one or more non-coding RNAs detected in a sample comprise at least about 70%, 75%, 80%, 85%, 90%, 91%, 92%, 93%, 94%, 95%, 96%, 97%, 98%, 99% or 100% sequence identity to SEQ ID NO: 515. In some embodiments, the one or more non-coding RNAs detected in a sample comprise at least about 70%, 75%, 80%, 85%, 90%, 91%, 92%, 93%, 94%, 95%, 96%, 97%, 98%, 99% or 100% sequence identity to SEQ ID NO: 516. In some embodiments, the one or more non-coding RNAs detected in a sample comprise at least about 70%, 75%, 80%, 85%, 90%, 91%, 92%, 93%, 94%, 95%, 96%, 97%, 98%, 99% or 100% sequence identity to SEQ ID NO: 517. In some embodiments, the one or more non-coding RNAs detected in a sample comprise at least about 70%, 75%, 80%, 85%, 90%, 91%, 92%, 93%, 94%, 95%, 96%, 97%, 98%, 99% or 100% sequence identity to SEQ ID NO: 518. In some embodiments, the one or more non-coding RNAs detected in a sample comprise at least about 70%, 75%, 80%, 85%, 90%, 91%, 92%, 93%, 94%, 95%, 96%, 97%, 98%, 99% or 100% sequence identity to SEQ ID NO: 519. In some embodiments, the one or more non-coding RNAs detected in a sample comprise at least about 70%, 75%, 80%, 85%, 90%, 91%, 92%, 93%, 94%, 95%, 96%, 97%, 98%, 99% or 100% sequence identity to SEQ ID NO: 520. In some embodiments, the one or more non-coding RNAs detected in a sample comprise at least about 70%, 75%, 80%, 85%, 90%, 91%, 92%, 93%, 94%, 95%, 96%, 97%, 98%, 99% or 100% sequence identity to SEQ ID NO: 521. In some embodiments, the one or more non-coding RNAs detected in a sample comprise at least about 70%, 75%, 80%, 85%, 90%, 91%, 92%, 93%, 94%, 95%, 96%, 97%, 98%, 99% or 100% sequence identity to SEQ ID NO: 522. In some embodiments, the one or more non-coding RNAs detected in a sample comprise at least about 70%, 75%, 80%, 85%, 90%, 91%, 92%, 93%, 94%, 95%, 96%, 97%, 98%, 99% or 100% sequence identity to SEQ ID NO: 523. In some embodiments, the one or more non-coding RNAs detected in a sample comprise at least about 70%, 75%, 80%, 85%, 90%, 91%, 92%, 93%, 94%, 95%, 96%, 97%, 98%, 99% or 100% sequence identity to SEQ ID NO: 524. In some embodiments, the one or more non-coding RNAs detected in a sample comprise at least about 70%, 75%, 80%, 85%, 90%, 91%, 92%, 93%, 94%, 95%, 96%, 97%, 98%, 99% or 100% sequence identity to SEQ ID NO: 525. In some embodiments, the one or more non-coding RNAs detected in a sample comprise at least about 70%, 75%, 80%, 85%, 90%, 91%, 92%, 93%, 94%, 95%, 96%, 97%, 98%, 99% or 100% sequence identity to SEQ ID NO: 526. In some embodiments, the one or more non-coding RNAs detected in a sample comprise at least about 70%, 75%, 80%, 85%, 90%, 91%, 92%, 93%, 94%, 95%, 96%, 97%, 98%, 99% or 100% sequence identity to SEQ ID NO: 527. In some embodiments, the one or more non-coding RNAs detected in a sample comprise at least 70%, 75%, 80%, 85%, 90%, 91%, 92%, 93%, 94%, 95%, 96%, 97%, 98%, 99% or 100% sequence identity to SEQ ID NO: 528. In some embodiments, the one or more non-coding RNAs detected in a sample comprise at least about 70%, 75%, 80%, 85%, 90%, 91%, 92%, 93%, 94%, 95%, 96%, 97%, 98%, 99% or 100% sequence identity to SEQ ID NO: 529. In some embodiments, the one or more non-coding RNAs detected in a sample comprise at least about 70%, 75%, 80%, 85%, 90%, 91%, 92%, 93%, 94%, 95%, 96%, 97%, 98%, 99% or 100% sequence identity to SEQ ID NO: 530. In some embodiments, the one or more non-coding RNAs detected in a sample comprise at least about 70%, 75%, 80%, 85%, 90%, 91%, 92%, 93%, 94%, 95%, 96%, 97%, 98%, 99% or 100% sequence identity to SEQ ID NO: 531. In some embodiments, the one or more non-coding RNAs detected in a sample comprise at least about 70%, 75%, 80%, 85%, 90%, 91%, 92%, 93%, 94%, 95%, 96%, 97%, 98%, 99% or 100% sequence identity to SEQ ID NO: 532. In some embodiments, the one or more non-coding RNAs detected in a sample comprise at least about 70%, 75%, 80%, 85%, 90%, 91%, 92%, 93%, 94%, 95%, 96%, 97%, 98%, 99% or 100% sequence identity to SEQ ID NO: 533. In some embodiments, the one or more non-coding RNAs detected in a sample comprise at least about 70%, 75%, 80%, 85%, 90%, 91%, 92%, 93%, 94%, 95%, 96%, 97%, 98%, 99% or 100% sequence identity to SEQ ID NO: 534. In some embodiments, the one or more non-coding RNAs detected in a sample comprise at least about 70%, 75%, 80%, 85%, 90%, 91%, 92%, 93%, 94%, 95%, 96%, 97%, 98%, 99% or 100% sequence identity to SEQ ID NO: 535. In some embodiments, the one or more non-coding RNAs detected in a sample comprise at least about 70%, 75%, 80%, 85%, 90%, 91%, 92%, 93%, 94%, 95%, 96%, 97%, 98%, 99% or 100% sequence identity to SEQ ID NO: 536. In some embodiments, the one or more non-coding RNAs detected in a sample comprise at least about 70%, 75%, 80%, 85%, 90%, 91%, 92%, 93%, 94%, 95%, 96%, 97%, 98%, 99% or 100% sequence identity to SEQ ID NO: 537. In some embodiments, the one or more non-coding RNAs detected in a sample comprise at least about 70%, 75%, 80%, 85%, 90%, 91%, 92%, 93%, 94%, 95%, 96%, 97%, 98%, 99% or 100% sequence identity to SEQ ID NO: 538. In some embodiments, the one or more non-coding RNAs detected in a sample comprise at least about 70%, 75%, 80%, 85%, 90%, 91%, 92%, 93%, 94%, 95%, 96%, 97%, 98%, 99% or 100% sequence identity to SEQ ID NO: 539. In some embodiments, the one or more non-coding RNAs detected in a sample comprise at least about 70%, 75%, 80%, 85%, 90%, 91%, 92%, 93%, 94%, 95%, 96%, 97%, 98%, 99% or 100% sequence identity to SEQ ID NO: 540. In some embodiments, the one or more non-coding RNAs detected in a sample comprise at least about 70%, 75%, 80%, 85%, 90%, 91%, 92%, 93%, 94%, 95%, 96%, 97%, 98%, 99% or 100% sequence identity to SEQ ID NO: 541. In some embodiments, the one or more non-coding RNAs detected in a sample comprise at least about 70%, 75%, 80%, 85%, 90%, 91%, 92%, 93%, 94%, 95%, 96%, 97%, 98%, 99% or 100% sequence identity to SEQ ID NO: 542. In some embodiments, the one or more non-coding RNAs detected in a sample comprise at least about 70%, 75%, 80%, 85%, 90%, 91%, 92%, 93%, 94%, 95%, 96%, 97%, 98%, 99% or 100% sequence identity to SEQ ID NO: 543. In some embodiments, the one or more non-coding RNAs detected in a sample comprise at least about 70%, 75%, 80%, 85%, 90%, 91%, 92%, 93%, 94%, 95%, 96%, 97%, 98%, 99% or 100% sequence identity to SEQ ID NO: 544. In some embodiments, the one or more non-coding RNAs detected in a sample comprise at least about 70%, 75%, 80%, 85%, 90%, 91%, 92%, 93%, 94%, 95%, 96%, 97%, 98%, 99% or 100% sequence identity to SEQ ID NO: 545. In some embodiments, the one or more non-coding RNAs detected in a sample comprise at least about 70%, 75%, 80%, 85%, 90%, 91%, 92%, 93%, 94%, 95%, 96%, 97%, 98%, 99% or 100% sequence identity to SEQ ID NO: 546. In some embodiments, the one or more non-coding RNAs detected in a sample comprise at least about 70%, 75%, 80%, 85%, 90%, 91%, 92%, 93%, 94%, 95%, 96%, 97%, 98%, 99% or 100% sequence identity to SEQ ID NO: 547. In some embodiments, the one or more non-coding RNAs detected in a sample comprise at least about 70%, 75%, 80%, 85%, 90%, 91%, 92%, 93%, 94%, 95%, 96%, 97%, 98%, 99% or 100% sequence identity to SEQ ID NO: 548. In some embodiments, the one or more non-coding RNAs detected in a sample comprise at least about 70%, 75%, 80%, 85%, 90%, 91%, 92%, 93%, 94%, 95%, 96%, 97%, 98%, 99% or 100% sequence identity to SEQ ID NO: 549. In some embodiments, the one or more non-coding RNAs detected in a sample comprise at least about 70%, 75%, 80%, 85%, 90%, 91%, 92%, 93%, 94%, 95%, 96%, 97%, 98%, 99% or 100% sequence identity to SEQ ID NO: 550. In some embodiments, the one or more non-coding RNAs detected in a sample comprise at least about 70%, 75%, 80%, 85%, 90%, 91%, 92%, 93%, 94%, 95%, 96%, 97%, 98%, 99% or 100% sequence identity to SEQ ID NO: 551. In some embodiments, the one or more non-coding RNAs detected in a sample comprise at least about 70%, 75%, 80%, 85%, 90%, 91%, 92%, 93%, 94%, 95%, 96%, 97%, 98%, 99% or 100% sequence identity to SEQ ID NO: 552. In some embodiments, the one or more non-coding RNAs detected in a sample comprise at least about 70%, 75%, 80%, 85%, 90%, 91%, 92%, 93%, 94%, 95%, 96%, 97%, 98%, 99% or 100% sequence identity to SEQ ID NO: 553. In some embodiments, the one or more non-coding RNAs detected in a sample comprise at least about 70%, 75%, 80%, 85%, 90%, 91%, 92%, 93%, 94%, 95%, 96%, 97%, 98%, 99% or 100% sequence identity to SEQ ID NO: 554. In some embodiments, the one or more non-coding RNAs detected in a sample comprise at least about 70%, 75%, 80%, 85%, 90%, 91%, 92%, 93%, 94%, 95%, 96%, 97%, 98%, 99% or 100% sequence identity to SEQ ID NO: 555. In some embodiments, the one or more non-coding RNAs detected in a sample comprise at least about 70%, 75%, 80%, 85%, 90%, 91%, 92%, 93%, 94%, 95%, 96%, 97%, 98%, 99% or 100% sequence identity to SEQ ID NO: 556. In some embodiments, the one or more non-coding RNAs detected in a sample comprise at least about 70%, 75%, 80%, 85%, 90%, 91%, 92%, 93%, 94%, 95%, 96%, 97%, 98%, 99% or 100% sequence identity to SEQ ID NO: 557. In some embodiments, the one or more non-coding RNAs detected in a sample comprise at least about 70%, 75%, 80%, 85%, 90%, 91%, 92%, 93%, 94%, 95%, 96%, 97%, 98%, 99% or 100% sequence identity to SEQ ID NO: 558. In some embodiments, the one or more non-coding RNAs detected in a sample comprise at least about 70%, 75%, 80%, 85%, 90%, 91%, 92%, 93%, 94%, 95%, 96%, 97%, 98%, 99% or 100% sequence identity to SEQ ID NO: 559. In some embodiments, the one or more non-coding RNAs detected in a sample comprise at least about 70%, 75%, 80%, 85%, 90%, 91%, 92%, 93%, 94%, 95%, 96%, 97%, 98%, 99% or 100% sequence identity to SEQ ID NO: 560. In some embodiments, the one or more non-coding RNAs detected in a sample comprise at least about 70%, 75%, 80%, 85%, 90%, 91%, 92%, 93%, 94%, 95%, 96%, 97%, 98%, 99% or 100% sequence identity to SEQ ID NO: 561. In some embodiments, the one or more non-coding RNAs detected in a sample comprise at least about 70%, 75%, 80%, 85%, 90%, 91%, 92%, 93%, 94%, 95%, 96%, 97%, 98%, 99% or 100% sequence identity to SEQ ID NO: 562. In some embodiments, the one or more non-coding RNAs detected in a sample comprise at least about 70%, 75%, 80%, 85%, 90%, 91%, 92%, 93%, 94%, 95%, 96%, 97%, 98%, 99% or 100% sequence identity to SEQ ID NO: 563. In some embodiments, the one or more non-coding RNAs detected in a sample comprise at least about 70%, 75%, 80%, 85%, 90%, 91%, 92%, 93%, 94%, 95%, 96%, 97%, 98%, 99% or 100% sequence identity to SEQ ID NO: 564. In some embodiments, the one or more non-coding RNAs detected in a sample comprise at least about 70%, 75%, 80%, 85%, 90%, 91%, 92%, 93%, 94%, 95%, 96%, 97%, 98%, 99% or 100% sequence identity to SEQ ID NO: 565. In some embodiments, the one or more non-coding RNAs detected in a sample comprise at least about 70%, 75%, 80%, 85%, 90%, 91%, 92%, 93%, 94%, 95%, 96%, 97%, 98%, 99% or 100% sequence identity to SEQ ID NO: 566. In some embodiments, the one or more non-coding RNAs detected in a sample comprise at least about 70%, 75%, 80%, 85%, 90%, 91%, 92%, 93%, 94%, 95%, 96%, 97%, 98%, 99% or 100% sequence identity to SEQ ID NO: 567. In some embodiments, the one or more non-coding RNAs detected in a sample comprise at least about 70%, 75%, 80%, 85%, 90%, 91%, 92%, 93%, 94%, 95%, 96%, 97%, 98%, 99% or 100% sequence identity to SEQ ID NO: 568. In some embodiments, the one or more non-coding RNAs detected in a sample comprise at least about 70%, 75%, 80%, 85%, 90%, 91%, 92%, 93%, 94%, 95%, 96%, 97%, 98%, 99% or 100% sequence identity to SEQ ID NO: 569. In some embodiments, the one or more non-coding RNAs detected in a sample comprise at least about 70%, 75%, 80%, 85%, 90%, 91%, 92%, 93%, 94%, 95%, 96%, 97%, 98%, 99% or 100% sequence identity to SEQ ID NO: 570. In some embodiments, the one or more non-coding RNAs detected in a sample comprise at least about 70%, 75%, 80%, 85%, 90%, 91%, 92%, 93%, 94%, 95%, 96%, 97%, 98%, 99% or 100% sequence identity to SEQ ID NO: 571. In some embodiments, the one or more non-coding RNAs detected in a sample comprise at least about 70%, 75%, 80%, 85%, 90%, 91%, 92%, 93%, 94%, 95%, 96%, 97%, 98%, 99% or 100% sequence identity to SEQ ID NO: 572. In some embodiments, the one or more non-coding RNAs detected in a sample comprise at least about 70%, 75%, 80%, 85%, 90%, 91%, 92%, 93%, 94%, 95%, 96%, 97%, 98%, 99% or 100% sequence identity to SEQ ID NO: 573. In some embodiments, the one or more non-coding RNAs detected in a sample comprise at least about 70%, 75%, 80%, 85%, 90%, 91%, 92%, 93%, 94%, 95%, 96%, 97%, 98%, 99% or 100% sequence identity to SEQ ID NO: 574. In some embodiments, the one or more non-coding RNAs detected in a sample comprise at least about 70%, 75%, 80%, 85%, 90%, 91%, 92%, 93%, 94%, 95%, 96%, 97%, 98%, 99% or 100% sequence identity to SEQ ID NO: 575. In some embodiments, the one or more non-coding RNAs detected in a sample comprise at least about 70%, 75%, 80%, 85%, 90%, 91%, 92%, 93%, 94%, 95%, 96%, 97%, 98%, 99% or 100% sequence identity to SEQ ID NO: 576. In some embodiments, the one or more non-coding RNAs detected in a sample comprise at least about 70%, 75%, 80%, 85%, 90%, 91%, 92%, 93%, 94%, 95%, 96%, 97%, 98%, 99% or 100% sequence identity to SEQ ID NO: 577. In some embodiments, the one or more non-coding RNAs detected in a sample comprise at least about 70%, 75%, 80%, 85%, 90%, 91%, 92%, 93%, 94%, 95%, 96%, 97%, 98%, 99% or 100% sequence identity to SEQ ID NO: 578. In some embodiments, the one or more non-coding RNAs detected in a sample comprise at least about 70%, 75%, 80%, 85%, 90%, 91%, 92%, 93%, 94%, 95%, 96%, 97%, 98%, 99% or 100% sequence identity to SEQ ID NO: 579. In some embodiments, the one or more non-coding RNAs detected in a sample comprise at least about 70%, 75%, 80%, 85%, 90%, 91%, 92%, 93%, 94%, 95%, 96%, 97%, 98%, 99% or 100% sequence identity to SEQ ID NO: 580. In some embodiments, the one or more non-coding RNAs detected in a sample comprise at least about 70%, 75%, 80%, 85%, 90%, 91%, 92%, 93%, 94%, 95%, 96%, 97%, 98%, 99% or 100% sequence identity to SEQ ID NO: 581. In some embodiments, the one or more non-coding RNAs detected in a sample comprise at least about 70%, 75%, 80%, 85%, 90%, 91%, 92%, 93%, 94%, 95%, 96%, 97%, 98%, 99% or 100% sequence identity to SEQ ID NO: 582. In some embodiments, the one or more non-coding RNAs detected in a sample comprise at least about 70%, 75%, 80%, 85%, 90%, 91%, 92%, 93%, 94%, 95%, 96%, 97%, 98%, 99% or 100% sequence identity to SEQ ID NO: 583. In some embodiments, the one or more non-coding RNAs detected in a sample comprise at least about 70%, 75%, 80%, 85%, 90%, 91%, 92%, 93%, 94%, 95%, 96%, 97%, 98%, 99% or 100% sequence identity to SEQ ID NO: 584. In some embodiments, the one or more non-coding RNAs detected in a sample comprise at least about 70%, 75%, 80%, 85%, 90%, 91%, 92%, 93%, 94%, 95%, 96%, 97%, 98%, 99% or 100% sequence identity to SEQ ID NO: 585. In some embodiments, the one or more non-coding RNAs detected in a sample comprise at least about 70%, 75%, 80%, 85%, 90%, 91%, 92%, 93%, 94%, 95%, 96%, 97%, 98%, 99% or 100% sequence identity to SEQ ID NO: 586. In some embodiments, the one or more non-coding RNAs detected in a sample comprise at least about 70%, 75%, 80%, 85%, 90%, 91%, 92%, 93%, 94%, 95%, 96%, 97%, 98%, 99% or 100% sequence identity to SEQ ID NO: 587. In some embodiments, the one or more non-coding RNAs detected in a sample comprise at least about 70%, 75%, 80%, 85%, 90%, 91%, 92%, 93%, 94%, 95%, 96%, 97%, 98%, 99% or 100% sequence identity to SEQ ID NO: 588. In some embodiments, the one or more non-coding RNAs detected in a sample comprise at least about 70%, 75%, 80%, 85%, 90%, 91%, 92%, 93%, 94%, 95%, 96%, 97%, 98%, 99% or 100% sequence identity to SEQ ID NO: 589. In some embodiments, the one or more non-coding RNAs detected in a sample comprise at least about 70%, 75%, 80%, 85%, 90%, 91%, 92%, 93%, 94%, 95%, 96%, 97%, 98%, 99% or 100% sequence identity to SEQ ID NO: 590. In some embodiments, the one or more non-coding RNAs detected in a sample comprise at least about 70%, 75%, 80%, 85%, 90%, 91%, 92%, 93%, 94%, 95%, 96%, 97%, 98%, 99% or 100% sequence identity to SEQ ID NO: 591. In some embodiments, the one or more non-coding RNAs detected in a sample comprise at least about 70%, 75%, 80%, 85%, 90%, 91%, 92%, 93%, 94%, 95%, 96%, 97%, 98%, 99% or 100% sequence identity to SEQ ID NO: 592. In some embodiments, the one or more non-coding RNAs detected in a sample comprise at least about 70%, 75%, 80%, 85%, 90%, 91%, 92%, 93%, 94%, 95%, 96%, 97%, 98%, 99% or 100% sequence identity to SEQ ID NO: 593. In some embodiments, the one or more non-coding RNAs detected in a sample comprise at least about 70%, 75%, 80%, 85%, 90%, 91%, 92%, 93%, 94%, 95%, 96%, 97%, 98%, 99% or 100% sequence identity to SEQ ID NO: 594. In some embodiments, the one or more non-coding RNAs detected in a sample comprise at least about 70%, 75%, 80%, 85%, 90%, 91%, 92%, 93%, 94%, 95%, 96%, 97%, 98%, 99% or 100% sequence identity to SEQ ID NO: 595. In some embodiments, the one or more non-coding RNAs detected in a sample comprise at least about 70%, 75%, 80%, 85%, 90%, 91%, 92%, 93%, 94%, 95%, 96%, 97%, 98%, 99% or 100% sequence identity to SEQ ID NO: 596. In some embodiments, the one or more non-coding RNAs detected in a sample comprise at least about 70%, 75%, 80%, 85%, 90%, 91%, 92%, 93%, 94%, 95%, 96%, 97%, 98%, 99% or 100% sequence identity to SEQ ID NO: 597. In some embodiments, the one or more non-coding RNAs detected in a sample comprise at least about 70%, 75%, 80%, 85%, 90%, 91%, 92%, 93%, 94%, 95%, 96%, 97%, 98%, 99% or 100% sequence identity to SEQ ID NO: 598. In some embodiments, the one or more non-coding RNAs detected in a sample comprise at least about 70%, 75%, 80%, 85%, 90%, 91%, 92%, 93%, 94%, 95%, 96%, 97%, 98%, 99% or 100% sequence identity to SEQ ID NO: 599. In some embodiments, the one or more non-coding RNAs detected in a sample comprise at least about 70%, 75%, 80%, 85%, 90%, 91%, 92%, 93%, 94%, 95%, 96%, 97%, 98%, 99% or 100% sequence identity to SEQ ID NO: 600. In some embodiments, the one or more non-coding RNAs detected in a sample comprise at least about 70%, 75%, 80%, 85%, 90%, 91%, 92%, 93%, 94%, 95%, 96%, 97%, 98%, 99% or 100% sequence identity to SEQ ID NO: 601. In some embodiments, the one or more non-coding RNAs detected in a sample comprise at least about 70%, 75%, 80%, 85%, 90%, 91%, 92%, 93%, 94%, 95%, 96%, 97%, 98%, 99% or 100% sequence identity to SEQ ID NO: 602. In some embodiments, the one or more non-coding RNAs detected in a sample comprise at least about 70%, 75%, 80%, 85%, 90%, 91%, 92%, 93%, 94%, 95%, 96%, 97%, 98%, 99% or 100% sequence identity to SEQ ID NO: 603. In some embodiments, the one or more non-coding RNAs detected in a sample comprise at least about 70%, 75%, 80%, 85%, 90%, 91%, 92%, 93%, 94%, 95%, 96%, 97%, 98%, 99% or 100% sequence identity to SEQ ID NO: 604. In some embodiments, the one or more non-coding RNAs detected in a sample comprise at least about 70%, 75%, 80%, 85%, 90%, 91%, 92%, 93%, 94%, 95%, 96%, 97%, 98%, 99% or 100% sequence identity to SEQ ID NO: 605. In some embodiments, the one or more non-coding RNAs detected in a sample comprise at least about 70%, 75%, 80%, 85%, 90%, 91%, 92%, 93%, 94%, 95%, 96%, 97%, 98%, 99% or 100% sequence identity to SEQ ID NO: 606. In some embodiments, the one or more non-coding RNAs detected in a sample comprise at least about 70%, 75%, 80%, 85%, 90%, 91%, 92%, 93%, 94%, 95%, 96%, 97%, 98%, 99% or 100% sequence identity to SEQ ID NO: 607. In some embodiments, the one or more non-coding RNAs detected in a sample comprise at least about 70%, 75%, 80%, 85%, 90%, 91%, 92%, 93%, 94%, 95%, 96%, 97%, 98%, 99% or 100% sequence identity to SEQ ID NO: 608. In some embodiments, the one or more non-coding RNAs detected in a sample comprise at least about 70%, 75%, 80%, 85%, 90%, 91%, 92%, 93%, 94%, 95%, 96%, 97%, 98%, 99% or 100% sequence identity to SEQ ID NO: 609. In some embodiments, the one or more non-coding RNAs detected in a sample comprise at least about 70%, 75%, 80%, 85%, 90%, 91%, 92%, 93%, 94%, 95%, 96%, 97%, 98%, 99% or 100% sequence identity to SEQ ID NO: 610. In some embodiments, the one or more non-coding RNAs detected in a sample comprise at least about 70%, 75%, 80%, 85%, 90%, 91%, 92%, 93%, 94%, 95%, 96%, 97%, 98%, 99% or 100% sequence identity to SEQ ID NO: 611. In some embodiments, the one or more non-coding RNAs detected in a sample comprise at least about 70%, 75%, 80%, 85%, 90%, 91%, 92%, 93%, 94%, 95%, 96%, 97%, 98%, 99% or 100% sequence identity to SEQ ID NO: 612. In some embodiments, the one or more non-coding RNAs detected in a sample comprise at least about 70%, 75%, 80%, 85%, 90%, 91%, 92%, 93%, 94%, 95%, 96%, 97%, 98%, 99% or 100% sequence identity to SEQ ID NO: 613. In some embodiments, the one or more non-coding RNAs detected in a sample comprise at least about 70%, 75%, 80%, 85%, 90%, 91%, 92%, 93%, 94%, 95%, 96%, 97%, 98%, 99% or 100% sequence identity to SEQ ID NO: 614. In some embodiments, the one or more non-coding RNAs detected in a sample comprise at least about 70%, 75%, 80%, 85%, 90%, 91%, 92%, 93%, 94%, 95%, 96%, 97%, 98%, 99% or 100% sequence identity to SEQ ID NO: 615. In some embodiments, the one or more non-coding RNAs detected in a sample comprise at least about 70%, 75%, 80%, 85%, 90%, 91%, 92%, 93%, 94%, 95%, 96%, 97%, 98%, 99% or 100% sequence identity to SEQ ID NO: 616. In some embodiments, the one or more non-coding RNAs detected in a sample comprise at least about 70%, 75%, 80%, 85%, 90%, 91%, 92%, 93%, 94%, 95%, 96%, 97%, 98%, 99% or 100% sequence identity to SEQ ID NO: 617. In some embodiments, the one or more non-coding RNAs detected in a sample comprise at least about 70%, 75%, 80%, 85%, 90%, 91%, 92%, 93%, 94%, 95%, 96%, 97%, 98%, 99% or 100% sequence identity to SEQ ID NO: 618. In some embodiments, the one or more non-coding RNAs detected in a sample comprise at least about 70%, 75%, 80%, 85%, 90%, 91%, 92%, 93%, 94%, 95%, 96%, 97%, 98%, 99% or 100% sequence identity to SEQ ID NO: 619. In some embodiments, the one or more non-coding RNAs detected in a sample comprise at least about 70%, 75%, 80%, 85%, 90%, 91%, 92%, 93%, 94%, 95%, 96%, 97%, 98%, 99% or 100% sequence identity to SEQ ID NO: 620. In some embodiments, the one or more non-coding RNAs detected in a sample comprise at least about 70%, 75%, 80%, 85%, 90%, 91%, 92%, 93%, 94%, 95%, 96%, 97%, 98%, 99% or 100% sequence identity to SEQ ID NO: 621. In some embodiments, the one or more non-coding RNAs detected in a sample comprise at least about 70%, 75%, 80%, 85%, 90%, 91%, 92%, 93%, 94%, 95%, 96%, 97%, 98%, 99% or 100% sequence identity to SEQ ID NO: 622. In some embodiments, the one or more non-coding RNAs detected in a sample comprise at least about 70%, 75%, 80%, 85%, 90%, 91%, 92%, 93%, 94%, 95%, 96%, 97%, 98%, 99% or 100% sequence identity to SEQ ID NO: 623. In some embodiments, the one or more non-coding RNAs detected in a sample comprise at least about 70%, 75%, 80%, 85%, 90%, 91%, 92%, 93%, 94%, 95%, 96%, 97%, 98%, 99% or 100% sequence identity to SEQ ID NO: 624. In some embodiments, the one or more non-coding RNAs detected in a sample comprise at least about 70%, 75%, 80%, 85%, 90%, 91%, 92%, 93%, 94%, 95%, 96%, 97%, 98%, 99% or 100% sequence identity to SEQ ID NO: 625. In some embodiments, the one or more non-coding RNAs detected in a sample comprise at least about 70%, 75%, 80%, 85%, 90%, 91%, 92%, 93%, 94%, 95%, 96%, 97%, 98%, 99% or 100% sequence identity to SEQ ID NO: 626. In some embodiments, the one or more non-coding RNAs detected in a sample comprise at least about 70%, 75%, 80%, 85%, 90%, 91%, 92%, 93%, 94%, 95%, 96%, 97%, 98%, 99% or 100% sequence identity to SEQ ID NO: 627. In some embodiments, the one or more non-coding RNAs detected in a sample comprise at least 70%, 75%, 80%, 85%, 90%, 91%, 92%, 93%, 94%, 95%, 96%, 97%, 98%, 99% or 100% sequence identity to SEQ ID NO: 628. In some embodiments, the one or more non-coding RNAs detected in a sample comprise at least about 70%, 75%, 80%, 85%, 90%, 91%, 92%, 93%, 94%, 95%, 96%, 97%, 98%, 99% or 100% sequence identity to SEQ ID NO: 629. In some embodiments, the one or more non-coding RNAs detected in a sample comprise at least about 70%, 75%, 80%, 85%, 90%, 91%, 92%, 93%, 94%, 95%, 96%, 97%, 98%, 99% or 100% sequence identity to SEQ ID NO: 630. In some embodiments, the one or more non-coding RNAs detected in a sample comprise at least about 70%, 75%, 80%, 85%, 90%, 91%, 92%, 93%, 94%, 95%, 96%, 97%, 98%, 99% or 100% sequence identity to SEQ ID NO: 631. In some embodiments, the one or more non-coding RNAs detected in a sample comprise at least about 70%, 75%, 80%, 85%, 90%, 91%, 92%, 93%, 94%, 95%, 96%, 97%, 98%, 99% or 100% sequence identity to SEQ ID NO: 632. In some embodiments, the one or more non-coding RNAs detected in a sample comprise at least about 70%, 75%, 80%, 85%, 90%, 91%, 92%, 93%, 94%, 95%, 96%, 97%, 98%, 99% or 100% sequence identity to SEQ ID NO: 633. In some embodiments, the one or more non-coding RNAs detected in a sample comprise at least about 70%, 75%, 80%, 85%, 90%, 91%, 92%, 93%, 94%, 95%, 96%, 97%, 98%, 99% or 100% sequence identity to SEQ ID NO: 634. In some embodiments, the one or more non-coding RNAs detected in a sample comprise at least about 70%, 75%, 80%, 85%, 90%, 91%, 92%, 93%, 94%, 95%, 96%, 97%, 98%, 99% or 100% sequence identity to SEQ ID NO: 635. In some embodiments, the one or more non-coding RNAs detected in a sample comprise at least about 70%, 75%, 80%, 85%, 90%, 91%, 92%, 93%, 94%, 95%, 96%, 97%, 98%, 99% or 100% sequence identity to SEQ ID NO: 636. In some embodiments, the one or more non-coding RNAs detected in a sample comprise at least about 70%, 75%, 80%, 85%, 90%, 91%, 92%, 93%, 94%, 95%, 96%, 97%, 98%, 99% or 100% sequence identity to SEQ ID NO: 637. In some embodiments, the one or more non-coding RNAs detected in a sample comprise at least about 70%, 75%, 80%, 85%, 90%, 91%, 92%, 93%, 94%, 95%, 96%, 97%, 98%, 99% or 100% sequence identity to SEQ ID NO: 638. In some embodiments, the one or more non-coding RNAs detected in a sample comprise at least about 70%, 75%, 80%, 85%, 90%, 91%, 92%, 93%, 94%, 95%, 96%, 97%, 98%, 99% or 100% sequence identity to SEQ ID NO: 639. In some embodiments, the one or more non-coding RNAs detected in a sample comprise at least about 70%, 75%, 80%, 85%, 90%, 91%, 92%, 93%, 94%, 95%, 96%, 97%, 98%, 99% or 100% sequence identity to SEQ ID NO: 640. In some embodiments, the one or more non-coding RNAs detected in a sample comprise at least about 70%, 75%, 80%, 85%, 90%, 91%, 92%, 93%, 94%, 95%, 96%, 97%, 98%, 99% or 100% sequence identity to SEQ ID NO: 641. In some embodiments, the one or more non-coding RNAs detected in a sample comprise at least about 70%, 75%, 80%, 85%, 90%, 91%, 92%, 93%, 94%, 95%, 96%, 97%, 98%, 99% or 100% sequence identity to SEQ ID NO: 642. In some embodiments, the one or more non-coding RNAs detected in a sample comprise at least about 70%, 75%, 80%, 85%, 90%, 91%, 92%, 93%, 94%, 95%, 96%, 97%, 98%, 99% or 100% sequence identity to SEQ ID NO: 643. In some embodiments, the one or more non-coding RNAs detected in a sample comprise at least about 70%, 75%, 80%, 85%, 90%, 91%, 92%, 93%, 94%, 95%, 96%, 97%, 98%, 99% or 100% sequence identity to SEQ ID NO: 644. In some embodiments, the one or more non-coding RNAs detected in a sample comprise at least about 70%, 75%, 80%, 85%, 90%, 91%, 92%, 93%, 94%, 95%, 96%, 97%, 98%, 99% or 100% sequence identity to SEQ ID NO: 645. In some embodiments, the one or more non-coding RNAs detected in a sample comprise at least about 70%, 75%, 80%, 85%, 90%, 91%, 92%, 93%, 94%, 95%, 96%, 97%, 98%, 99% or 100% sequence identity to SEQ ID NO: 646. In some embodiments, the one or more non-coding RNAs detected in a sample comprise at least about 70%, 75%, 80%, 85%, 90%, 91%, 92%, 93%, 94%, 95%, 96%, 97%, 98%, 99% or 100% sequence identity to SEQ ID NO: 647. In some embodiments, the one or more non-coding RNAs detected in a sample comprise at least about 70%, 75%, 80%, 85%, 90%, 91%, 92%, 93%, 94%, 95%, 96%, 97%, 98%, 99% or 100% sequence identity to SEQ ID NO: 648. In some embodiments, the one or more non-coding RNAs detected in a sample comprise at least about 70%, 75%, 80%, 85%, 90%, 91%, 92%, 93%, 94%, 95%, 96%, 97%, 98%, 99% or 100% sequence identity to SEQ ID NO: 649. In some embodiments, the one or more non-coding RNAs detected in a sample comprise at least about 70%, 75%, 80%, 85%, 90%, 91%, 92%, 93%, 94%, 95%, 96%, 97%, 98%, 99% or 100% sequence identity to SEQ ID NO: 650. In some embodiments, the one or more non-coding RNAs detected in a sample comprise at least about 70%, 75%, 80%, 85%, 90%, 91%, 92%, 93%, 94%, 95%, 96%, 97%, 98%, 99% or 100% sequence identity to SEQ ID NO: 651. In some embodiments, the one or more non-coding RNAs detected in a sample comprise at least about 70%, 75%, 80%, 85%, 90%, 91%, 92%, 93%, 94%, 95%, 96%, 97%, 98%, 99% or 100% sequence identity to SEQ ID NO: 652. In some embodiments, the one or more non-coding RNAs detected in a sample comprise at least about 70%, 75%, 80%, 85%, 90%, 91%, 92%, 93%, 94%, 95%, 96%, 97%, 98%, 99% or 100% sequence identity to SEQ ID NO: 653. In some embodiments, the one or more non-coding RNAs detected in a sample comprise at least about 70%, 75%, 80%, 85%, 90%, 91%, 92%, 93%, 94%, 95%, 96%, 97%, 98%, 99% or 100% sequence identity to SEQ ID NO: 654. In some embodiments, the one or more non-coding RNAs detected in a sample comprise at least about 70%, 75%, 80%, 85%, 90%, 91%, 92%, 93%, 94%, 95%, 96%, 97%, 98%, 99% or 100% sequence identity to SEQ ID NO: 655. In some embodiments, the one or more non-coding RNAs detected in a sample comprise at least about 70%, 75%, 80%, 85%, 90%, 91%, 92%, 93%, 94%, 95%, 96%, 97%, 98%, 99% or 100% sequence identity to SEQ ID NO: 656. In some embodiments, the one or more non-coding RNAs detected in a sample comprise at least about 70%, 75%, 80%, 85%, 90%, 91%, 92%, 93%, 94%, 95%, 96%, 97%, 98%, 99% or 100% sequence identity to SEQ ID NO: 657. In some embodiments, the one or more non-coding RNAs detected in a sample comprise at least about 70%, 75%, 80%, 85%, 90%, 91%, 92%, 93%, 94%, 95%, 96%, 97%, 98%, 99% or 100% sequence identity to SEQ ID NO: 658. In some embodiments, the one or more non-coding RNAs detected in a sample comprise at least about 70%, 75%, 80%, 85%, 90%, 91%, 92%, 93%, 94%, 95%, 96%, 97%, 98%, 99% or 100% sequence identity to SEQ ID NO: 659. In some embodiments, the one or more non-coding RNAs detected in a sample comprise at least about 70%, 75%, 80%, 85%, 90%, 91%, 92%, 93%, 94%, 95%, 96%, 97%, 98%, 99% or 100% sequence identity to SEQ ID NO: 660. In some embodiments, the one or more non-coding RNAs detected in a sample comprise at least about 70%, 75%, 80%, 85%, 90%, 91%, 92%, 93%, 94%, 95%, 96%, 97%, 98%, 99% or 100% sequence identity to SEQ ID NO: 661. In some embodiments, the one or more non-coding RNAs detected in a sample comprise at least about 70%, 75%, 80%, 85%, 90%, 91%, 92%, 93%, 94%, 95%, 96%, 97%, 98%, 99% or 100% sequence identity to SEQ ID NO: 662. In some embodiments, the one or more non-coding RNAs detected in a sample comprise at least about 70%, 75%, 80%, 85%, 90%, 91%, 92%, 93%, 94%, 95%, 96%, 97%, 98%, 99% or 100% sequence identity to SEQ ID NO: 663. In some embodiments, the one or more non-coding RNAs detected in a sample comprise at least about 70%, 75%, 80%, 85%, 90%, 91%, 92%, 93%, 94%, 95%, 96%, 97%, 98%, 99% or 100% sequence identity to SEQ ID NO: 664. In some embodiments, the one or more non-coding RNAs detected in a sample comprise at least about 70%, 75%, 80%, 85%, 90%, 91%, 92%, 93%, 94%, 95%, 96%, 97%, 98%, 99% or 100% sequence identity to SEQ ID NO: 665. In some embodiments, the one or more non-coding RNAs detected in a sample comprise at least about 70%, 75%, 80%, 85%, 90%, 91%, 92%, 93%, 94%, 95%, 96%, 97%, 98%, 99% or 100% sequence identity to SEQ ID NO: 666. In some embodiments, the one or more non-coding RNAs detected in a sample comprise at least about 70%, 75%, 80%, 85%, 90%, 91%, 92%, 93%, 94%, 95%, 96%, 97%, 98%, 99% or 100% sequence identity to SEQ ID NO: 667. In some embodiments, the one or more non-coding RNAs detected in a sample comprise at least about 70%, 75%, 80%, 85%, 90%, 91%, 92%, 93%, 94%, 95%, 96%, 97%, 98%, 99% or 100% sequence identity to SEQ ID NO: 668. In some embodiments, the one or more non-coding RNAs detected in a sample comprise at least about 70%, 75%, 80%, 85%, 90%, 91%, 92%, 93%, 94%, 95%, 96%, 97%, 98%, 99% or 100% sequence identity to SEQ ID NO: 669. In some embodiments, the one or more non-coding RNAs detected in a sample comprise at least about 70%, 75%, 80%, 85%, 90%, 91%, 92%, 93%, 94%, 95%, 96%, 97%, 98%, 99% or 100% sequence identity to SEQ ID NO: 670. In some embodiments, the one or more non-coding RNAs detected in a sample comprise at least about 70%, 75%, 80%, 85%, 90%, 91%, 92%, 93%, 94%, 95%, 96%, 97%, 98%, 99% or 100% sequence identity to SEQ ID NO: 671. In some embodiments, the one or more non-coding RNAs detected in a sample comprise at least about 70%, 75%, 80%, 85%, 90%, 91%, 92%, 93%, 94%, 95%, 96%, 97%, 98%, 99% or 100% sequence identity to SEQ ID NO: 672. In some embodiments, the one or more non-coding RNAs detected in a sample comprise at least about 70%, 75%, 80%, 85%, 90%, 91%, 92%, 93%, 94%, 95%, 96%, 97%, 98%, 99% or 100% sequence identity to SEQ ID NO: 673. In some embodiments, the one or more non-coding RNAs detected in a sample comprise at least about 70%, 75%, 80%, 85%, 90%, 91%, 92%, 93%, 94%, 95%, 96%, 97%, 98%, 99% or 100% sequence identity to SEQ ID NO: 674. In some embodiments, the one or more non-coding RNAs detected in a sample comprise at least about 70%, 75%, 80%, 85%, 90%, 91%, 92%, 93%, 94%, 95%, 96%, 97%, 98%, 99% or 100% sequence identity to SEQ ID NO: 675. In some embodiments, the one or more non-coding RNAs detected in a sample comprise at least about 70%, 75%, 80%, 85%, 90%, 91%, 92%, 93%, 94%, 95%, 96%, 97%, 98%, 99% or 100% sequence identity to SEQ ID NO: 676. In some embodiments, the one or more non-coding RNAs detected in a sample comprise at least about 70%, 75%, 80%, 85%, 90%, 91%, 92%, 93%, 94%, 95%, 96%, 97%, 98%, 99% or 100% sequence identity to SEQ ID NO: 677. In some embodiments, the one or more non-coding RNAs detected in a sample comprise at least about 70%, 75%, 80%, 85%, 90%, 91%, 92%, 93%, 94%, 95%, 96%, 97%, 98%, 99% or 100% sequence identity to SEQ ID NO: 678. In some embodiments, the one or more non-coding RNAs detected in a sample comprise at least about 70%, 75%, 80%, 85%, 90%, 91%, 92%, 93%, 94%, 95%, 96%, 97%, 98%, 99% or 100% sequence identity to SEQ ID NO: 679. In some embodiments, the one or more non-coding RNAs detected in a sample comprise at least about 70%, 75%, 80%, 85%, 90%, 91%, 92%, 93%, 94%, 95%, 96%, 97%, 98%, 99% or 100% sequence identity to SEQ ID NO: 680. In some embodiments, the one or more non-coding RNAs detected in a sample comprise at least about 70%, 75%, 80%, 85%, 90%, 91%, 92%, 93%, 94%, 95%, 96%, 97%, 98%, 99% or 100% sequence identity to SEQ ID NO: 681. In some embodiments, the one or more non-coding RNAs detected in a sample comprise at least about 70%, 75%, 80%, 85%, 90%, 91%, 92%, 93%, 94%, 95%, 96%, 97%, 98%, 99% or 100% sequence identity to SEQ ID NO: 682. In some embodiments, the one or more non-coding RNAs detected in a sample comprise at least about 70%, 75%, 80%, 85%, 90%, 91%, 92%, 93%, 94%, 95%, 96%, 97%, 98%, 99% or 100% sequence identity to SEQ ID NO: 683. In some embodiments, the one or more non-coding RNAs detected in a sample comprise at least about 70%, 75%, 80%, 85%, 90%, 91%, 92%, 93%, 94%, 95%, 96%, 97%, 98%, 99% or 100% sequence identity to SEQ ID NO: 684. In some embodiments, the one or more non-coding RNAs detected in a sample comprise at least about 70%, 75%, 80%, 85%, 90%, 91%, 92%, 93%, 94%, 95%, 96%, 97%, 98%, 99% or 100% sequence identity to SEQ ID NO: 685. In some embodiments, the one or more non-coding RNAs detected in a sample comprise at least about 70%, 75%, 80%, 85%, 90%, 91%, 92%, 93%, 94%, 95%, 96%, 97%, 98%, 99% or 100% sequence identity to SEQ ID NO: 686. In some embodiments, the one or more non-coding RNAs detected in a sample comprise at least about 70%, 75%, 80%, 85%, 90%, 91%, 92%, 93%, 94%, 95%, 96%, 97%, 98%, 99% or 100% sequence identity to SEQ ID NO: 687. In some embodiments, the one or more non-coding RNAs detected in a sample comprise at least about 70%, 75%, 80%, 85%, 90%, 91%, 92%, 93%, 94%, 95%, 96%, 97%, 98%, 99% or 100% sequence identity to SEQ ID NO: 688. In some embodiments, the one or more non-coding RNAs detected in a sample comprise at least about 70%, 75%, 80%, 85%, 90%, 91%, 92%, 93%, 94%, 95%, 96%, 97%, 98%, 99% or 100% sequence identity to SEQ ID NO: 689. In some embodiments, the one or more non-coding RNAs detected in a sample comprise at least about 70%, 75%, 80%, 85%, 90%, 91%, 92%, 93%, 94%, 95%, 96%, 97%, 98%, 99% or 100% sequence identity to SEQ ID NO: 690. In some embodiments, the one or more non-coding RNAs detected in a sample comprise at least about 70%, 75%, 80%, 85%, 90%, 91%, 92%, 93%, 94%, 95%, 96%, 97%, 98%, 99% or 100% sequence identity to SEQ ID NO: 691. In some embodiments, the one or more non-coding RNAs detected in a sample comprise at least about 70%, 75%, 80%, 85%, 90%, 91%, 92%, 93%, 94%, 95%, 96%, 97%, 98%, 99% or 100% sequence identity to SEQ ID NO: 692. In some embodiments, the one or more non-coding RNAs detected in a sample comprise at least about 70%, 75%, 80%, 85%, 90%, 91%, 92%, 93%, 94%, 95%, 96%, 97%, 98%, 99% or 100% sequence identity to SEQ ID NO: 693. In some embodiments, the one or more non-coding RNAs detected in a sample comprise at least about 70%, 75%, 80%, 85%, 90%, 91%, 92%, 93%, 94%, 95%, 96%, 97%, 98%, 99% or 100% sequence identity to SEQ ID NO: 694. In some embodiments, the one or more non-coding RNAs detected in a sample comprise at least about 70%, 75%, 80%, 85%, 90%, 91%, 92%, 93%, 94%, 95%, 96%, 97%, 98%, 99% or 100% sequence identity to SEQ ID NO: 695. In some embodiments, the one or more non-coding RNAs detected in a sample comprise at least about 70%, 75%, 80%, 85%, 90%, 91%, 92%, 93%, 94%, 95%, 96%, 97%, 98%, 99% or 100% sequence identity to SEQ ID NO: 696. In some embodiments, the one or more non-coding RNAs detected in a sample comprise at least about 70%, 75%, 80%, 85%, 90%, 91%, 92%, 93%, 94%, 95%, 96%, 97%, 98%, 99% or 100% sequence identity to SEQ ID NO: 697. In some embodiments, the one or more non-coding RNAs detected in a sample comprise at least about 70%, 75%, 80%, 85%, 90%, 91%, 92%, 93%, 94%, 95%, 96%, 97%, 98%, 99% or 100% sequence identity to SEQ ID NO: 698. In some embodiments, the one or more non-coding RNAs detected in a sample comprise at least about 70%, 75%, 80%, 85%, 90%, 91%, 92%, 93%, 94%, 95%, 96%, 97%, 98%, 99% or 100% sequence identity to SEQ ID NO: 699. In some embodiments, the one or more non-coding RNAs detected in a sample comprise at least about 70%, 75%, 80%, 85%, 90%, 91%, 92%, 93%, 94%, 95%, 96%, 97%, 98%, 99% or 100% sequence identity to SEQ ID NO: 700. In some embodiments, the one or more non-coding RNAs detected in a sample comprise at least about 70%, 75%, 80%, 85%, 90%, 91%, 92%, 93%, 94%, 95%, 96%, 97%, 98%, 99% or 100% sequence identity to SEQ ID NO: 701. In some embodiments, the one or more non-coding RNAs detected in a sample comprise at least about 70%, 75%, 80%, 85%, 90%, 91%, 92%, 93%, 94%, 95%, 96%, 97%, 98%, 99% or 100% sequence identity to SEQ ID NO: 702. In some embodiments, the one or more non-coding RNAs detected in a sample comprise at least about 70%, 75%, 80%, 85%, 90%, 91%, 92%, 93%, 94%, 95%, 96%, 97%, 98%, 99% or 100% sequence identity to SEQ ID NO: 703. In some embodiments, the one or more non-coding RNAs detected in a sample comprise at least about 70%, 75%, 80%, 85%, 90%, 91%, 92%, 93%, 94%, 95%, 96%, 97%, 98%, 99% or 100% sequence identity to SEQ ID NO: 704. In some embodiments, the one or more non-coding RNAs detected in a sample comprise at least about 70%, 75%, 80%, 85%, 90%, 91%, 92%, 93%, 94%, 95%, 96%, 97%, 98%, 99% or 100% sequence identity to SEQ ID NO: 705. In some embodiments, the one or more non-coding RNAs detected in a sample comprise at least about 70%, 75%, 80%, 85%, 90%, 91%, 92%, 93%, 94%, 95%, 96%, 97%, 98%, 99% or 100% sequence identity to SEQ ID NO: 706. In some embodiments, the one or more non-coding RNAs detected in a sample comprise at least about 70%, 75%, 80%, 85%, 90%, 91%, 92%, 93%, 94%, 95%, 96%, 97%, 98%, 99% or 100% sequence identity to SEQ ID NO: 707. In some embodiments, the one or more non-coding RNAs detected in a sample comprise at least about 70%, 75%, 80%, 85%, 90%, 91%, 92%, 93%, 94%, 95%, 96%, 97%, 98%, 99% or 100% sequence identity to SEQ ID NO: 708. In some embodiments, the one or more non-coding RNAs detected in a sample comprise at least about 70%, 75%, 80%, 85%, 90%, 91%, 92%, 93%, 94%, 95%, 96%, 97%, 98%, 99% or 100% sequence identity to SEQ ID NO: 709. In some embodiments, the one or more non-coding RNAs detected in a sample comprise at least about 70%, 75%, 80%, 85%, 90%, 91%, 92%, 93%, 94%, 95%, 96%, 97%, 98%, 99% or 100% sequence identity to SEQ ID NO: 710. In some embodiments, the one or more non-coding RNAs detected in a sample comprise at least about 70%, 75%, 80%, 85%, 90%, 91%, 92%, 93%, 94%, 95%, 96%, 97%, 98%, 99% or 100% sequence identity to SEQ ID NO: 711. In some embodiments, the one or more non-coding RNAs detected in a sample comprise at least about 70%, 75%, 80%, 85%, 90%, 91%, 92%, 93%, 94%, 95%, 96%, 97%, 98%, 99% or 100% sequence identity to SEQ ID NO: 712. In some embodiments, the one or more non-coding RNAs detected in a sample comprise at least about 70%, 75%, 80%, 85%, 90%, 91%, 92%, 93%, 94%, 95%, 96%, 97%, 98%, 99% or 100% sequence identity to SEQ ID NO: 713. In some embodiments, the one or more non-coding RNAs detected in a sample comprise at least about 70%, 75%, 80%, 85%, 90%, 91%, 92%, 93%, 94%, 95%, 96%, 97%, 98%, 99% or 100% sequence identity to SEQ ID NO: 714. In some embodiments, the one or more non-coding RNAs detected in a sample comprise at least about 70%, 75%, 80%, 85%, 90%, 91%, 92%, 93%, 94%, 95%, 96%, 97%, 98%, 99% or 100% sequence identity to SEQ ID NO: 715. In some embodiments, the one or more non-coding RNAs detected in a sample comprise at least about 70%, 75%, 80%, 85%, 90%, 91%, 92%, 93%, 94%, 95%, 96%, 97%, 98%, 99% or 100% sequence identity to SEQ ID NO: 716. In some embodiments, the one or more non-coding RNAs detected in a sample comprise at least about 70%, 75%, 80%, 85%, 90%, 91%, 92%, 93%, 94%, 95%, 96%, 97%, 98%, 99% or 100% sequence identity to SEQ ID NO: 717. In some embodiments, the one or more non-coding RNAs detected in a sample comprise at least about 70%, 75%, 80%, 85%, 90%, 91%, 92%, 93%, 94%, 95%, 96%, 97%, 98%, 99% or 100% sequence identity to SEQ ID NO: 718. In some embodiments, the one or more non-coding RNAs detected in a sample comprise at least about 70%, 75%, 80%, 85%, 90%, 91%, 92%, 93%, 94%, 95%, 96%, 97%, 98%, 99% or 100% sequence identity to SEQ ID NO: 719. In some embodiments, the one or more non-coding RNAs detected in a sample comprise at least about 70%, 75%, 80%, 85%, 90%, 91%, 92%, 93%, 94%, 95%, 96%, 97%, 98%, 99% or 100% sequence identity to SEQ ID NO: 720. In some embodiments, the one or more non-coding RNAs detected in a sample comprise at least about 70%, 75%, 80%, 85%, 90%, 91%, 92%, 93%, 94%, 95%, 96%, 97%, 98%, 99% or 100% sequence identity to SEQ ID NO: 721. In some embodiments, the one or more non-coding RNAs detected in a sample comprise at least about 70%, 75%, 80%, 85%, 90%, 91%, 92%, 93%, 94%, 95%, 96%, 97%, 98%, 99% or 100% sequence identity to SEQ ID NO: 722. In some embodiments, the one or more non-coding RNAs detected in a sample comprise at least about 70%, 75%, 80%, 85%, 90%, 91%, 92%, 93%, 94%, 95%, 96%, 97%, 98%, 99% or 100% sequence identity to SEQ ID NO: 723. In some embodiments, the one or more non-coding RNAs detected in a sample comprise at least about 70%, 75%, 80%, 85%, 90%, 91%, 92%, 93%, 94%, 95%, 96%, 97%, 98%, 99% or 100% sequence identity to SEQ ID NO: 724. In some embodiments, the one or more non-coding RNAs detected in a sample comprise at least about 70%, 75%, 80%, 85%, 90%, 91%, 92%, 93%, 94%, 95%, 96%, 97%, 98%, 99% or 100% sequence identity to SEQ ID NO: 725. In some embodiments, the one or more non-coding RNAs detected in a sample comprise at least about 70%, 75%, 80%, 85%, 90%, 91%, 92%, 93%, 94%, 95%, 96%, 97%, 98%, 99% or 100% sequence identity to SEQ ID NO: 726. In some embodiments, the one or more non-coding RNAs detected in a sample comprise at least about 70%, 75%, 80%, 85%, 90%, 91%, 92%, 93%, 94%, 95%, 96%, 97%, 98%, 99% or 100% sequence identity to SEQ ID NO: 727. In some embodiments, the one or more non-coding RNAs detected in a sample comprise at least 70%, 75%, 80%, 85%, 90%, 91%, 92%, 93%, 94%, 95%, 96%, 97%, 98%, 99% or 100% sequence identity to SEQ ID NO: 728. In some embodiments, the one or more non-coding RNAs detected in a sample comprise at least about 70%, 75%, 80%, 85%, 90%, 91%, 92%, 93%, 94%, 95%, 96%, 97%, 98%, 99% or 100% sequence identity to SEQ ID NO: 729. In some embodiments, the one or more non-coding RNAs detected in a sample comprise at least about 70%, 75%, 80%, 85%, 90%, 91%, 92%, 93%, 94%, 95%, 96%, 97%, 98%, 99% or 100% sequence identity to SEQ ID NO: 730. In some embodiments, the one or more non-coding RNAs detected in a sample comprise at least about 70%, 75%, 80%, 85%, 90%, 91%, 92%, 93%, 94%, 95%, 96%, 97%, 98%, 99% or 100% sequence identity to SEQ ID NO: 731. In some embodiments, the one or more non-coding RNAs detected in a sample comprise at least about 70%, 75%, 80%, 85%, 90%, 91%, 92%, 93%, 94%, 95%, 96%, 97%, 98%, 99% or 100% sequence identity to SEQ ID NO: 732. In some embodiments, the one or more non-coding RNAs detected in a sample comprise at least about 70%, 75%, 80%, 85%, 90%, 91%, 92%, 93%, 94%, 95%, 96%, 97%, 98%, 99% or 100% sequence identity to SEQ ID NO: 733. In some embodiments, the one or more non-coding RNAs detected in a sample comprise at least about 70%, 75%, 80%, 85%, 90%, 91%, 92%, 93%, 94%, 95%, 96%, 97%, 98%, 99% or 100% sequence identity to SEQ ID NO: 734. In some embodiments, the one or more non-coding RNAs detected in a sample comprise at least about 70%, 75%, 80%, 85%, 90%, 91%, 92%, 93%, 94%, 95%, 96%, 97%, 98%, 99% or 100% sequence identity to SEQ ID NO: 735. In some embodiments, the one or more non-coding RNAs detected in a sample comprise at least about 70%, 75%, 80%, 85%, 90%, 91%, 92%, 93%, 94%, 95%, 96%, 97%, 98%, 99% or 100% sequence identity to SEQ ID NO: 736. In some embodiments, the one or more non-coding RNAs detected in a sample comprise at least about 70%, 75%, 80%, 85%, 90%, 91%, 92%, 93%, 94%, 95%, 96%, 97%, 98%, 99% or 100% sequence identity to SEQ ID NO: 737. In some embodiments, the one or more non-coding RNAs detected in a sample comprise at least about 70%, 75%, 80%, 85%, 90%, 91%, 92%, 93%, 94%, 95%, 96%, 97%, 98%, 99% or 100% sequence identity to SEQ ID NO: 738. In some embodiments, the one or more non-coding RNAs detected in a sample comprise at least about 70%, 75%, 80%, 85%, 90%, 91%, 92%, 93%, 94%, 95%, 96%, 97%, 98%, 99% or 100% sequence identity to SEQ ID NO: 739. In some embodiments, the one or more non-coding RNAs detected in a sample comprise at least about 70%, 75%, 80%, 85%, 90%, 91%, 92%, 93%, 94%, 95%, 96%, 97%, 98%, 99% or 100% sequence identity to SEQ ID NO: 740. In some embodiments, the one or more non-coding RNAs detected in a sample comprise at least about 70%, 75%, 80%, 85%, 90%, 91%, 92%, 93%, 94%, 95%, 96%, 97%, 98%, 99% or 100% sequence identity to SEQ ID NO: 741. In some embodiments, the one or more non-coding RNAs detected in a sample comprise at least about 70%, 75%, 80%, 85%, 90%, 91%, 92%, 93%, 94%, 95%, 96%, 97%, 98%, 99% or 100% sequence identity to SEQ ID NO: 742. In some embodiments, the one or more non-coding RNAs detected in a sample comprise at least about 70%, 75%, 80%, 85%, 90%, 91%, 92%, 93%, 94%, 95%, 96%, 97%, 98%, 99% or 100% sequence identity to SEQ ID NO: 743. In some embodiments, the one or more non-coding RNAs detected in a sample comprise at least about 70%, 75%, 80%, 85%, 90%, 91%, 92%, 93%, 94%, 95%, 96%, 97%, 98%, 99% or 100% sequence identity to SEQ ID NO: 744. In some embodiments, the one or more non-coding RNAs detected in a sample comprise at least about 70%, 75%, 80%, 85%, 90%, 91%, 92%, 93%, 94%, 95%, 96%, 97%, 98%, 99% or 100% sequence identity to SEQ ID NO: 745. In some embodiments, the one or more non-coding RNAs detected in a sample comprise at least about 70%, 75%, 80%, 85%, 90%, 91%, 92%, 93%, 94%, 95%, 96%, 97%, 98%, 99% or 100% sequence identity to SEQ ID NO: 746. In some embodiments, the one or more non-coding RNAs detected in a sample comprise at least about 70%, 75%, 80%, 85%, 90%, 91%, 92%, 93%, 94%, 95%, 96%, 97%, 98%, 99% or 100% sequence identity to SEQ ID NO: 747. In some embodiments, the one or more non-coding RNAs detected in a sample comprise at least about 70%, 75%, 80%, 85%, 90%, 91%, 92%, 93%, 94%, 95%, 96%, 97%, 98%, 99% or 100% sequence identity to SEQ ID NO: 748. In some embodiments, the one or more non-coding RNAs detected in a sample comprise at least about 70%, 75%, 80%, 85%, 90%, 91%, 92%, 93%, 94%, 95%, 96%, 97%, 98%, 99% or 100% sequence identity to SEQ ID NO: 749. In some embodiments, the one or more non-coding RNAs detected in a sample comprise at least about 70%, 75%, 80%, 85%, 90%, 91%, 92%, 93%, 94%, 95%, 96%, 97%, 98%, 99% or 100% sequence identity to SEQ ID NO: 750. In some embodiments, the one or more non-coding RNAs detected in a sample comprise at least about 70%, 75%, 80%, 85%, 90%, 91%, 92%, 93%, 94%, 95%, 96%, 97%, 98%, 99% or 100% sequence identity to SEQ ID NO: 751. In some embodiments, the one or more non-coding RNAs detected in a sample comprise at least about 70%, 75%, 80%, 85%, 90%, 91%, 92%, 93%, 94%, 95%, 96%, 97%, 98%, 99% or 100% sequence identity to SEQ ID NO: 752. In some embodiments, the one or more non-coding RNAs detected in a sample comprise at least about 70%, 75%, 80%, 85%, 90%, 91%, 92%, 93%, 94%, 95%, 96%, 97%, 98%, 99% or 100% sequence identity to SEQ ID NO: 753. In some embodiments, the one or more non-coding RNAs detected in a sample comprise at least about 70%, 75%, 80%, 85%, 90%, 91%, 92%, 93%, 94%, 95%, 96%, 97%, 98%, 99% or 100% sequence identity to SEQ ID NO: 754. In some embodiments, the one or more non-coding RNAs detected in a sample comprise at least about 70%, 75%, 80%, 85%, 90%, 91%, 92%, 93%, 94%, 95%, 96%, 97%, 98%, 99% or 100% sequence identity to SEQ ID NO: 755. In some embodiments, the one or more non-coding RNAs detected in a sample comprise at least about 70%, 75%, 80%, 85%, 90%, 91%, 92%, 93%, 94%, 95%, 96%, 97%, 98%, 99% or 100% sequence identity to SEQ ID NO: 756. In some embodiments, the one or more non-coding RNAs detected in a sample comprise at least about 70%, 75%, 80%, 85%, 90%, 91%, 92%, 93%, 94%, 95%, 96%, 97%, 98%, 99% or 100% sequence identity to SEQ ID NO: 757. In some embodiments, the one or more non-coding RNAs detected in a sample comprise at least about 70%, 75%, 80%, 85%, 90%, 91%, 92%, 93%, 94%, 95%, 96%, 97%, 98%, 99% or 100% sequence identity to SEQ ID NO: 758. In some embodiments, the one or more non-coding RNAs detected in a sample comprise at least about 70%, 75%, 80%, 85%, 90%, 91%, 92%, 93%, 94%, 95%, 96%, 97%, 98%, 99% or 100% sequence identity to SEQ ID NO: 759. In some embodiments, the one or more non-coding RNAs detected in a sample comprise at least about 70%, 75%, 80%, 85%, 90%, 91%, 92%, 93%, 94%, 95%, 96%, 97%, 98%, 99% or 100% sequence identity to SEQ ID NO: 760. In some embodiments, the one or more non-coding RNAs detected in a sample comprise at least about 70%, 75%, 80%, 85%, 90%, 91%, 92%, 93%, 94%, 95%, 96%, 97%, 98%, 99% or 100% sequence identity to SEQ ID NO: 761. In some embodiments, the one or more non-coding RNAs detected in a sample comprise at least about 70%, 75%, 80%, 85%, 90%, 91%, 92%, 93%, 94%, 95%, 96%, 97%, 98%, 99% or 100% sequence identity to SEQ ID NO: 762. In some embodiments, the one or more non-coding RNAs detected in a sample comprise at least about 70%, 75%, 80%, 85%, 90%, 91%, 92%, 93%, 94%, 95%, 96%, 97%, 98%, 99% or 100% sequence identity to SEQ ID NO: 763. In some embodiments, the one or more non-coding RNAs detected in a sample comprise at least about 70%, 75%, 80%, 85%, 90%, 91%, 92%, 93%, 94%, 95%, 96%, 97%, 98%, 99% or 100% sequence identity to SEQ ID NO: 764. In some embodiments, the one or more non-coding RNAs detected in a sample comprise at least about 70%, 75%, 80%, 85%, 90%, 91%, 92%, 93%, 94%, 95%, 96%, 97%, 98%, 99% or 100% sequence identity to SEQ ID NO: 765. In some embodiments, the one or more non-coding RNAs detected in a sample comprise at least about 70%, 75%, 80%, 85%, 90%, 91%, 92%, 93%, 94%, 95%, 96%, 97%, 98%, 99% or 100% sequence identity to SEQ ID NO: 766. In some embodiments, the one or more non-coding RNAs detected in a sample comprise at least about 70%, 75%, 80%, 85%, 90%, 91%, 92%, 93%, 94%, 95%, 96%, 97%, 98%, 99% or 100% sequence identity to SEQ ID NO: 767. In some embodiments, the one or more non-coding RNAs detected in a sample comprise at least about 70%, 75%, 80%, 85%, 90%, 91%, 92%, 93%, 94%, 95%, 96%, 97%, 98%, 99% or 100% sequence identity to SEQ ID NO: 768. In some embodiments, the one or more non-coding RNAs detected in a sample comprise at least about 70%, 75%, 80%, 85%, 90%, 91%, 92%, 93%, 94%, 95%, 96%, 97%, 98%, 99% or 100% sequence identity to SEQ ID NO: 769. In some embodiments, the one or more non-coding RNAs detected in a sample comprise at least about 70%, 75%, 80%, 85%, 90%, 91%, 92%, 93%, 94%, 95%, 96%, 97%, 98%, 99% or 100% sequence identity to SEQ ID NO: 770. In some embodiments, the one or more non-coding RNAs detected in a sample comprise at least about 70%, 75%, 80%, 85%, 90%, 91%, 92%, 93%, 94%, 95%, 96%, 97%, 98%, 99% or 100% sequence identity to SEQ ID NO: 771. In some embodiments, the one or more non-coding RNAs detected in a sample comprise at least about 70%, 75%, 80%, 85%, 90%, 91%, 92%, 93%, 94%, 95%, 96%, 97%, 98%, 99% or 100% sequence identity to SEQ ID NO: 772. In some embodiments, the one or more non-coding RNAs detected in a sample comprise at least about 70%, 75%, 80%, 85%, 90%, 91%, 92%, 93%, 94%, 95%, 96%, 97%, 98%, 99% or 100% sequence identity to SEQ ID NO: 773. In some embodiments, the one or more non-coding RNAs detected in a sample comprise at least about 70%, 75%, 80%, 85%, 90%, 91%, 92%, 93%, 94%, 95%, 96%, 97%, 98%, 99% or 100% sequence identity to SEQ ID NO: 774. In some embodiments, the one or more non-coding RNAs detected in a sample comprise at least about 70%, 75%, 80%, 85%, 90%, 91%, 92%, 93%, 94%, 95%, 96%, 97%, 98%, 99% or 100% sequence identity to SEQ ID NO: 775. In some embodiments, the one or more non-coding RNAs detected in a sample comprise at least about 70%, 75%, 80%, 85%, 90%, 91%, 92%, 93%, 94%, 95%, 96%, 97%, 98%, 99% or 100% sequence identity to SEQ ID NO: 776. In some embodiments, the one or more non-coding RNAs detected in a sample comprise at least about 70%, 75%, 80%, 85%, 90%, 91%, 92%, 93%, 94%, 95%, 96%, 97%, 98%, 99% or 100% sequence identity to SEQ ID NO: 777. In some embodiments, the one or more non-coding RNAs detected in a sample comprise at least about 70%, 75%, 80%, 85%, 90%, 91%, 92%, 93%, 94%, 95%, 96%, 97%, 98%, 99% or 100% sequence identity to SEQ ID NO: 778. In some embodiments, the one or more non-coding RNAs detected in a sample comprise at least about 70%, 75%, 80%, 85%, 90%, 91%, 92%, 93%, 94%, 95%, 96%, 97%, 98%, 99% or 100% sequence identity to SEQ ID NO: 779. In some embodiments, the one or more non-coding RNAs detected in a sample comprise at least about 70%, 75%, 80%, 85%, 90%, 91%, 92%, 93%, 94%, 95%, 96%, 97%, 98%, 99% or 100% sequence identity to SEQ ID NO: 780. In some embodiments, the one or more non-coding RNAs detected in a sample comprise at least about 70%, 75%, 80%, 85%, 90%, 91%, 92%, 93%, 94%, 95%, 96%, 97%, 98%, 99% or 100% sequence identity to SEQ ID NO: 781. In some embodiments, the one or more non-coding RNAs detected in a sample comprise at least about 70%, 75%, 80%, 85%, 90%, 91%, 92%, 93%, 94%, 95%, 96%, 97%, 98%, 99% or 100% sequence identity to SEQ ID NO: 782. In some embodiments, the one or more non-coding RNAs detected in a sample comprise at least about 70%, 75%, 80%, 85%, 90%, 91%, 92%, 93%, 94%, 95%, 96%, 97%, 98%, 99% or 100% sequence identity to SEQ ID NO: 783. In some embodiments, the one or more non-coding RNAs detected in a sample comprise at least about 70%, 75%, 80%, 85%, 90%, 91%, 92%, 93%, 94%, 95%, 96%, 97%, 98%, 99% or 100% sequence identity to SEQ ID NO: 784. In some embodiments, the one or more non-coding RNAs detected in a sample comprise at least about 70%, 75%, 80%, 85%, 90%, 91%, 92%, 93%, 94%, 95%, 96%, 97%, 98%, 99% or 100% sequence identity to SEQ ID NO: 785. In some embodiments, the one or more non-coding RNAs detected in a sample comprise at least about 70%, 75%, 80%, 85%, 90%, 91%, 92%, 93%, 94%, 95%, 96%, 97%, 98%, 99% or 100% sequence identity to SEQ ID NO: 786. In some embodiments, the one or more non-coding RNAs detected in a sample comprise at least about 70%, 75%, 80%, 85%, 90%, 91%, 92%, 93%, 94%, 95%, 96%, 97%, 98%, 99% or 100% sequence identity to SEQ ID NO: 787. In some embodiments, the one or more non-coding RNAs detected in a sample comprise at least about 70%, 75%, 80%, 85%, 90%, 91%, 92%, 93%, 94%, 95%, 96%, 97%, 98%, 99% or 100% sequence identity to SEQ ID NO: 788. In some embodiments, the one or more non-coding RNAs detected in a sample comprise at least about 70%, 75%, 80%, 85%, 90%, 91%, 92%, 93%, 94%, 95%, 96%, 97%, 98%, 99% or 100% sequence identity to SEQ ID NO: 789. In some embodiments, the one or more non-coding RNAs detected in a sample comprise at least about 70%, 75%, 80%, 85%, 90%, 91%, 92%, 93%, 94%, 95%, 96%, 97%, 98%, 99% or 100% sequence identity to SEQ ID NO: 790. In some embodiments, the one or more non-coding RNAs detected in a sample comprise at least about 70%, 75%, 80%, 85%, 90%, 91%, 92%, 93%, 94%, 95%, 96%, 97%, 98%, 99% or 100% sequence identity to SEQ ID NO: 791. In some embodiments, the one or more non-coding RNAs detected in a sample comprise at least about 70%, 75%, 80%, 85%, 90%, 91%, 92%, 93%, 94%, 95%, 96%, 97%, 98%, 99% or 100% sequence identity to SEQ ID NO: 792. In some embodiments, the one or more non-coding RNAs detected in a sample comprise at least about 70%, 75%, 80%, 85%, 90%, 91%, 92%, 93%, 94%, 95%, 96%, 97%, 98%, 99% or 100% sequence identity to SEQ ID NO: 793. In some embodiments, the one or more non-coding RNAs detected in a sample comprise at least about 70%, 75%, 80%, 85%, 90%, 91%, 92%, 93%, 94%, 95%, 96%, 97%, 98%, 99% or 100% sequence identity to SEQ ID NO: 794. In some embodiments, the one or more non-coding RNAs detected in a sample comprise at least about 70%, 75%, 80%, 85%, 90%, 91%, 92%, 93%, 94%, 95%, 96%, 97%, 98%, 99% or 100% sequence identity to SEQ ID NO: 795. In some embodiments, the one or more non-coding RNAs detected in a sample comprise at least about 70%, 75%, 80%, 85%, 90%, 91%, 92%, 93%, 94%, 95%, 96%, 97%, 98%, 99% or 100% sequence identity to SEQ ID NO: 796. In some embodiments, the one or more non-coding RNAs detected in a sample comprise at least about 70%, 75%, 80%, 85%, 90%, 91%, 92%, 93%, 94%, 95%, 96%, 97%, 98%, 99% or 100% sequence identity to SEQ ID NO: 797. In some embodiments, the one or more non-coding RNAs detected in a sample comprise at least about 70%, 75%, 80%, 85%, 90%, 91%, 92%, 93%, 94%, 95%, 96%, 97%, 98%, 99% or 100% sequence identity to SEQ ID NO: 798. In some embodiments, the one or more non-coding RNAs detected in a sample comprise at least about 70%, 75%, 80%, 85%, 90%, 91%, 92%, 93%, 94%, 95%, 96%, 97%, 98%, 99% or 100% sequence identity to SEQ ID NO: 799. In some embodiments, the one or more non-coding RNAs detected in a sample comprise at least about 70%, 75%, 80%, 85%, 90%, 91%, 92%, 93%, 94%, 95%, 96%, 97%, 98%, 99% or 100% sequence identity to SEQ ID NO: 800. In some embodiments, the one or more non-coding RNAs detected in a sample comprise at least about 70%, 75%, 80%, 85%, 90%, 91%, 92%, 93%, 94%, 95%, 96%, 97%, 98%, 99% or 100% sequence identity to SEQ ID NO: 801. In some embodiments, the one or more non-coding RNAs detected in a sample comprise at least about 70%, 75%, 80%, 85%, 90%, 91%, 92%, 93%, 94%, 95%, 96%, 97%, 98%, 99% or 100% sequence identity to SEQ ID NO: 802. In some embodiments, the one or more non-coding RNAs detected in a sample comprise at least about 70%, 75%, 80%, 85%, 90%, 91%, 92%, 93%, 94%, 95%, 96%, 97%, 98%, 99% or 100% sequence identity to SEQ ID NO: 803. In some embodiments, the one or more non-coding RNAs detected in a sample comprise at least about 70%, 75%, 80%, 85%, 90%, 91%, 92%, 93%, 94%, 95%, 96%, 97%, 98%, 99% or 100% sequence identity to SEQ ID NO: 804. In some embodiments, the one or more non-coding RNAs detected in a sample comprise at least about 70%, 75%, 80%, 85%, 90%, 91%, 92%, 93%, 94%, 95%, 96%, 97%, 98%, 99% or 100% sequence identity to SEQ ID NO: 805. In some embodiments, the one or more non-coding RNAs detected in a sample comprise at least about 70%, 75%, 80%, 85%, 90%, 91%, 92%, 93%, 94%, 95%, 96%, 97%, 98%, 99% or 100% sequence identity to SEQ ID NO: 806. In some embodiments, the one or more non-coding RNAs detected in a sample comprise at least about 70%, 75%, 80%, 85%, 90%, 91%, 92%, 93%, 94%, 95%, 96%, 97%, 98%, 99% or 100% sequence identity to SEQ ID NO: 807. In some embodiments, the one or more non-coding RNAs detected in a sample comprise at least about 70%, 75%, 80%, 85%, 90%, 91%, 92%, 93%, 94%, 95%, 96%, 97%, 98%, 99% or 100% sequence identity to SEQ ID NO: 808. In some embodiments, the one or more non-coding RNAs detected in a sample comprise at least about 70%, 75%, 80%, 85%, 90%, 91%, 92%, 93%, 94%, 95%, 96%, 97%, 98%, 99% or 100% sequence identity to SEQ ID NO: 809. In some embodiments, the one or more non-coding RNAs detected in a sample comprise at least about 70%, 75%, 80%, 85%, 90%, 91%, 92%, 93%, 94%, 95%, 96%, 97%, 98%, 99% or 100% sequence identity to SEQ ID NO: 810. In some embodiments, the one or more non-coding RNAs detected in a sample comprise at least about 70%, 75%, 80%, 85%, 90%, 91%, 92%, 93%, 94%, 95%, 96%, 97%, 98%, 99% or 100% sequence identity to SEQ ID NO: 811. In some embodiments, the one or more non-coding RNAs detected in a sample comprise at least about 70%, 75%, 80%, 85%, 90%, 91%, 92%, 93%, 94%, 95%, 96%, 97%, 98%, 99% or 100% sequence identity to SEQ ID NO: 812. In some embodiments, the one or more non-coding RNAs detected in a sample comprise at least about 70%, 75%, 80%, 85%, 90%, 91%, 92%, 93%, 94%, 95%, 96%, 97%, 98%, 99% or 100% sequence identity to SEQ ID NO: 813. In some embodiments, the one or more non-coding RNAs detected in a sample comprise at least about 70%, 75%, 80%, 85%, 90%, 91%, 92%, 93%, 94%, 95%, 96%, 97%, 98%, 99% or 100% sequence identity to SEQ ID NO: 814. In some embodiments, the one or more non-coding RNAs detected in a sample comprise at least about 70%, 75%, 80%, 85%, 90%, 91%, 92%, 93%, 94%, 95%, 96%, 97%, 98%, 99% or 100% sequence identity to SEQ ID NO: 815. In some embodiments, the one or more non-coding RNAs detected in a sample comprise at least about 70%, 75%, 80%, 85%, 90%, 91%, 92%, 93%, 94%, 95%, 96%, 97%, 98%, 99% or 100% sequence identity to SEQ ID NO: 816. In some embodiments, the one or more non-coding RNAs detected in a sample comprise at least about 70%, 75%, 80%, 85%, 90%, 91%, 92%, 93%, 94%, 95%, 96%, 97%, 98%, 99% or 100% sequence identity to SEQ ID NO: 817. In some embodiments, the one or more non-coding RNAs detected in a sample comprise at least about 70%, 75%, 80%, 85%, 90%, 91%, 92%, 93%, 94%, 95%, 96%, 97%, 98%, 99% or 100% sequence identity to SEQ ID NO: 818. In some embodiments, the one or more non-coding RNAs detected in a sample comprise at least about 70%, 75%, 80%, 85%, 90%, 91%, 92%, 93%, 94%, 95%, 96%, 97%, 98%, 99% or 100% sequence identity to SEQ ID NO: 819. In some embodiments, the one or more non-coding RNAs detected in a sample comprise at least about 70%, 75%, 80%, 85%, 90%, 91%, 92%, 93%, 94%, 95%, 96%, 97%, 98%, 99% or 100% sequence identity to SEQ ID NO: 820. In some embodiments, the one or more non-coding RNAs detected in a sample comprise at least about 70%, 75%, 80%, 85%, 90%, 91%, 92%, 93%, 94%, 95%, 96%, 97%, 98%, 99% or 100% sequence identity to SEQ ID NO: 821. In some embodiments, the one or more non-coding RNAs detected in a sample comprise at least about 70%, 75%, 80%, 85%, 90%, 91%, 92%, 93%, 94%, 95%, 96%, 97%, 98%, 99% or 100% sequence identity to SEQ ID NO: 822. In some embodiments, the one or more non-coding RNAs detected in a sample comprise at least about 70%, 75%, 80%, 85%, 90%, 91%, 92%, 93%, 94%, 95%, 96%, 97%, 98%, 99% or 100% sequence identity to SEQ ID NO: 823. In some embodiments, the one or more non-coding RNAs detected in a sample comprise at least about 70%, 75%, 80%, 85%, 90%, 91%, 92%, 93%, 94%, 95%, 96%, 97%, 98%, 99% or 100% sequence identity to SEQ ID NO: 824. In some embodiments, the one or more non-coding RNAs detected in a sample comprise at least about 70%, 75%, 80%, 85%, 90%, 91%, 92%, 93%, 94%, 95%, 96%, 97%, 98%, 99% or 100% sequence identity to SEQ ID NO: 825. In some embodiments, the one or more non-coding RNAs detected in a sample comprise at least about 70%, 75%, 80%, 85%, 90%, 91%, 92%, 93%, 94%, 95%, 96%, 97%, 98%, 99% or 100% sequence identity to SEQ ID NO: 826. In some embodiments, the one or more non-coding RNAs detected in a sample comprise at least about 70%, 75%, 80%, 85%, 90%, 91%, 92%, 93%, 94%, 95%, 96%, 97%, 98%, 99% or 100% sequence identity to SEQ ID NO: 827. In some embodiments, the one or more non-coding RNAs detected in a sample comprise at least 70%, 75%, 80%, 85%, 90%, 91%, 92%, 93%, 94%, 95%, 96%, 97%, 98%, 99% or 100% sequence identity to SEQ ID NO: 828. In some embodiments, the one or more non-coding RNAs detected in a sample comprise at least about 70%, 75%, 80%, 85%, 90%, 91%, 92%, 93%, 94%, 95%, 96%, 97%, 98%, 99% or 100% sequence identity to SEQ ID NO: 829. In some embodiments, the one or more non-coding RNAs detected in a sample comprise at least about 70%, 75%, 80%, 85%, 90%, 91%, 92%, 93%, 94%, 95%, 96%, 97%, 98%, 99% or 100% sequence identity to SEQ ID NO: 830. In some embodiments, the one or more non-coding RNAs detected in a sample comprise at least about 70%, 75%, 80%, 85%, 90%, 91%, 92%, 93%, 94%, 95%, 96%, 97%, 98%, 99% or 100% sequence identity to SEQ ID NO: 831. In some embodiments, the one or more non-coding RNAs detected in a sample comprise at least about 70%, 75%, 80%, 85%, 90%, 91%, 92%, 93%, 94%, 95%, 96%, 97%, 98%, 99% or 100% sequence identity to SEQ ID NO: 832. In some embodiments, the one or more non-coding RNAs detected in a sample comprise at least about 70%, 75%, 80%, 85%, 90%, 91%, 92%, 93%, 94%, 95%, 96%, 97%, 98%, 99% or 100% sequence identity to SEQ ID NO: 833. In some embodiments, the one or more non-coding RNAs detected in a sample comprise at least about 70%, 75%, 80%, 85%, 90%, 91%, 92%, 93%, 94%, 95%, 96%, 97%, 98%, 99% or 100% sequence identity to SEQ ID NO: 834. In some embodiments, the one or more non-coding RNAs detected in a sample comprise at least about 70%, 75%, 80%, 85%, 90%, 91%, 92%, 93%, 94%, 95%, 96%, 97%, 98%, 99% or 100% sequence identity to SEQ ID NO: 835. In some embodiments, the one or more non-coding RNAs detected in a sample comprise at least about 70%, 75%, 80%, 85%, 90%, 91%, 92%, 93%, 94%, 95%, 96%, 97%, 98%, 99% or 100% sequence identity to SEQ ID NO: 836. In some embodiments, the one or more non-coding RNAs detected in a sample comprise at least about 70%, 75%, 80%, 85%, 90%, 91%, 92%, 93%, 94%, 95%, 96%, 97%, 98%, 99% or 100% sequence identity to SEQ ID NO: 837. In some embodiments, the one or more non-coding RNAs detected in a sample comprise at least about 70%, 75%, 80%, 85%, 90%, 91%, 92%, 93%, 94%, 95%, 96%, 97%, 98%, 99% or 100% sequence identity to SEQ ID NO: 838. In some embodiments, the one or more non-coding RNAs detected in a sample comprise at least about 70%, 75%, 80%, 85%, 90%, 91%, 92%, 93%, 94%, 95%, 96%, 97%, 98%, 99% or 100% sequence identity to SEQ ID NO: 839. In some embodiments, the one or more non-coding RNAs detected in a sample comprise at least about 70%, 75%, 80%, 85%, 90%, 91%, 92%, 93%, 94%, 95%, 96%, 97%, 98%, 99% or 100% sequence identity to SEQ ID NO: 840. In some embodiments, the one or more non-coding RNAs detected in a sample comprise at least about 70%, 75%, 80%, 85%, 90%, 91%, 92%, 93%, 94%, 95%, 96%, 97%, 98%, 99% or 100% sequence identity to SEQ ID NO: 841. In some embodiments, the one or more non-coding RNAs detected in a sample comprise at least about 70%, 75%, 80%, 85%, 90%, 91%, 92%, 93%, 94%, 95%, 96%, 97%, 98%, 99% or 100% sequence identity to SEQ ID NO: 842. In some embodiments, the one or more non-coding RNAs detected in a sample comprise at least about 70%, 75%, 80%, 85%, 90%, 91%, 92%, 93%, 94%, 95%, 96%, 97%, 98%, 99% or 100% sequence identity to SEQ ID NO: 843. In some embodiments, the one or more non-coding RNAs detected in a sample comprise at least about 70%, 75%, 80%, 85%, 90%, 91%, 92%, 93%, 94%, 95%, 96%, 97%, 98%, 99% or 100% sequence identity to SEQ ID NO: 844. In some embodiments, the one or more non-coding RNAs detected in a sample comprise at least about 70%, 75%, 80%, 85%, 90%, 91%, 92%, 93%, 94%, 95%, 96%, 97%, 98%, 99% or 100% sequence identity to SEQ ID NO: 845. In some embodiments, the one or more non-coding RNAs detected in a sample comprise at least about 70%, 75%, 80%, 85%, 90%, 91%, 92%, 93%, 94%, 95%, 96%, 97%, 98%, 99% or 100% sequence identity to SEQ ID NO: 846. In some embodiments, the one or more non-coding RNAs detected in a sample comprise at least about 70%, 75%, 80%, 85%, 90%, 91%, 92%, 93%, 94%, 95%, 96%, 97%, 98%, 99% or 100% sequence identity to SEQ ID NO: 847. In some embodiments, the one or more non-coding RNAs detected in a sample comprise at least about 70%, 75%, 80%, 85%, 90%, 91%, 92%, 93%, 94%, 95%, 96%, 97%, 98%, 99% or 100% sequence identity to SEQ ID NO: 848. In some embodiments, the one or more non-coding RNAs detected in a sample comprise at least about 70%, 75%, 80%, 85%, 90%, 91%, 92%, 93%, 94%, 95%, 96%, 97%, 98%, 99% or 100% sequence identity to SEQ ID NO: 849. In some embodiments, the one or more non-coding RNAs detected in a sample comprise at least about 70%, 75%, 80%, 85%, 90%, 91%, 92%, 93%, 94%, 95%, 96%, 97%, 98%, 99% or 100% sequence identity to SEQ ID NO: 850. In some embodiments, the one or more non-coding RNAs detected in a sample comprise at least about 70%, 75%, 80%, 85%, 90%, 91%, 92%, 93%, 94%, 95%, 96%, 97%, 98%, 99% or 100% sequence identity to SEQ ID NO: 851. In some embodiments, the one or more non-coding RNAs detected in a sample comprise at least about 70%, 75%, 80%, 85%, 90%, 91%, 92%, 93%, 94%, 95%, 96%, 97%, 98%, 99% or 100% sequence identity to SEQ ID NO: 852. In some embodiments, the one or more non-coding RNAs detected in a sample comprise at least about 70%, 75%, 80%, 85%, 90%, 91%, 92%, 93%, 94%, 95%, 96%, 97%, 98%, 99% or 100% sequence identity to SEQ ID NO: 853. In some embodiments, the one or more non-coding RNAs detected in a sample comprise at least about 70%, 75%, 80%, 85%, 90%, 91%, 92%, 93%, 94%, 95%, 96%, 97%, 98%, 99% or 100% sequence identity to SEQ ID NO: 854. In some embodiments, the one or more non-coding RNAs detected in a sample comprise at least about 70%, 75%, 80%, 85%, 90%, 91%, 92%, 93%, 94%, 95%, 96%, 97%, 98%, 99% or 100% sequence identity to SEQ ID NO: 855. In some embodiments, the one or more non-coding RNAs detected in a sample comprise at least about 70%, 75%, 80%, 85%, 90%, 91%, 92%, 93%, 94%, 95%, 96%, 97%, 98%, 99% or 100% sequence identity to SEQ ID NO: 856. In some embodiments, the one or more non-coding RNAs detected in a sample comprise at least about 70%, 75%, 80%, 85%, 90%, 91%, 92%, 93%, 94%, 95%, 96%, 97%, 98%, 99% or 100% sequence identity to SEQ ID NO: 857. In some embodiments, the one or more non-coding RNAs detected in a sample comprise at least about 70%, 75%, 80%, 85%, 90%, 91%, 92%, 93%, 94%, 95%, 96%, 97%, 98%, 99% or 100% sequence identity to SEQ ID NO: 858. In some embodiments, the one or more non-coding RNAs detected in a sample comprise at least about 70%, 75%, 80%, 85%, 90%, 91%, 92%, 93%, 94%, 95%, 96%, 97%, 98%, 99% or 100% sequence identity to SEQ ID NO: 859. In some embodiments, the one or more non-coding RNAs detected in a sample comprise at least about 70%, 75%, 80%, 85%, 90%, 91%, 92%, 93%, 94%, 95%, 96%, 97%, 98%, 99% or 100% sequence identity to SEQ ID NO: 860. In some embodiments, the one or more non-coding RNAs detected in a sample comprise at least about 70%, 75%, 80%, 85%, 90%, 91%, 92%, 93%, 94%, 95%, 96%, 97%, 98%, 99% or 100% sequence identity to SEQ ID NO: 861. In some embodiments, the one or more non-coding RNAs detected in a sample comprise at least about 70%, 75%, 80%, 85%, 90%, 91%, 92%, 93%, 94%, 95%, 96%, 97%, 98%, 99% or 100% sequence identity to SEQ ID NO: 862. In some embodiments, the one or more non-coding RNAs detected in a sample comprise at least about 70%, 75%, 80%, 85%, 90%, 91%, 92%, 93%, 94%, 95%, 96%, 97%, 98%, 99% or 100% sequence identity to SEQ ID NO: 863. In some embodiments, the one or more non-coding RNAs detected in a sample comprise at least about 70%, 75%, 80%, 85%, 90%, 91%, 92%, 93%, 94%, 95%, 96%, 97%, 98%, 99% or 100% sequence identity to SEQ ID NO: 864. In some embodiments, the one or more non-coding RNAs detected in a sample comprise at least about 70%, 75%, 80%, 85%, 90%, 91%, 92%, 93%, 94%, 95%, 96%, 97%, 98%, 99% or 100% sequence identity to SEQ ID NO: 865. In some embodiments, the one or more non-coding RNAs detected in a sample comprise at least about 70%, 75%, 80%, 85%, 90%, 91%, 92%, 93%, 94%, 95%, 96%, 97%, 98%, 99% or 100% sequence identity to SEQ ID NO: 866. In some embodiments, the one or more non-coding RNAs detected in a sample comprise at least about 70%, 75%, 80%, 85%, 90%, 91%, 92%, 93%, 94%, 95%, 96%, 97%, 98%, 99% or 100% sequence identity to SEQ ID NO: 867. In some embodiments, the one or more non-coding RNAs detected in a sample comprise at least about 70%, 75%, 80%, 85%, 90%, 91%, 92%, 93%, 94%, 95%, 96%, 97%, 98%, 99% or 100% sequence identity to SEQ ID NO: 868. In some embodiments, the one or more non-coding RNAs detected in a sample comprise at least about 70%, 75%, 80%, 85%, 90%, 91%, 92%, 93%, 94%, 95%, 96%, 97%, 98%, 99% or 100% sequence identity to SEQ ID NO: 869. In some embodiments, the one or more non-coding RNAs detected in a sample comprise at least about 70%, 75%, 80%, 85%, 90%, 91%, 92%, 93%, 94%, 95%, 96%, 97%, 98%, 99% or 100% sequence identity to SEQ ID NO: 870. In some embodiments, the one or more non-coding RNAs detected in a sample comprise at least about 70%, 75%, 80%, 85%, 90%, 91%, 92%, 93%, 94%, 95%, 96%, 97%, 98%, 99% or 100% sequence identity to SEQ ID NO: 871. In some embodiments, the one or more non-coding RNAs detected in a sample comprise at least about 70%, 75%, 80%, 85%, 90%, 91%, 92%, 93%, 94%, 95%, 96%, 97%, 98%, 99% or 100% sequence identity to SEQ ID NO: 872. In some embodiments, the one or more non-coding RNAs detected in a sample comprise at least about 70%, 75%, 80%, 85%, 90%, 91%, 92%, 93%, 94%, 95%, 96%, 97%, 98%, 99% or 100% sequence identity to SEQ ID NO: 873. In some embodiments, the one or more non-coding RNAs detected in a sample comprise at least about 70%, 75%, 80%, 85%, 90%, 91%, 92%, 93%, 94%, 95%, 96%, 97%, 98%, 99% or 100% sequence identity to SEQ ID NO: 874. In some embodiments, the one or more non-coding RNAs detected in a sample comprise at least about 70%, 75%, 80%, 85%, 90%, 91%, 92%, 93%, 94%, 95%, 96%, 97%, 98%, 99% or 100% sequence identity to SEQ ID NO: 875. In some embodiments, the one or more non-coding RNAs detected in a sample comprise at least about 70%, 75%, 80%, 85%, 90%, 91%, 92%, 93%, 94%, 95%, 96%, 97%, 98%, 99% or 100% sequence identity to SEQ ID NO: 876. In some embodiments, the one or more non-coding RNAs detected in a sample comprise at least about 70%, 75%, 80%, 85%, 90%, 91%, 92%, 93%, 94%, 95%, 96%, 97%, 98%, 99% or 100% sequence identity to SEQ ID NO: 877. In some embodiments, the one or more non-coding RNAs detected in a sample comprise at least about 70%, 75%, 80%, 85%, 90%, 91%, 92%, 93%, 94%, 95%, 96%, 97%, 98%, 99% or 100% sequence identity to SEQ ID NO: 878. In some embodiments, the one or more non-coding RNAs detected in a sample comprise at least about 70%, 75%, 80%, 85%, 90%, 91%, 92%, 93%, 94%, 95%, 96%, 97%, 98%, 99% or 100% sequence identity to SEQ ID NO: 879. In some embodiments, the one or more non-coding RNAs detected in a sample comprise at least about 70%, 75%, 80%, 85%, 90%, 91%, 92%, 93%, 94%, 95%, 96%, 97%, 98%, 99% or 100% sequence identity to SEQ ID NO: 880. In some embodiments, the one or more non-coding RNAs detected in a sample comprise at least about 70%, 75%, 80%, 85%, 90%, 91%, 92%, 93%, 94%, 95%, 96%, 97%, 98%, 99% or 100% sequence identity to SEQ ID NO: 881. In some embodiments, the one or more non-coding RNAs detected in a sample comprise at least about 70%, 75%, 80%, 85%, 90%, 91%, 92%, 93%, 94%, 95%, 96%, 97%, 98%, 99% or 100% sequence identity to SEQ ID NO: 882. In some embodiments, the one or more non-coding RNAs detected in a sample comprise at least about 70%, 75%, 80%, 85%, 90%, 91%, 92%, 93%, 94%, 95%, 96%, 97%, 98%, 99% or 100% sequence identity to SEQ ID NO: 883. In some embodiments, the one or more non-coding RNAs detected in a sample comprise at least about 70%, 75%, 80%, 85%, 90%, 91%, 92%, 93%, 94%, 95%, 96%, 97%, 98%, 99% or 100% sequence identity to SEQ ID NO: 884. In some embodiments, the one or more non-coding RNAs detected in a sample comprise at least about 70%, 75%, 80%, 85%, 90%, 91%, 92%, 93%, 94%, 95%, 96%, 97%, 98%, 99% or 100% sequence identity to SEQ ID NO: 885. In some embodiments, the one or more non-coding RNAs detected in a sample comprise at least about 70%, 75%, 80%, 85%, 90%, 91%, 92%, 93%, 94%, 95%, 96%, 97%, 98%, 99% or 100% sequence identity to SEQ ID NO: 886. In some embodiments, the one or more non-coding RNAs detected in a sample comprise at least about 70%, 75%, 80%, 85%, 90%, 91%, 92%, 93%, 94%, 95%, 96%, 97%, 98%, 99% or 100% sequence identity to SEQ ID NO: 887. In some embodiments, the one or more non-coding RNAs detected in a sample comprise at least about 70%, 75%, 80%, 85%, 90%, 91%, 92%, 93%, 94%, 95%, 96%, 97%, 98%, 99% or 100% sequence identity to SEQ ID NO: 888. In some embodiments, the one or more non-coding RNAs detected in a sample comprise at least about 70%, 75%, 80%, 85%, 90%, 91%, 92%, 93%, 94%, 95%, 96%, 97%, 98%, 99% or 100% sequence identity to SEQ ID NO: 889. In some embodiments, the one or more non-coding RNAs detected in a sample comprise at least about 70%, 75%, 80%, 85%, 90%, 91%, 92%, 93%, 94%, 95%, 96%, 97%, 98%, 99% or 100% sequence identity to SEQ ID NO: 890. In some embodiments, the one or more non-coding RNAs detected in a sample comprise at least about 70%, 75%, 80%, 85%, 90%, 91%, 92%, 93%, 94%, 95%, 96%, 97%, 98%, 99% or 100% sequence identity to SEQ ID NO: 891. In some embodiments, the one or more non-coding RNAs detected in a sample comprise at least about 70%, 75%, 80%, 85%, 90%, 91%, 92%, 93%, 94%, 95%, 96%, 97%, 98%, 99% or 100% sequence identity to SEQ ID NO: 892. In some embodiments, the one or more non-coding RNAs detected in a sample comprise at least about 70%, 75%, 80%, 85%, 90%, 91%, 92%, 93%, 94%, 95%, 96%, 97%, 98%, 99% or 100% sequence identity to SEQ ID NO: 893. In some embodiments, the one or more non-coding RNAs detected in a sample comprise at least about 70%, 75%, 80%, 85%, 90%, 91%, 92%, 93%, 94%, 95%, 96%, 97%, 98%, 99% or 100% sequence identity to SEQ ID NO: 894. In some embodiments, the one or more non-coding RNAs detected in a sample comprise at least about 70%, 75%, 80%, 85%, 90%, 91%, 92%, 93%, 94%, 95%, 96%, 97%, 98%, 99% or 100% sequence identity to SEQ ID NO: 895. In some embodiments, the one or more non-coding RNAs detected in a sample comprise at least about 70%, 75%, 80%, 85%, 90%, 91%, 92%, 93%, 94%, 95%, 96%, 97%, 98%, 99% or 100% sequence identity to SEQ ID NO: 896. In some embodiments, the one or more non-coding RNAs detected in a sample comprise at least about 70%, 75%, 80%, 85%, 90%, 91%, 92%, 93%, 94%, 95%, 96%, 97%, 98%, 99% or 100% sequence identity to SEQ ID NO: 897. In some embodiments, the one or more non-coding RNAs detected in a sample comprise at least about 70%, 75%, 80%, 85%, 90%, 91%, 92%, 93%, 94%, 95%, 96%, 97%, 98%, 99% or 100% sequence identity to SEQ ID NO: 898. In some embodiments, the one or more non-coding RNAs detected in a sample comprise at least about 70%, 75%, 80%, 85%, 90%, 91%, 92%, 93%, 94%, 95%, 96%, 97%, 98%, 99% or 100% sequence identity to SEQ ID NO: 899. In some embodiments, the one or more non-coding RNAs detected in a sample comprise at least about 70%, 75%, 80%, 85%, 90%, 91%, 92%, 93%, 94%, 95%, 96%, 97%, 98%, 99% or 100% sequence identity to SEQ ID NO: 900. In some embodiments, the one or more non-coding RNAs detected in a sample comprise at least about 70%, 75%, 80%, 85%, 90%, 91%, 92%, 93%, 94%, 95%, 96%, 97%, 98%, 99% or 100% sequence identity to SEQ ID NO: 901. In some embodiments, the one or more non-coding RNAs detected in a sample comprise at least about 70%, 75%, 80%, 85%, 90%, 91%, 92%, 93%, 94%, 95%, 96%, 97%, 98%, 99% or 100% sequence identity to SEQ ID NO: 902. In some embodiments, the one or more non-coding RNAs detected in a sample comprise at least about 70%, 75%, 80%, 85%, 90%, 91%, 92%, 93%, 94%, 95%, 96%, 97%, 98%, 99% or 100% sequence identity to SEQ ID NO: 903. In some embodiments, the one or more non-coding RNAs detected in a sample comprise at least about 70%, 75%, 80%, 85%, 90%, 91%, 92%, 93%, 94%, 95%, 96%, 97%, 98%, 99% or 100% sequence identity to SEQ ID NO: 904. In some embodiments, the one or more non-coding RNAs detected in a sample comprise at least about 70%, 75%, 80%, 85%, 90%, 91%, 92%, 93%, 94%, 95%, 96%, 97%, 98%, 99% or 100% sequence identity to SEQ ID NO: 905. In some embodiments, the one or more non-coding RNAs detected in a sample comprise at least about 70%, 75%, 80%, 85%, 90%, 91%, 92%, 93%, 94%, 95%, 96%, 97%, 98%, 99% or 100% sequence identity to SEQ ID NO: 906. In some embodiments, the one or more non-coding RNAs detected in a sample comprise at least about 70%, 75%, 80%, 85%, 90%, 91%, 92%, 93%, 94%, 95%, 96%, 97%, 98%, 99% or 100% sequence identity to SEQ ID NO: 907. In some embodiments, the one or more non-coding RNAs detected in a sample comprise at least about 70%, 75%, 80%, 85%, 90%, 91%, 92%, 93%, 94%, 95%, 96%, 97%, 98%, 99% or 100% sequence identity to SEQ ID NO: 908. In some embodiments, the one or more non-coding RNAs detected in a sample comprise at least about 70%, 75%, 80%, 85%, 90%, 91%, 92%, 93%, 94%, 95%, 96%, 97%, 98%, 99% or 100% sequence identity to SEQ ID NO: 909. In some embodiments, the one or more non-coding RNAs detected in a sample comprise at least about 70%, 75%, 80%, 85%, 90%, 91%, 92%, 93%, 94%, 95%, 96%, 97%, 98%, 99% or 100% sequence identity to SEQ ID NO: 910. In some embodiments, the one or more non-coding RNAs detected in a sample comprise at least about 70%, 75%, 80%, 85%, 90%, 91%, 92%, 93%, 94%, 95%, 96%, 97%, 98%, 99% or 100% sequence identity to SEQ ID NO: 911. In some embodiments, the one or more non-coding RNAs detected in a sample comprise at least about 70%, 75%, 80%, 85%, 90%, 91%, 92%, 93%, 94%, 95%, 96%, 97%, 98%, 99% or 100% sequence identity to SEQ ID NO: 912. In some embodiments, the one or more non-coding RNAs detected in a sample comprise at least about 70%, 75%, 80%, 85%, 90%, 91%, 92%, 93%, 94%, 95%, 96%, 97%, 98%, 99% or 100% sequence identity to SEQ ID NO: 913. In some embodiments, the one or more non-coding RNAs detected in a sample comprise at least about 70%, 75%, 80%, 85%, 90%, 91%, 92%, 93%, 94%, 95%, 96%, 97%, 98%, 99% or 100% sequence identity to SEQ ID NO: 914. In some embodiments, the one or more non-coding RNAs detected in a sample comprise at least about 70%, 75%, 80%, 85%, 90%, 91%, 92%, 93%, 94%, 95%, 96%, 97%, 98%, 99% or 100% sequence identity to SEQ ID NO: 915. In some embodiments, the one or more non-coding RNAs detected in a sample comprise at least about 70%, 75%, 80%, 85%, 90%, 91%, 92%, 93%, 94%, 95%, 96%, 97%, 98%, 99% or 100% sequence identity to SEQ ID NO: 916. In some embodiments, the one or more non-coding RNAs detected in a sample comprise at least about 70%, 75%, 80%, 85%, 90%, 91%, 92%, 93%, 94%, 95%, 96%, 97%, 98%, 99% or 100% sequence identity to SEQ ID NO: 917. In some embodiments, the one or more non-coding RNAs detected in a sample comprise at least about 70%, 75%, 80%, 85%, 90%, 91%, 92%, 93%, 94%, 95%, 96%, 97%, 98%, 99% or 100% sequence identity to SEQ ID NO: 918. In some embodiments, the one or more non-coding RNAs detected in a sample comprise at least about 70%, 75%, 80%, 85%, 90%, 91%, 92%, 93%, 94%, 95%, 96%, 97%, 98%, 99% or 100% sequence identity to SEQ ID NO: 919. In some embodiments, the one or more non-coding RNAs detected in a sample comprise at least about 70%, 75%, 80%, 85%, 90%, 91%, 92%, 93%, 94%, 95%, 96%, 97%, 98%, 99% or 100% sequence identity to SEQ ID NO: 920. In some embodiments, the one or more non-coding RNAs detected in a sample comprise at least about 70%, 75%, 80%, 85%, 90%, 91%, 92%, 93%, 94%, 95%, 96%, 97%, 98%, 99% or 100% sequence identity to SEQ ID NO: 921. In some embodiments, the one or more non-coding RNAs detected in a sample comprise at least about 70%, 75%, 80%, 85%, 90%, 91%, 92%, 93%, 94%, 95%, 96%, 97%, 98%, 99% or 100% sequence identity to SEQ ID NO: 922. In some embodiments, the one or more non-coding RNAs detected in a sample comprise at least about 70%, 75%, 80%, 85%, 90%, 91%, 92%, 93%, 94%, 95%, 96%, 97%, 98%, 99% or 100% sequence identity to SEQ ID NO: 923. In some embodiments, the one or more non-coding RNAs detected in a sample comprise at least about 70%, 75%, 80%, 85%, 90%, 91%, 92%, 93%, 94%, 95%, 96%, 97%, 98%, 99% or 100% sequence identity to SEQ ID NO: 924. In some embodiments, the one or more non-coding RNAs detected in a sample comprise at least about 70%, 75%, 80%, 85%, 90%, 91%, 92%, 93%, 94%, 95%, 96%, 97%, 98%, 99% or 100% sequence identity to SEQ ID NO: 925. In some embodiments, the one or more non-coding RNAs detected in a sample comprise at least about 70%, 75%, 80%, 85%, 90%, 91%, 92%, 93%, 94%, 95%, 96%, 97%, 98%, 99% or 100% sequence identity to SEQ ID NO: 926. In some embodiments, the one or more non-coding RNAs detected in a sample comprise at least about 70%, 75%, 80%, 85%, 90%, 91%, 92%, 93%, 94%, 95%, 96%, 97%, 98%, 99% or 100% sequence identity to SEQ ID NO: 927. In some embodiments, the one or more non-coding RNAs detected in a sample comprise at least 70%, 75%, 80%, 85%, 90%, 91%, 92%, 93%, 94%, 95%, 96%, 97%, 98%, 99% or 100% sequence identity to SEQ ID NO: 928. In some embodiments, the one or more non-coding RNAs detected in a sample comprise at least about 70%, 75%, 80%, 85%, 90%, 91%, 92%, 93%, 94%, 95%, 96%, 97%, 98%, 99% or 100% sequence identity to SEQ ID NO: 929. In some embodiments, the one or more non-coding RNAs detected in a sample comprise at least about 70%, 75%, 80%, 85%, 90%, 91%, 92%, 93%, 94%, 95%, 96%, 97%, 98%, 99% or 100% sequence identity to SEQ ID NO: 930. In some embodiments, the one or more non-coding RNAs detected in a sample comprise at least about 70%, 75%, 80%, 85%, 90%, 91%, 92%, 93%, 94%, 95%, 96%, 97%, 98%, 99% or 100% sequence identity to SEQ ID NO: 931. In some embodiments, the one or more non-coding RNAs detected in a sample comprise at least about 70%, 75%, 80%, 85%, 90%, 91%, 92%, 93%, 94%, 95%, 96%, 97%, 98%, 99% or 100% sequence identity to SEQ ID NO: 932. In some embodiments, the one or more non-coding RNAs detected in a sample comprise at least about 70%, 75%, 80%, 85%, 90%, 91%, 92%, 93%, 94%, 95%, 96%, 97%, 98%, 99% or 100% sequence identity to SEQ ID NO: 933. In some embodiments, the one or more non-coding RNAs detected in a sample comprise at least about 70%, 75%, 80%, 85%, 90%, 91%, 92%, 93%, 94%, 95%, 96%, 97%, 98%, 99% or 100% sequence identity to SEQ ID NO: 934. In some embodiments, the one or more non-coding RNAs detected in a sample comprise at least about 70%, 75%, 80%, 85%, 90%, 91%, 92%, 93%, 94%, 95%, 96%, 97%, 98%, 99% or 100% sequence identity to SEQ ID NO: 935. In some embodiments, the one or more non-coding RNAs detected in a sample comprise at least about 70%, 75%, 80%, 85%, 90%, 91%, 92%, 93%, 94%, 95%, 96%, 97%, 98%, 99% or 100% sequence identity to SEQ ID NO: 936. In some embodiments, the one or more non-coding RNAs detected in a sample comprise at least about 70%, 75%, 80%, 85%, 90%, 91%, 92%, 93%, 94%, 95%, 96%, 97%, 98%, 99% or 100% sequence identity to SEQ ID NO: 937. In some embodiments, the one or more non-coding RNAs detected in a sample comprise at least about 70%, 75%, 80%, 85%, 90%, 91%, 92%, 93%, 94%, 95%, 96%, 97%, 98%, 99% or 100% sequence identity to SEQ ID NO: 938. In some embodiments, the one or more non-coding RNAs detected in a sample comprise at least about 70%, 75%, 80%, 85%, 90%, 91%, 92%, 93%, 94%, 95%, 96%, 97%, 98%, 99% or 100% sequence identity to SEQ ID NO: 939. In some embodiments, the one or more non-coding RNAs detected in a sample comprise at least about 70%, 75%, 80%, 85%, 90%, 91%, 92%, 93%, 94%, 95%, 96%, 97%, 98%, 99% or 100% sequence identity to SEQ ID NO: 940. In some embodiments, the one or more non-coding RNAs detected in a sample comprise at least about 70%, 75%, 80%, 85%, 90%, 91%, 92%, 93%, 94%, 95%, 96%, 97%, 98%, 99% or 100% sequence identity to SEQ ID NO: 941. In some embodiments, the one or more non-coding RNAs detected in a sample comprise at least about 70%, 75%, 80%, 85%, 90%, 91%, 92%, 93%, 94%, 95%, 96%, 97%, 98%, 99% or 100% sequence identity to SEQ ID NO: 942. In some embodiments, the one or more non-coding RNAs detected in a sample comprise at least about 70%, 75%, 80%, 85%, 90%, 91%, 92%, 93%, 94%, 95%, 96%, 97%, 98%, 99% or 100% sequence identity to SEQ ID NO: 943. In some embodiments, the one or more non-coding RNAs detected in a sample comprise at least about 70%, 75%, 80%, 85%, 90%, 91%, 92%, 93%, 94%, 95%, 96%, 97%, 98%, 99% or 100% sequence identity to SEQ ID NO: 944. In some embodiments, the one or more non-coding RNAs detected in a sample comprise at least about 70%, 75%, 80%, 85%, 90%, 91%, 92%, 93%, 94%, 95%, 96%, 97%, 98%, 99% or 100% sequence identity to SEQ ID NO: 945. In some embodiments, the one or more non-coding RNAs detected in a sample comprise at least about 70%, 75%, 80%, 85%, 90%, 91%, 92%, 93%, 94%, 95%, 96%, 97%, 98%, 99% or 100% sequence identity to SEQ ID NO: 946. In some embodiments, the one or more non-coding RNAs detected in a sample comprise at least about 70%, 75%, 80%, 85%, 90%, 91%, 92%, 93%, 94%, 95%, 96%, 97%, 98%, 99% or 100% sequence identity to SEQ ID NO: 947. In some embodiments, the one or more non-coding RNAs detected in a sample comprise at least about 70%, 75%, 80%, 85%, 90%, 91%, 92%, 93%, 94%, 95%, 96%, 97%, 98%, 99% or 100% sequence identity to SEQ ID NO: 948. In some embodiments, the one or more non-coding RNAs detected in a sample comprise at least about 70%, 75%, 80%, 85%, 90%, 91%, 92%, 93%, 94%, 95%, 96%, 97%, 98%, 99% or 100% sequence identity to SEQ ID NO: 949. In some embodiments, the one or more non-coding RNAs detected in a sample comprise at least about 70%, 75%, 80%, 85%, 90%, 91%, 92%, 93%, 94%, 95%, 96%, 97%, 98%, 99% or 100% sequence identity to SEQ ID NO: 950. In some embodiments, the one or more non-coding RNAs detected in a sample comprise at least about 70%, 75%, 80%, 85%, 90%, 91%, 92%, 93%, 94%, 95%, 96%, 97%, 98%, 99% or 100% sequence identity to SEQ ID NO: 951. In some embodiments, the one or more non-coding RNAs detected in a sample comprise at least about 70%, 75%, 80%, 85%, 90%, 91%, 92%, 93%, 94%, 95%, 96%, 97%, 98%, 99% or 100% sequence identity to SEQ ID NO: 952. In some embodiments, the one or more non-coding RNAs detected in a sample comprise at least about 70%, 75%, 80%, 85%, 90%, 91%, 92%, 93%, 94%, 95%, 96%, 97%, 98%, 99% or 100% sequence identity to SEQ ID NO: 953. In some embodiments, the one or more non-coding RNAs detected in a sample comprise at least about 70%, 75%, 80%, 85%, 90%, 91%, 92%, 93%, 94%, 95%, 96%, 97%, 98%, 99% or 100% sequence identity to SEQ ID NO: 954. In some embodiments, the one or more non-coding RNAs detected in a sample comprise at least about 70%, 75%, 80%, 85%, 90%, 91%, 92%, 93%, 94%, 95%, 96%, 97%, 98%, 99% or 100% sequence identity to SEQ ID NO: 955. In some embodiments, the one or more non-coding RNAs detected in a sample comprise at least about 70%, 75%, 80%, 85%, 90%, 91%, 92%, 93%, 94%, 95%, 96%, 97%, 98%, 99% or 100% sequence identity to SEQ ID NO: 956. In some embodiments, the one or more non-coding RNAs detected in a sample comprise at least about 70%, 75%, 80%, 85%, 90%, 91%, 92%, 93%, 94%, 95%, 96%, 97%, 98%, 99% or 100% sequence identity to SEQ ID NO: 957. In some embodiments, the one or more non-coding RNAs detected in a sample comprise at least about 70%, 75%, 80%, 85%, 90%, 91%, 92%, 93%, 94%, 95%, 96%, 97%, 98%, 99% or 100% sequence identity to SEQ ID NO: 958. In some embodiments, the one or more non-coding RNAs detected in a sample comprise at least about 70%, 75%, 80%, 85%, 90%, 91%, 92%, 93%, 94%, 95%, 96%, 97%, 98%, 99% or 100% sequence identity to SEQ ID NO: 959. In some embodiments, the one or more non-coding RNAs detected in a sample comprise at least about 70%, 75%, 80%, 85%, 90%, 91%, 92%, 93%, 94%, 95%, 96%, 97%, 98%, 99% or 100% sequence identity to SEQ ID NO: 960. In some embodiments, the one or more non-coding RNAs detected in a sample comprise at least about 70%, 75%, 80%, 85%, 90%, 91%, 92%, 93%, 94%, 95%, 96%, 97%, 98%, 99% or 100% sequence identity to SEQ ID NO: 961. In some embodiments, the one or more non-coding RNAs detected in a sample comprise at least about 70%, 75%, 80%, 85%, 90%, 91%, 92%, 93%, 94%, 95%, 96%, 97%, 98%, 99% or 100% sequence identity to SEQ ID NO: 962. In some embodiments, the one or more non-coding RNAs detected in a sample comprise at least about 70%, 75%, 80%, 85%, 90%, 91%, 92%, 93%, 94%, 95%, 96%, 97%, 98%, 99% or 100% sequence identity to SEQ ID NO: 963. In some embodiments, the one or more non-coding RNAs detected in a sample comprise at least about 70%, 75%, 80%, 85%, 90%, 91%, 92%, 93%, 94%, 95%, 96%, 97%, 98%, 99% or 100% sequence identity to SEQ ID NO: 964. In some embodiments, the one or more non-coding RNAs detected in a sample comprise at least about 70%, 75%, 80%, 85%, 90%, 91%, 92%, 93%, 94%, 95%, 96%, 97%, 98%, 99% or 100% sequence identity to SEQ ID NO: 965. In some embodiments, the one or more non-coding RNAs detected in a sample comprise at least about 70%, 75%, 80%, 85%, 90%, 91%, 92%, 93%, 94%, 95%, 96%, 97%, 98%, 99% or 100% sequence identity to SEQ ID NO: 966. In some embodiments, the one or more non-coding RNAs detected in a sample comprise at least about 70%, 75%, 80%, 85%, 90%, 91%, 92%, 93%, 94%, 95%, 96%, 97%, 98%, 99% or 100% sequence identity to SEQ ID NO: 967. In some embodiments, the one or more non-coding RNAs detected in a sample comprise at least about 70%, 75%, 80%, 85%, 90%, 91%, 92%, 93%, 94%, 95%, 96%, 97%, 98%, 99% or 100% sequence identity to SEQ ID NO: 968. In some embodiments, the one or more non-coding RNAs detected in a sample comprise at least about 70%, 75%, 80%, 85%, 90%, 91%, 92%, 93%, 94%, 95%, 96%, 97%, 98%, 99% or 100% sequence identity to SEQ ID NO: 969. In some embodiments, the one or more non-coding RNAs detected in a sample comprise at least about 70%, 75%, 80%, 85%, 90%, 91%, 92%, 93%, 94%, 95%, 96%, 97%, 98%, 99% or 100% sequence identity to SEQ ID NO: 970. In some embodiments, the one or more non-coding RNAs detected in a sample comprise at least about 70%, 75%, 80%, 85%, 90%, 91%, 92%, 93%, 94%, 95%, 96%, 97%, 98%, 99% or 100% sequence identity to SEQ ID NO: 971. In some embodiments, the one or more non-coding RNAs detected in a sample comprise at least about 70%, 75%, 80%, 85%, 90%, 91%, 92%, 93%, 94%, 95%, 96%, 97%, 98%, 99% or 100% sequence identity to SEQ ID NO: 972. In some embodiments, the one or more non-coding RNAs detected in a sample comprise at least about 70%, 75%, 80%, 85%, 90%, 91%, 92%, 93%, 94%, 95%, 96%, 97%, 98%, 99% or 100% sequence identity to SEQ ID NO: 973. In some embodiments, the one or more non-coding RNAs detected in a sample comprise at least about 70%, 75%, 80%, 85%, 90%, 91%, 92%, 93%, 94%, 95%, 96%, 97%, 98%, 99% or 100% sequence identity to SEQ ID NO: 974. In some embodiments, the one or more non-coding RNAs detected in a sample comprise at least about 70%, 75%, 80%, 85%, 90%, 91%, 92%, 93%, 94%, 95%, 96%, 97%, 98%, 99% or 100% sequence identity to SEQ ID NO: 975. In some embodiments, the one or more non-coding RNAs detected in a sample comprise at least about 70%, 75%, 80%, 85%, 90%, 91%, 92%, 93%, 94%, 95%, 96%, 97%, 98%, 99% or 100% sequence identity to SEQ ID NO: 976. In some embodiments, the one or more non-coding RNAs detected in a sample comprise at least about 70%, 75%, 80%, 85%, 90%, 91%, 92%, 93%, 94%, 95%, 96%, 97%, 98%, 99% or 100% sequence identity to SEQ ID NO: 977. In some embodiments, the one or more non-coding RNAs detected in a sample comprise at least about 70%, 75%, 80%, 85%, 90%, 91%, 92%, 93%, 94%, 95%, 96%, 97%, 98%, 99% or 100% sequence identity to SEQ ID NO: 978. In some embodiments, the one or more non-coding RNAs detected in a sample comprise at least about 70%, 75%, 80%, 85%, 90%, 91%, 92%, 93%, 94%, 95%, 96%, 97%, 98%, 99% or 100% sequence identity to SEQ ID NO: 979. In some embodiments, the one or more non-coding RNAs detected in a sample comprise at least about 70%, 75%, 80%, 85%, 90%, 91%, 92%, 93%, 94%, 95%, 96%, 97%, 98%, 99% or 100% sequence identity to SEQ ID NO: 980. In some embodiments, the one or more non-coding RNAs detected in a sample comprise at least about 70%, 75%, 80%, 85%, 90%, 91%, 92%, 93%, 94%, 95%, 96%, 97%, 98%, 99% or 100% sequence identity to SEQ ID NO: 981. In some embodiments, the one or more non-coding RNAs detected in a sample comprise at least about 70%, 75%, 80%, 85%, 90%, 91%, 92%, 93%, 94%, 95%, 96%, 97%, 98%, 99% or 100% sequence identity to SEQ ID NO: 982. In some embodiments, the one or more non-coding RNAs detected in a sample comprise at least about 70%, 75%, 80%, 85%, 90%, 91%, 92%, 93%, 94%, 95%, 96%, 97%, 98%, 99% or 100% sequence identity to SEQ ID NO: 983. In some embodiments, the one or more non-coding RNAs detected in a sample comprise at least about 70%, 75%, 80%, 85%, 90%, 91%, 92%, 93%, 94%, 95%, 96%, 97%, 98%, 99% or 100% sequence identity to SEQ ID NO: 984. In some embodiments, the one or more non-coding RNAs detected in a sample comprise at least about 70%, 75%, 80%, 85%, 90%, 91%, 92%, 93%, 94%, 95%, 96%, 97%, 98%, 99% or 100% sequence identity to SEQ ID NO: 985. In some embodiments, the one or more non-coding RNAs detected in a sample comprise at least about 70%, 75%, 80%, 85%, 90%, 91%, 92%, 93%, 94%, 95%, 96%, 97%, 98%, 99% or 100% sequence identity to SEQ ID NO: 986. In some embodiments, the one or more non-coding RNAs detected in a sample comprise at least about 70%, 75%, 80%, 85%, 90%, 91%, 92%, 93%, 94%, 95%, 96%, 97%, 98%, 99% or 100% sequence identity to SEQ ID NO: 987. In some embodiments, the one or more non-coding RNAs detected in a sample comprise at least about 70%, 75%, 80%, 85%, 90%, 91%, 92%, 93%, 94%, 95%, 96%, 97%, 98%, 99% or 100% sequence identity to SEQ ID NO: 988. In some embodiments, the one or more non-coding RNAs detected in a sample comprise at least about 70%, 75%, 80%, 85%, 90%, 91%, 92%, 93%, 94%, 95%, 96%, 97%, 98%, 99% or 100% sequence identity to SEQ ID NO: 989. In some embodiments, the one or more non-coding RNAs detected in a sample comprise at least about 70%, 75%, 80%, 85%, 90%, 91%, 92%, 93%, 94%, 95%, 96%, 97%, 98%, 99% or 100% sequence identity to SEQ ID NO: 990. In some embodiments, the one or more non-coding RNAs detected in a sample comprise at least about 70%, 75%, 80%, 85%, 90%, 91%, 92%, 93%, 94%, 95%, 96%, 97%, 98%, 99% or 100% sequence identity to SEQ ID NO: 991. In some embodiments, the one or more non-coding RNAs detected in a sample comprise at least about 70%, 75%, 80%, 85%, 90%, 91%, 92%, 93%, 94%, 95%, 96%, 97%, 98%, 99% or 100% sequence identity to SEQ ID NO: 992. In some embodiments, the one or more non-coding RNAs detected in a sample comprise at least about 70%, 75%, 80%, 85%, 90%, 91%, 92%, 93%, 94%, 95%, 96%, 97%, 98%, 99% or 100% sequence identity to SEQ ID NO: 993. In some embodiments, the one or more non-coding RNAs detected in a sample comprise at least about 70%, 75%, 80%, 85%, 90%, 91%, 92%, 93%, 94%, 95%, 96%, 97%, 98%, 99% or 100% sequence identity to SEQ ID NO: 994. In some embodiments, the one or more non-coding RNAs detected in a sample comprise at least about 70%, 75%, 80%, 85%, 90%, 91%, 92%, 93%, 94%, 95%, 96%, 97%, 98%, 99% or 100% sequence identity to SEQ ID NO: 995. In some embodiments, the one or more non-coding RNAs detected in a sample comprise at least about 70%, 75%, 80%, 85%, 90%, 91%, 92%, 93%, 94%, 95%, 96%, 97%, 98%, 99% or 100% sequence identity to SEQ ID NO: 996. In some embodiments, the one or more non-coding RNAs detected in a sample comprise at least about 70%, 75%, 80%, 85%, 90%, 91%, 92%, 93%, 94%, 95%, 96%, 97%, 98%, 99% or 100% sequence identity to SEQ ID NO: 997. In some embodiments, the one or more non-coding RNAs detected in a sample comprise at least about 70%, 75%, 80%, 85%, 90%, 91%, 92%, 93%, 94%, 95%, 96%, 97%, 98%, 99% or 100% sequence identity to SEQ ID NO: 998. In some embodiments, the one or more non-coding RNAs detected in a sample comprise at least about 70%, 75%, 80%, 85%, 90%, 91%, 92%, 93%, 94%, 95%, 96%, 97%, 98%, 99% or 100% sequence identity to SEQ ID NO: 999. In some embodiments, the one or more non-coding RNAs detected in a sample comprise at least about 70%, 75%, 80%, 85%, 90%, 91%, 92%, 93%, 94%, 95%, 96%, 97%, 98%, 99% or 100% sequence identity to SEQ ID NO: 1000. In some embodiments, the one or more non-coding RNAs detected in a sample comprise at least about 70%, 75%, 80%, 85%, 90%, 91%, 92%, 93%, 94%, 95%, 96%, 97%, 98%, 99% or 100% sequence identity to SEQ ID NO: 1001. In some embodiments, the one or more non-coding RNAs detected in a sample comprise at least about 70%, 75%, 80%, 85%, 90%, 91%, 92%, 93%, 94%, 95%, 96%, 97%, 98%, 99% or 100% sequence identity to SEQ ID NO: 1002. In some embodiments, the one or more non-coding RNAs detected in a sample comprise at least about 70%, 75%, 80%, 85%, 90%, 91%, 92%, 93%, 94%, 95%, 96%, 97%, 98%, 99% or 100% sequence identity to SEQ ID NO: 1003. In some embodiments, the one or more non-coding RNAs detected in a sample comprise at least about 70%, 75%, 80%, 85%, 90%, 91%, 92%, 93%, 94%, 95%, 96%, 97%, 98%, 99% or 100% sequence identity to SEQ ID NO: 1004. In some embodiments, the one or more non-coding RNAs detected in a sample comprise at least about 70%, 75%, 80%, 85%, 90%, 91%, 92%, 93%, 94%, 95%, 96%, 97%, 98%, 99% or 100% sequence identity to SEQ ID NO: 1005. In some embodiments, the one or more non-coding RNAs detected in a sample comprise at least about 70%, 75%, 80%, 85%, 90%, 91%, 92%, 93%, 94%, 95%, 96%, 97%, 98%, 99% or 100% sequence identity to SEQ ID NO: 1006. In some embodiments, the one or more non-coding RNAs detected in a sample comprise at least about 70%, 75%, 80%, 85%, 90%, 91%, 92%, 93%, 94%, 95%, 96%, 97%, 98%, 99% or 100% sequence identity to SEQ ID NO: 1007. In some embodiments, the one or more non-coding RNAs detected in a sample comprise at least about 70%, 75%, 80%, 85%, 90%, 91%, 92%, 93%, 94%, 95%, 96%, 97%, 98%, 99% or 100% sequence identity to SEQ ID NO: 1008. In some embodiments, the one or more non-coding RNAs detected in a sample comprise at least about 70%, 75%, 80%, 85%, 90%, 91%, 92%, 93%, 94%, 95%, 96%, 97%, 98%, 99% or 100% sequence identity to SEQ ID NO: 1009. In some embodiments, the one or more non-coding RNAs detected in a sample comprise at least about 70%, 75%, 80%, 85%, 90%, 91%, 92%, 93%, 94%, 95%, 96%, 97%, 98%, 99% or 100% sequence identity to SEQ ID NO: 1010. In some embodiments, the one or more non-coding RNAs detected in a sample comprise at least about 70%, 75%, 80%, 85%, 90%, 91%, 92%, 93%, 94%, 95%, 96%, 97%, 98%, 99% or 100% sequence identity to SEQ ID NO: 1011. In some embodiments, the one or more non-coding RNAs detected in a sample comprise at least about 70%, 75%, 80%, 85%, 90%, 91%, 92%, 93%, 94%, 95%, 96%, 97%, 98%, 99% or 100% sequence identity to SEQ ID NO: 1012. In some embodiments, the one or more non-coding RNAs detected in a sample comprise at least about 70%, 75%, 80%, 85%, 90%, 91%, 92%, 93%, 94%, 95%, 96%, 97%, 98%, 99% or 100% sequence identity to SEQ ID NO: 1013. In some embodiments, the one or more non-coding RNAs detected in a sample comprise at least about 70%, 75%, 80%, 85%, 90%, 91%, 92%, 93%, 94%, 95%, 96%, 97%, 98%, 99% or 100% sequence identity to SEQ ID NO: 1014. In some embodiments, the one or more non-coding RNAs detected in a sample comprise at least about 70%, 75%, 80%, 85%, 90%, 91%, 92%, 93%, 94%, 95%, 96%, 97%, 98%, 99% or 100% sequence identity to SEQ ID NO: 1015. In some embodiments, the one or more non-coding RNAs detected in a sample comprise at least about 70%, 75%, 80%, 85%, 90%, 91%, 92%, 93%, 94%, 95%, 96%, 97%, 98%, 99% or 100% sequence identity to SEQ ID NO: 1016. In some embodiments, the one or more non-coding RNAs detected in a sample comprise at least about 70%, 75%, 80%, 85%, 90%, 91%, 92%, 93%, 94%, 95%, 96%, 97%, 98%, 99% or 100% sequence identity to SEQ ID NO: 1017. In some embodiments, the one or more non-coding RNAs detected in a sample comprise at least about 70%, 75%, 80%, 85%, 90%, 91%, 92%, 93%, 94%, 95%, 96%, 97%, 98%, 99% or 100% sequence identity to SEQ ID NO: 1018. In some embodiments, the one or more non-coding RNAs detected in a sample comprise at least about 70%, 75%, 80%, 85%, 90%, 91%, 92%, 93%, 94%, 95%, 96%, 97%, 98%, 99% or 100% sequence identity to SEQ ID NO: 1019. In some embodiments, the one or more non-coding RNAs detected in a sample comprise at least about 70%, 75%, 80%, 85%, 90%, 91%, 92%, 93%, 94%, 95%, 96%, 97%, 98%, 99% or 100% sequence identity to SEQ ID NO: 1020. In some embodiments, the one or more non-coding RNAs detected in a sample comprise at least about 70%, 75%, 80%, 85%, 90%, 91%, 92%, 93%, 94%, 95%, 96%, 97%, 98%, 99% or 100% sequence identity to SEQ ID NO: 1021. In some embodiments, the one or more non-coding RNAs detected in a sample comprise at least about 70%, 75%, 80%, 85%, 90%, 91%, 92%, 93%, 94%, 95%, 96%, 97%, 98%, 99% or 100% sequence identity to SEQ ID NO: 1022. In some embodiments, the one or more non-coding RNAs detected in a sample comprise at least about 70%, 75%, 80%, 85%, 90%, 91%, 92%, 93%, 94%, 95%, 96%, 97%, 98%, 99% or 100% sequence identity to SEQ ID NO: 1023. In some embodiments, the one or more non-coding RNAs detected in a sample comprise at least about 70%, 75%, 80%, 85%, 90%, 91%, 92%, 93%, 94%, 95%, 96%, 97%, 98%, 99% or 100% sequence identity to SEQ ID NO: 1024. In some embodiments, the one or more non-coding RNAs detected in a sample comprise at least about 70%, 75%, 80%, 85%, 90%, 91%, 92%, 93%, 94%, 95%, 96%, 97%, 98%, 99% or 100% sequence identity to SEQ ID NO: 1025. In some embodiments, the one or more non-coding RNAs detected in a sample comprise at least about 70%, 75%, 80%, 85%, 90%, 91%, 92%, 93%, 94%, 95%, 96%, 97%, 98%, 99% or 100% sequence identity to SEQ ID NO: 1026. In some embodiments, the one or more non-coding RNAs detected in a sample comprise at least about 70%, 75%, 80%, 85%, 90%, 91%, 92%, 93%, 94%, 95%, 96%, 97%, 98%, 99% or 100% sequence identity to SEQ ID NO: 1027. In some embodiments, the one or more non-coding RNAs detected in a sample comprise at least 70%, 75%, 80%, 85%, 90%, 91%, 92%, 93%, 94%, 95%, 96%, 97%, 98%, 99% or 100% sequence identity to SEQ ID NO: 1028. In some embodiments, the one or more non-coding RNAs detected in a sample comprise at least about 70%, 75%, 80%, 85%, 90%, 91%, 92%, 93%, 94%, 95%, 96%, 97%, 98%, 99% or 100% sequence identity to SEQ ID NO: 1029. In some embodiments, the one or more non-coding RNAs detected in a sample comprise at least about 70%, 75%, 80%, 85%, 90%, 91%, 92%, 93%, 94%, 95%, 96%, 97%, 98%, 99% or 100% sequence identity to SEQ ID NO: 1030. In some embodiments, the one or more non-coding RNAs detected in a sample comprise at least about 70%, 75%, 80%, 85%, 90%, 91%, 92%, 93%, 94%, 95%, 96%, 97%, 98%, 99% or 100% sequence identity to SEQ ID NO: 1031. In some embodiments, the one or more non-coding RNAs detected in a sample comprise at least about 70%, 75%, 80%, 85%, 90%, 91%, 92%, 93%, 94%, 95%, 96%, 97%, 98%, 99% or 100% sequence identity to SEQ ID NO: 1032. In some embodiments, the one or more non-coding RNAs detected in a sample comprise at least about 70%, 75%, 80%, 85%, 90%, 91%, 92%, 93%, 94%, 95%, 96%, 97%, 98%, 99% or 100% sequence identity to SEQ ID NO: 1033. In some embodiments, the one or more non-coding RNAs detected in a sample comprise at least about 70%, 75%, 80%, 85%, 90%, 91%, 92%, 93%, 94%, 95%, 96%, 97%, 98%, 99% or 100% sequence identity to SEQ ID NO: 1034. In some embodiments, the one or more non-coding RNAs detected in a sample comprise at least about 70%, 75%, 80%, 85%, 90%, 91%, 92%, 93%, 94%, 95%, 96%, 97%, 98%, 99% or 100% sequence identity to SEQ ID NO: 1035. In some embodiments, the one or more non-coding RNAs detected in a sample comprise at least about 70%, 75%, 80%, 85%, 90%, 91%, 92%, 93%, 94%, 95%, 96%, 97%, 98%, 99% or 100% sequence identity to SEQ ID NO: 1036. In some embodiments, the one or more non-coding RNAs detected in a sample comprise at least about 70%, 75%, 80%, 85%, 90%, 91%, 92%, 93%, 94%, 95%, 96%, 97%, 98%, 99% or 100% sequence identity to SEQ ID NO: 1037. In some embodiments, the one or more non-coding RNAs detected in a sample comprise at least about 70%, 75%, 80%, 85%, 90%, 91%, 92%, 93%, 94%, 95%, 96%, 97%, 98%, 99% or 100% sequence identity to SEQ ID NO: 1038. In some embodiments, the one or more non-coding RNAs detected in a sample comprise at least about 70%, 75%, 80%, 85%, 90%, 91%, 92%, 93%, 94%, 95%, 96%, 97%, 98%, 99% or 100% sequence identity to SEQ ID NO: 1039. In some embodiments, the one or more non-coding RNAs detected in a sample comprise at least about 70%, 75%, 80%, 85%, 90%, 91%, 92%, 93%, 94%, 95%, 96%, 97%, 98%, 99% or 100% sequence identity to SEQ ID NO: 1040. In some embodiments, the one or more non-coding RNAs detected in a sample comprise at least about 70%, 75%, 80%, 85%, 90%, 91%, 92%, 93%, 94%, 95%, 96%, 97%, 98%, 99% or 100% sequence identity to SEQ ID NO: 1041. In some embodiments, the one or more non-coding RNAs detected in a sample comprise at least about 70%, 75%, 80%, 85%, 90%, 91%, 92%, 93%, 94%, 95%, 96%, 97%, 98%, 99% or 100% sequence identity to SEQ ID NO: 1042. In some embodiments, the one or more non-coding RNAs detected in a sample comprise at least about 70%, 75%, 80%, 85%, 90%, 91%, 92%, 93%, 94%, 95%, 96%, 97%, 98%, 99% or 100% sequence identity to SEQ ID NO: 1043. In some embodiments, the one or more non-coding RNAs detected in a sample comprise at least about 70%, 75%, 80%, 85%, 90%, 91%, 92%, 93%, 94%, 95%, 96%, 97%, 98%, 99% or 100% sequence identity to SEQ ID NO: 1044. In some embodiments, the one or more non-coding RNAs detected in a sample comprise at least about 70%, 75%, 80%, 85%, 90%, 91%, 92%, 93%, 94%, 95%, 96%, 97%, 98%, 99% or 100% sequence identity to SEQ ID NO: 1045. In some embodiments, the one or more non-coding RNAs detected in a sample comprise at least about 70%, 75%, 80%, 85%, 90%, 91%, 92%, 93%, 94%, 95%, 96%, 97%, 98%, 99% or 100% sequence identity to SEQ ID NO: 1046. In some embodiments, the one or more non-coding RNAs detected in a sample comprise at least about 70%, 75%, 80%, 85%, 90%, 91%, 92%, 93%, 94%, 95%, 96%, 97%, 98%, 99% or 100% sequence identity to SEQ ID NO: 1047. In some embodiments, the one or more non-coding RNAs detected in a sample comprise at least about 70%, 75%, 80%, 85%, 90%, 91%, 92%, 93%, 94%, 95%, 96%, 97%, 98%, 99% or 100% sequence identity to SEQ ID NO: 1048. In some embodiments, the one or more non-coding RNAs detected in a sample comprise at least about 70%, 75%, 80%, 85%, 90%, 91%, 92%, 93%, 94%, 95%, 96%, 97%, 98%, 99% or 100% sequence identity to SEQ ID NO: 1049. In some embodiments, the one or more non-coding RNAs detected in a sample comprise at least about 70%, 75%, 80%, 85%, 90%, 91%, 92%, 93%, 94%, 95%, 96%, 97%, 98%, 99% or 100% sequence identity to SEQ ID NO: 1050. In some embodiments, the one or more non-coding RNAs detected in a sample comprise at least about 70%, 75%, 80%, 85%, 90%, 91%, 92%, 93%, 94%, 95%, 96%, 97%, 98%, 99% or 100% sequence identity to SEQ ID NO: 1051. In some embodiments, the one or more non-coding RNAs detected in a sample comprise at least about 70%, 75%, 80%, 85%, 90%, 91%, 92%, 93%, 94%, 95%, 96%, 97%, 98%, 99% or 100% sequence identity to SEQ ID NO: 1052. In some embodiments, the one or more non-coding RNAs detected in a sample comprise at least about 70%, 75%, 80%, 85%, 90%, 91%, 92%, 93%, 94%, 95%, 96%, 97%, 98%, 99% or 100% sequence identity to SEQ ID NO: 1053. In some embodiments, the one or more non-coding RNAs detected in a sample comprise at least about 70%, 75%, 80%, 85%, 90%, 91%, 92%, 93%, 94%, 95%, 96%, 97%, 98%, 99% or 100% sequence identity to SEQ ID NO: 1054. In some embodiments, the one or more non-coding RNAs detected in a sample comprise at least about 70%, 75%, 80%, 85%, 90%, 91%, 92%, 93%, 94%, 95%, 96%, 97%, 98%, 99% or 100% sequence identity to SEQ ID NO: 1055. In some embodiments, the one or more non-coding RNAs detected in a sample comprise at least about 70%, 75%, 80%, 85%, 90%, 91%, 92%, 93%, 94%, 95%, 96%, 97%, 98%, 99% or 100% sequence identity to SEQ ID NO: 1056. In some embodiments, the one or more non-coding RNAs detected in a sample comprise at least about 70%, 75%, 80%, 85%, 90%, 91%, 92%, 93%, 94%, 95%, 96%, 97%, 98%, 99% or 100% sequence identity to SEQ ID NO: 1057. In some embodiments, the one or more non-coding RNAs detected in a sample comprise at least about 70%, 75%, 80%, 85%, 90%, 91%, 92%, 93%, 94%, 95%, 96%, 97%, 98%, 99% or 100% sequence identity to SEQ ID NO: 1058. In some embodiments, the one or more non-coding RNAs detected in a sample comprise at least about 70%, 75%, 80%, 85%, 90%, 91%, 92%, 93%, 94%, 95%, 96%, 97%, 98%, 99% or 100% sequence identity to SEQ ID NO: 1059. In some embodiments, the one or more non-coding RNAs detected in a sample comprise at least about 70%, 75%, 80%, 85%, 90%, 91%, 92%, 93%, 94%, 95%, 96%, 97%, 98%, 99% or 100% sequence identity to SEQ ID NO: 1060. In some embodiments, the one or more non-coding RNAs detected in a sample comprise at least about 70%, 75%, 80%, 85%, 90%, 91%, 92%, 93%, 94%, 95%, 96%, 97%, 98%, 99% or 100% sequence identity to SEQ ID NO: 1061. In some embodiments, the one or more non-coding RNAs detected in a sample comprise at least about 70%, 75%, 80%, 85%, 90%, 91%, 92%, 93%, 94%, 95%, 96%, 97%, 98%, 99% or 100% sequence identity to SEQ ID NO: 1062. In some embodiments, the one or more non-coding RNAs detected in a sample comprise at least about 70%, 75%, 80%, 85%, 90%, 91%, 92%, 93%, 94%, 95%, 96%, 97%, 98%, 99% or 100% sequence identity to SEQ ID NO: 1063. In some embodiments, the one or more non-coding RNAs detected in a sample comprise at least about 70%, 75%, 80%, 85%, 90%, 91%, 92%, 93%, 94%, 95%, 96%, 97%, 98%, 99% or 100% sequence identity to SEQ ID NO: 1064. In some embodiments, the one or more non-coding RNAs detected in a sample comprise at least about 70%, 75%, 80%, 85%, 90%, 91%, 92%, 93%, 94%, 95%, 96%, 97%, 98%, 99% or 100% sequence identity to SEQ ID NO: 1065. In some embodiments, the one or more non-coding RNAs detected in a sample comprise at least about 70%, 75%, 80%, 85%, 90%, 91%, 92%, 93%, 94%, 95%, 96%, 97%, 98%, 99% or 100% sequence identity to SEQ ID NO: 1066. In some embodiments, the one or more non-coding RNAs detected in a sample comprise at least about 70%, 75%, 80%, 85%, 90%, 91%, 92%, 93%, 94%, 95%, 96%, 97%, 98%, 99% or 100% sequence identity to SEQ ID NO: 1067. In some embodiments, the one or more non-coding RNAs detected in a sample comprise at least about 70%, 75%, 80%, 85%, 90%, 91%, 92%, 93%, 94%, 95%, 96%, 97%, 98%, 99% or 100% sequence identity to SEQ ID NO: 1068. In some embodiments, the one or more non-coding RNAs detected in a sample comprise at least about 70%, 75%, 80%, 85%, 90%, 91%, 92%, 93%, 94%, 95%, 96%, 97%, 98%, 99% or 100% sequence identity to SEQ ID NO: 1069. In some embodiments, the one or more non-coding RNAs detected in a sample comprise at least about 70%, 75%, 80%, 85%, 90%, 91%, 92%, 93%, 94%, 95%, 96%, 97%, 98%, 99% or 100% sequence identity to SEQ ID NO: 1070. In some embodiments, the one or more non-coding RNAs detected in a sample comprise at least about 70%, 75%, 80%, 85%, 90%, 91%, 92%, 93%, 94%, 95%, 96%, 97%, 98%, 99% or 100% sequence identity to SEQ ID NO: 1071. In some embodiments, the one or more non-coding RNAs detected in a sample comprise at least about 70%, 75%, 80%, 85%, 90%, 91%, 92%, 93%, 94%, 95%, 96%, 97%, 98%, 99% or 100% sequence identity to SEQ ID NO: 1072. In some embodiments, the one or more non-coding RNAs detected in a sample comprise at least about 70%, 75%, 80%, 85%, 90%, 91%, 92%, 93%, 94%, 95%, 96%, 97%, 98%, 99% or 100% sequence identity to SEQ ID NO: 1073. In some embodiments, the one or more non-coding RNAs detected in a sample comprise at least about 70%, 75%, 80%, 85%, 90%, 91%, 92%, 93%, 94%, 95%, 96%, 97%, 98%, 99% or 100% sequence identity to SEQ ID NO: 1074. In some embodiments, the one or more non-coding RNAs detected in a sample comprise at least about 70%, 75%, 80%, 85%, 90%, 91%, 92%, 93%, 94%, 95%, 96%, 97%, 98%, 99% or 100% sequence identity to SEQ ID NO: 1075. In some embodiments, the one or more non-coding RNAs detected in a sample comprise at least about 70%, 75%, 80%, 85%, 90%, 91%, 92%, 93%, 94%, 95%, 96%, 97%, 98%, 99% or 100% sequence identity to SEQ ID NO: 1076. In some embodiments, the one or more non-coding RNAs detected in a sample comprise at least about 70%, 75%, 80%, 85%, 90%, 91%, 92%, 93%, 94%, 95%, 96%, 97%, 98%, 99% or 100% sequence identity to SEQ ID NO: 1077. In some embodiments, the one or more non-coding RNAs detected in a sample comprise at least about 70%, 75%, 80%, 85%, 90%, 91%, 92%, 93%, 94%, 95%, 96%, 97%, 98%, 99% or 100% sequence identity to SEQ ID NO: 1078. In some embodiments, the one or more non-coding RNAs detected in a sample comprise at least about 70%, 75%, 80%, 85%, 90%, 91%, 92%, 93%, 94%, 95%, 96%, 97%, 98%, 99% or 100% sequence identity to SEQ ID NO: 1079. In some embodiments, the one or more non-coding RNAs detected in a sample comprise at least about 70%, 75%, 80%, 85%, 90%, 91%, 92%, 93%, 94%, 95%, 96%, 97%, 98%, 99% or 100% sequence identity to SEQ ID NO: 1080. In some embodiments, the one or more non-coding RNAs detected in a sample comprise at least about 70%, 75%, 80%, 85%, 90%, 91%, 92%, 93%, 94%, 95%, 96%, 97%, 98%, 99% or 100% sequence identity to SEQ ID NO: 1081. In some embodiments, the one or more non-coding RNAs detected in a sample comprise at least about 70%, 75%, 80%, 85%, 90%, 91%, 92%, 93%, 94%, 95%, 96%, 97%, 98%, 99% or 100% sequence identity to SEQ ID NO: 1082. In some embodiments, the one or more non-coding RNAs detected in a sample comprise at least about 70%, 75%, 80%, 85%, 90%, 91%, 92%, 93%, 94%, 95%, 96%, 97%, 98%, 99% or 100% sequence identity to SEQ ID NO: 1083. In some embodiments, the one or more non-coding RNAs detected in a sample comprise at least about 70%, 75%, 80%, 85%, 90%, 91%, 92%, 93%, 94%, 95%, 96%, 97%, 98%, 99% or 100% sequence identity to SEQ ID NO: 1084. In some embodiments, the one or more non-coding RNAs detected in a sample comprise at least about 70%, 75%, 80%, 85%, 90%, 91%, 92%, 93%, 94%, 95%, 96%, 97%, 98%, 99% or 100% sequence identity to SEQ ID NO: 1085. In some embodiments, the one or more non-coding RNAs detected in a sample comprise at least about 70%, 75%, 80%, 85%, 90%, 91%, 92%, 93%, 94%, 95%, 96%, 97%, 98%, 99% or 100% sequence identity to SEQ ID NO: 1086. In some embodiments, the one or more non-coding RNAs detected in a sample comprise at least about 70%, 75%, 80%, 85%, 90%, 91%, 92%, 93%, 94%, 95%, 96%, 97%, 98%, 99% or 100% sequence identity to SEQ ID NO: 1087. In some embodiments, the one or more non-coding RNAs detected in a sample comprise at least about 70%, 75%, 80%, 85%, 90%, 91%, 92%, 93%, 94%, 95%, 96%, 97%, 98%, 99% or 100% sequence identity to SEQ ID NO: 1088. In some embodiments, the one or more non-coding RNAs detected in a sample comprise at least about 70%, 75%, 80%, 85%, 90%, 91%, 92%, 93%, 94%, 95%, 96%, 97%, 98%, 99% or 100% sequence identity to SEQ ID NO: 1089. In some embodiments, the one or more non-coding RNAs detected in a sample comprise at least about 70%, 75%, 80%, 85%, 90%, 91%, 92%, 93%, 94%, 95%, 96%, 97%, 98%, 99% or 100% sequence identity to SEQ ID NO: 1090. In some embodiments, the one or more non-coding RNAs detected in a sample comprise at least about 70%, 75%, 80%, 85%, 90%, 91%, 92%, 93%, 94%, 95%, 96%, 97%, 98%, 99% or 100% sequence identity to SEQ ID NO: 1091. In some embodiments, the one or more non-coding RNAs detected in a sample comprise at least about 70%, 75%, 80%, 85%, 90%, 91%, 92%, 93%, 94%, 95%, 96%, 97%, 98%, 99% or 100% sequence identity to SEQ ID NO: 1092. In some embodiments, the one or more non-coding RNAs detected in a sample comprise at least about 70%, 75%, 80%, 85%, 90%, 91%, 92%, 93%, 94%, 95%, 96%, 97%, 98%, 99% or 100% sequence identity to SEQ ID NO: 1093. In some embodiments, the one or more non-coding RNAs detected in a sample comprise at least about 70%, 75%, 80%, 85%, 90%, 91%, 92%, 93%, 94%, 95%, 96%, 97%, 98%, 99% or 100% sequence identity to SEQ ID NO: 1094. In some embodiments, the one or more non-coding RNAs detected in a sample comprise at least about 70%, 75%, 80%, 85%, 90%, 91%, 92%, 93%, 94%, 95%, 96%, 97%, 98%, 99% or 100% sequence identity to SEQ ID NO: 1095. In some embodiments, the one or more non-coding RNAs detected in a sample comprise at least about 70%, 75%, 80%, 85%, 90%, 91%, 92%, 93%, 94%, 95%, 96%, 97%, 98%, 99% or 100% sequence identity to SEQ ID NO: 1096. In some embodiments, the one or more non-coding RNAs detected in a sample comprise at least about 70%, 75%, 80%, 85%, 90%, 91%, 92%, 93%, 94%, 95%, 96%, 97%, 98%, 99% or 100% sequence identity to SEQ ID NO: 1097. In some embodiments, the one or more non-coding RNAs detected in a sample comprise at least about 70%, 75%, 80%, 85%, 90%, 91%, 92%, 93%, 94%, 95%, 96%, 97%, 98%, 99% or 100% sequence identity to SEQ ID NO: 1098. In some embodiments, the one or more non-coding RNAs detected in a sample comprise at least about 70%, 75%, 80%, 85%, 90%, 91%, 92%, 93%, 94%, 95%, 96%, 97%, 98%, 99% or 100% sequence identity to SEQ ID NO: 1099. In some embodiments, the one or more non-coding RNAs detected in a sample comprise at least about 70%, 75%, 80%, 85%, 90%, 91%, 92%, 93%, 94%, 95%, 96%, 97%, 98%, 99% or 100% sequence identity to SEQ ID NO: 1100. In some embodiments, the one or more non-coding RNAs detected in a sample comprise at least about 70%, 75%, 80%, 85%, 90%, 91%, 92%, 93%, 94%, 95%, 96%, 97%, 98%, 99% or 100% sequence identity to SEQ ID NO: 1101. In some embodiments, the one or more non-coding RNAs detected in a sample comprise at least about 70%, 75%, 80%, 85%, 90%, 91%, 92%, 93%, 94%, 95%, 96%, 97%, 98%, 99% or 100% sequence identity to SEQ ID NO: 1102. In some embodiments, the one or more non-coding RNAs detected in a sample comprise at least about 70%, 75%, 80%, 85%, 90%, 91%, 92%, 93%, 94%, 95%, 96%, 97%, 98%, 99% or 100% sequence identity to SEQ ID NO: 1103. In some embodiments, the one or more non-coding RNAs detected in a sample comprise at least about 70%, 75%, 80%, 85%, 90%, 91%, 92%, 93%, 94%, 95%, 96%, 97%, 98%, 99% or 100% sequence identity to SEQ ID NO: 1104. In some embodiments, the one or more non-coding RNAs detected in a sample comprise at least about 70%, 75%, 80%, 85%, 90%, 91%, 92%, 93%, 94%, 95%, 96%, 97%, 98%, 99% or 100% sequence identity to SEQ ID NO: 1105. In some embodiments, the one or more non-coding RNAs detected in a sample comprise at least about 70%, 75%, 80%, 85%, 90%, 91%, 92%, 93%, 94%, 95%, 96%, 97%, 98%, 99% or 100% sequence identity to SEQ ID NO: 1106. In some embodiments, the one or more non-coding RNAs detected in a sample comprise at least about 70%, 75%, 80%, 85%, 90%, 91%, 92%, 93%, 94%, 95%, 96%, 97%, 98%, 99% or 100% sequence identity to SEQ ID NO: 1107. In some embodiments, the one or more non-coding RNAs detected in a sample comprise at least about 70%, 75%, 80%, 85%, 90%, 91%, 92%, 93%, 94%, 95%, 96%, 97%, 98%, 99% or 100% sequence identity to SEQ ID NO: 1108. In some embodiments, the one or more non-coding RNAs detected in a sample comprise at least about 70%, 75%, 80%, 85%, 90%, 91%, 92%, 93%, 94%, 95%, 96%, 97%, 98%, 99% or 100% sequence identity to SEQ ID NO: 1109. In some embodiments, the one or more non-coding RNAs detected in a sample comprise at least about 70%, 75%, 80%, 85%, 90%, 91%, 92%, 93%, 94%, 95%, 96%, 97%, 98%, 99% or 100% sequence identity to SEQ ID NO: 1110. In some embodiments, the one or more non-coding RNAs detected in a sample comprise at least about 70%, 75%, 80%, 85%, 90%, 91%, 92%, 93%, 94%, 95%, 96%, 97%, 98%, 99% or 100% sequence identity to SEQ ID NO: 1111. In some embodiments, the one or more non-coding RNAs detected in a sample comprise at least about 70%, 75%, 80%, 85%, 90%, 91%, 92%, 93%, 94%, 95%, 96%, 97%, 98%, 99% or 100% sequence identity to SEQ ID NO: 1112. In some embodiments, the one or more non-coding RNAs detected in a sample comprise at least about 70%, 75%, 80%, 85%, 90%, 91%, 92%, 93%, 94%, 95%, 96%, 97%, 98%, 99% or 100% sequence identity to SEQ ID NO: 1113. In some embodiments, the one or more non-coding RNAs detected in a sample comprise at least about 70%, 75%, 80%, 85%, 90%, 91%, 92%, 93%, 94%, 95%, 96%, 97%, 98%, 99% or 100% sequence identity to SEQ ID NO: 1114. In some embodiments, the one or more non-coding RNAs detected in a sample comprise at least about 70%, 75%, 80%, 85%, 90%, 91%, 92%, 93%, 94%, 95%, 96%, 97%, 98%, 99% or 100% sequence identity to SEQ ID NO: 1115. In some embodiments, the one or more non-coding RNAs detected in a sample comprise at least about 70%, 75%, 80%, 85%, 90%, 91%, 92%, 93%, 94%, 95%, 96%, 97%, 98%, 99% or 100% sequence identity to SEQ ID NO: 1116. In some embodiments, the one or more non-coding RNAs detected in a sample comprise at least about 70%, 75%, 80%, 85%, 90%, 91%, 92%, 93%, 94%, 95%, 96%, 97%, 98%, 99% or 100% sequence identity to SEQ ID NO: 1117. In some embodiments, the one or more non-coding RNAs detected in a sample comprise at least about 70%, 75%, 80%, 85%, 90%, 91%, 92%, 93%, 94%, 95%, 96%, 97%, 98%, 99% or 100% sequence identity to SEQ ID NO: 1118. In some embodiments, the one or more non-coding RNAs detected in a sample comprise at least about 70%, 75%, 80%, 85%, 90%, 91%, 92%, 93%, 94%, 95%, 96%, 97%, 98%, 99% or 100% sequence identity to SEQ ID NO: 1119. In some embodiments, the one or more non-coding RNAs detected in a sample comprise at least about 70%, 75%, 80%, 85%, 90%, 91%, 92%, 93%, 94%, 95%, 96%, 97%, 98%, 99% or 100% sequence identity to SEQ ID NO: 1120. In some embodiments, the one or more non-coding RNAs detected in a sample comprise at least about 70%, 75%, 80%, 85%, 90%, 91%, 92%, 93%, 94%, 95%, 96%, 97%, 98%, 99% or 100% sequence identity to SEQ ID NO: 1121. In some embodiments, the one or more non-coding RNAs detected in a sample comprise at least about 70%, 75%, 80%, 85%, 90%, 91%, 92%, 93%, 94%, 95%, 96%, 97%, 98%, 99% or 100% sequence identity to SEQ ID NO: 1122. In some embodiments, the one or more non-coding RNAs detected in a sample comprise at least about 70%, 75%, 80%, 85%, 90%, 91%, 92%, 93%, 94%, 95%, 96%, 97%, 98%, 99% or 100% sequence identity to SEQ ID NO: 1123. In some embodiments, the one or more non-coding RNAs detected in a sample comprise at least about 70%, 75%, 80%, 85%, 90%, 91%, 92%, 93%, 94%, 95%, 96%, 97%, 98%, 99% or 100% sequence identity to SEQ ID NO: 1124. In some embodiments, the one or more non-coding RNAs detected in a sample comprise at least about 70%, 75%, 80%, 85%, 90%, 91%, 92%, 93%, 94%, 95%, 96%, 97%, 98%, 99% or 100% sequence identity to SEQ ID NO: 1125. In some embodiments, the one or more non-coding RNAs detected in a sample comprise at least about 70%, 75%, 80%, 85%, 90%, 91%, 92%, 93%, 94%, 95%, 96%, 97%, 98%, 99% or 100% sequence identity to SEQ ID NO: 1126. In some embodiments, the one or more non-coding RNAs detected in a sample comprise at least about 70%, 75%, 80%, 85%, 90%, 91%, 92%, 93%, 94%, 95%, 96%, 97%, 98%, 99% or 100% sequence identity to SEQ ID NO: 1127. In some embodiments, the one or more non-coding RNAs detected in a sample comprise at least about 70%, 75%, 80%, 85%, 90%, 91%, 92%, 93%, 94%, 95%, 96%, 97%, 98%, 99% or 100% sequence identity to SEQ ID NO: 1128. In some embodiments, the one or more non-coding RNAs detected in a sample comprise at least about 70%, 75%, 80%, 85%, 90%, 91%, 92%, 93%, 94%, 95%, 96%, 97%, 98%, 99% or 100% sequence identity to SEQ ID NO: 1129. In some embodiments, the one or more non-coding RNAs detected in a sample comprise at least about 70%, 75%, 80%, 85%, 90%, 91%, 92%, 93%, 94%, 95%, 96%, 97%, 98%, 99% or 100% sequence identity to SEQ ID NO: 1130. In some embodiments, the one or more non-coding RNAs detected in a sample comprise at least about 70%, 75%, 80%, 85%, 90%, 91%, 92%, 93%, 94%, 95%, 96%, 97%, 98%, 99% or 100% sequence identity to SEQ ID NO:1131. In some embodiments, the one or more non-coding RNAs detected in a sample comprise at least about 70%, 75%, 80%, 85%, 90%, 91%, 92%, 93%, 94%, 95%, 96%, 97%, 98%, 99% or 100% sequence identity to SEQ ID NO: 1132. In some embodiments, the one or more non-coding RNAs detected in a sample comprise at least about 70%, 75%, 80%, 85%, 90%, 91%, 92%, 93%, 94%, 95%, 96%, 97%, 98%, 99% or 100% sequence identity to SEQ ID NO: 1133. In some embodiments, the one or more non-coding RNAs detected in a sample comprise at least about 70%, 75%, 80%, 85%, 90%, 91%, 92%, 93%, 94%, 95%, 96%, 97%, 98%, 99% or 100% sequence identity to SEQ ID NO: 1134. In some embodiments, the one or more non-coding RNAs detected in a sample comprise at least about 70%, 75%, 80%, 85%, 90%, 91%, 92%, 93%, 94%, 95%, 96%, 97%, 98%, 99% or 100% sequence identity to SEQ ID NO: 1135. In some embodiments, the one or more non-coding RNAs detected in a sample comprise at least about 70%, 75%, 80%, 85%, 90%, 91%, 92%, 93%, 94%, 95%, 96%, 97%, 98%, 99% or 100% sequence identity to SEQ ID NO: 1136. In some embodiments, the one or more non-coding RNAs detected in a sample comprise at least about 70%, 75%, 80%, 85%, 90%, 91%, 92%, 93%, 94%, 95%, 96%, 97%, 98%, 99% or 100% sequence identity to SEQ ID NO: 1137. In some embodiments, the one or more non-coding RNAs detected in a sample comprise at least about 70%, 75%, 80%, 85%, 90%, 91%, 92%, 93%, 94%, 95%, 96%, 97%, 98%, 99% or 100% sequence identity to SEQ ID NO: 1138. In some embodiments, the one or more non-coding RNAs detected in a sample comprise at least about 70%, 75%, 80%, 85%, 90%, 91%, 92%, 93%, 94%, 95%, 96%, 97%, 98%, 99% or 100% sequence identity to SEQ ID NO: 1139. In some embodiments, the one or more non-coding RNAs detected in a sample comprise at least about 70%, 75%, 80%, 85%, 90%, 91%, 92%, 93%, 94%, 95%, 96%, 97%, 98%, 99% or 100% sequence identity to SEQ ID NO: 1140. In some embodiments, the one or more non-coding RNAs detected in a sample comprise at least about 70%, 75%, 80%, 85%, 90%, 91%, 92%, 93%, 94%, 95%, 96%, 97%, 98%, 99% or 100% sequence identity to SEQ ID NO: 1141. In some embodiments, the one or more non-coding RNAs detected in a sample comprise at least about 70%, 75%, 80%, 85%, 90%, 91%, 92%, 93%, 94%, 95%, 96%, 97%, 98%, 99% or 100% sequence identity to SEQ ID NO: 1142. In some embodiments, the one or more non-coding RNAs detected in a sample comprise at least about 70%, 75%, 80%, 85%, 90%, 91%, 92%, 93%, 94%, 95%, 96%, 97%, 98%, 99% or 100% sequence identity to SEQ ID NO: 1143. In some embodiments, the one or more non-coding RNAs detected in a sample comprise at least about 70%, 75%, 80%, 85%, 90%, 91%, 92%, 93%, 94%, 95%, 96%, 97%, 98%, 99% or 100% sequence identity to SEQ ID NO: 1144. In some embodiments, the one or more non-coding RNAs detected in a sample comprise at least about 70%, 75%, 80%, 85%, 90%, 91%, 92%, 93%, 94%, 95%, 96%, 97%, 98%, 99% or 100% sequence identity to SEQ ID NO: 1145. In some embodiments, the one or more non-coding RNAs detected in a sample comprise at least about 70%, 75%, 80%, 85%, 90%, 91%, 92%, 93%, 94%, 95%, 96%, 97%, 98%, 99% or 100% sequence identity to SEQ ID NO: 1146. In some embodiments, the one or more non-coding RNAs detected in a sample comprise at least about 70%, 75%, 80%, 85%, 90%, 91%, 92%, 93%, 94%, 95%, 96%, 97%, 98%, 99% or 100% sequence identity to SEQ ID NO: 1147. In some embodiments, the one or more non-coding RNAs detected in a sample comprise at least about 70%, 75%, 80%, 85%, 90%, 91%, 92%, 93%, 94%, 95%, 96%, 97%, 98%, 99% or 100% sequence identity to SEQ ID NO: 1148. In some embodiments, the one or more non-coding RNAs detected in a sample comprise at least about 70%, 75%, 80%, 85%, 90%, 91%, 92%, 93%, 94%, 95%, 96%, 97%, 98%, 99% or 100% sequence identity to SEQ ID NO: 1149. In some embodiments, the one or more non-coding RNAs detected in a sample comprise at least about 70%, 75%, 80%, 85%, 90%, 91%, 92%, 93%, 94%, 95%, 96%, 97%, 98%, 99% or 100% sequence identity to SEQ ID NO: 1150. In some embodiments, the one or more non-coding RNAs detected in a sample comprise at least about 70%, 75%, 80%, 85%, 90%, 91%, 92%, 93%, 94%, 95%, 96%, 97%, 98%, 99% or 100% sequence identity to SEQ ID NO: 1151. In some embodiments, the one or more non-coding RNAs detected in a sample comprise at least about 70%, 75%, 80%, 85%, 90%, 91%, 92%, 93%, 94%, 95%, 96%, 97%, 98%, 99% or 100% sequence identity to SEQ ID NO: 1152. In some embodiments, the one or more non-coding RNAs detected in a sample comprise at least about 70%, 75%, 80%, 85%, 90%, 91%, 92%, 93%, 94%, 95%, 96%, 97%, 98%, 99% or 100% sequence identity to SEQ ID NO: 1153. In some embodiments, the one or more non-coding RNAs detected in a sample comprise at least about 70%, 75%, 80%, 85%, 90%, 91%, 92%, 93%, 94%, 95%, 96%, 97%, 98%, 99% or 100% sequence identity to SEQ ID NO: 1154. In some embodiments, the one or more non-coding RNAs detected in a sample comprise at least about 70%, 75%, 80%, 85%, 90%, 91%, 92%, 93%, 94%, 95%, 96%, 97%, 98%, 99% or 100% sequence identity to SEQ ID NO: 1155. In some embodiments, the one or more non-coding RNAs detected in a sample comprise at least about 70%, 75%, 80%, 85%, 90%, 91%, 92%, 93%, 94%, 95%, 96%, 97%, 98%, 99% or 100% sequence identity to SEQ ID NO: 1156. In some embodiments, the one or more non-coding RNAs detected in a sample comprise at least about 70%, 75%, 80%, 85%, 90%, 91%, 92%, 93%, 94%, 95%, 96%, 97%, 98%, 99% or 100% sequence identity to SEQ ID NO: 1157. In some embodiments, the one or more non-coding RNAs detected in a sample comprise at least about 70%, 75%, 80%, 85%, 90%, 91%, 92%, 93%, 94%, 95%, 96%, 97%, 98%, 99% or 100% sequence identity to SEQ ID NO: 1158. In some embodiments, the one or more non-coding RNAs detected in a sample comprise at least about 70%, 75%, 80%, 85%, 90%, 91%, 92%, 93%, 94%, 95%, 96%, 97%, 98%, 99% or 100% sequence identity to SEQ ID NO: 1159. In some embodiments, the one or more non-coding RNAs detected in a sample comprise at least about 70%, 75%, 80%, 85%, 90%, 91%, 92%, 93%, 94%, 95%, 96%, 97%, 98%, 99% or 100% sequence identity to SEQ ID NO: 1160. In some embodiments, the one or more non-coding RNAs detected in a sample comprise at least about 70%, 75%, 80%, 85%, 90%, 91%, 92%, 93%, 94%, 95%, 96%, 97%, 98%, 99% or 100% sequence identity to SEQ ID NO: 1161. In some embodiments, the one or more non-coding RNAs detected in a sample comprise at least about 70%, 75%, 80%, 85%, 90%, 91%, 92%, 93%, 94%, 95%, 96%, 97%, 98%, 99% or 100% sequence identity to SEQ ID NO: 1162. In some embodiments, the one or more non-coding RNAs detected in a sample comprise at least about 70%, 75%, 80%, 85%, 90%, 91%, 92%, 93%, 94%, 95%, 96%, 97%, 98%, 99% or 100% sequence identity to SEQ ID NO: 1163. In some embodiments, the one or more non-coding RNAs detected in a sample comprise at least about 70%, 75%, 80%, 85%, 90%, 91%, 92%, 93%, 94%, 95%, 96%, 97%, 98%, 99% or 100% sequence identity to SEQ ID NO: 1164. In some embodiments, the one or more non-coding RNAs detected in a sample comprise at least about 70%, 75%, 80%, 85%, 90%, 91%, 92%, 93%, 94%, 95%, 96%, 97%, 98%, 99% or 100% sequence identity to SEQ ID NO: 1165. In some embodiments, the one or more non-coding RNAs detected in a sample comprise at least about 70%, 75%, 80%, 85%, 90%, 91%, 92%, 93%, 94%, 95%, 96%, 97%, 98%, 99% or 100% sequence identity to SEQ ID NO: 1166. In some embodiments, the one or more non-coding RNAs detected in a sample comprise at least about 70%, 75%, 80%, 85%, 90%, 91%, 92%, 93%, 94%, 95%, 96%, 97%, 98%, 99% or 100% sequence identity to SEQ ID NO: 1167. In some embodiments, the one or more non-coding RNAs detected in a sample comprise at least about 70%, 75%, 80%, 85%, 90%, 91%, 92%, 93%, 94%, 95%, 96%, 97%, 98%, 99% or 100% sequence identity to SEQ ID NO: 1168. In some embodiments, the one or more non-coding RNAs detected in a sample comprise at least about 70%, 75%, 80%, 85%, 90%, 91%, 92%, 93%, 94%, 95%, 96%, 97%, 98%, 99% or 100% sequence identity to SEQ ID NO: 1169. In some embodiments, the one or more non-coding RNAs detected in a sample comprise at least about 70%, 75%, 80%, 85%, 90%, 91%, 92%, 93%, 94%, 95%, 96%, 97%, 98%, 99% or 100% sequence identity to SEQ ID NO: 1170. In some embodiments, the one or more non-coding RNAs detected in a sample comprise at least about 70%, 75%, 80%, 85%, 90%, 91%, 92%, 93%, 94%, 95%, 96%, 97%, 98%, 99% or 100% sequence identity to SEQ ID NO: 1171. In some embodiments, the one or more non-coding RNAs detected in a sample comprise at least about 70%, 75%, 80%, 85%, 90%, 91%, 92%, 93%, 94%, 95%, 96%, 97%, 98%, 99% or 100% sequence identity to SEQ ID NO: 1172. In some embodiments, the one or more non-coding RNAs detected in a sample comprise at least about 70%, 75%, 80%, 85%, 90%, 91%, 92%, 93%, 94%, 95%, 96%, 97%, 98%, 99% or 100% sequence identity to SEQ ID NO: 1173. In some embodiments, the one or more non-coding RNAs detected in a sample comprise at least about 70%, 75%, 80%, 85%, 90%, 91%, 92%, 93%, 94%, 95%, 96%, 97%, 98%, 99% or 100% sequence identity to SEQ ID NO: 1174. In some embodiments, the one or more non-coding RNAs detected in a sample comprise at least about 70%, 75%, 80%, 85%, 90%, 91%, 92%, 93%, 94%, 95%, 96%, 97%, 98%, 99% or 100% sequence identity to SEQ ID NO: 1175. In some embodiments, the one or more non-coding RNAs detected in a sample comprise at least about 70%, 75%, 80%, 85%, 90%, 91%, 92%, 93%, 94%, 95%, 96%, 97%, 98%, 99% or 100% sequence identity to SEQ ID NO: 1176. In some embodiments, the one or more non-coding RNAs detected in a sample comprise at least about 70%, 75%, 80%, 85%, 90%, 91%, 92%, 93%, 94%, 95%, 96%, 97%, 98%, 99% or 100% sequence identity to SEQ ID NO: 1177. In some embodiments, the one or more non-coding RNAs detected in a sample comprise at least about 70%, 75%, 80%, 85%, 90%, 91%, 92%, 93%, 94%, 95%, 96%, 97%, 98%, 99% or 100% sequence identity to SEQ ID NO: 1178. In some embodiments, the one or more non-coding RNAs detected in a sample comprise at least about 70%, 75%, 80%, 85%, 90%, 91%, 92%, 93%, 94%, 95%, 96%, 97%, 98%, 99% or 100% sequence identity to SEQ ID NO: 1179. In some embodiments, the one or more non-coding RNAs detected in a sample comprise at least about 70%, 75%, 80%, 85%, 90%, 91%, 92%, 93%, 94%, 95%, 96%, 97%, 98%, 99% or 100% sequence identity to SEQ ID NO: 1180. In some embodiments, the one or more non-coding RNAs detected in a sample comprise at least about 70%, 75%, 80%, 85%, 90%, 91%, 92%, 93%, 94%, 95%, 96%, 97%, 98%, 99% or 100% sequence identity to SEQ ID NO: 1181. In some embodiments, the one or more non-coding RNAs detected in a sample comprise at least about 70%, 75%, 80%, 85%, 90%, 91%, 92%, 93%, 94%, 95%, 96%, 97%, 98%, 99% or 100% sequence identity to SEQ ID NO: 1182. In some embodiments, the one or more non-coding RNAs detected in a sample comprise at least about 70%, 75%, 80%, 85%, 90%, 91%, 92%, 93%, 94%, 95%, 96%, 97%, 98%, 99% or 100% sequence identity to SEQ ID NO: 1183. In some embodiments, the one or more non-coding RNAs detected in a sample comprise at least about 70%, 75%, 80%, 85%, 90%, 91%, 92%, 93%, 94%, 95%, 96%, 97%, 98%, 99% or 100% sequence identity to SEQ ID NO: 1184. In some embodiments, the one or more non-coding RNAs detected in a sample comprise at least about 70%, 75%, 80%, 85%, 90%, 91%, 92%, 93%, 94%, 95%, 96%, 97%, 98%, 99% or 100% sequence identity to SEQ ID NO: 1185. In some embodiments, the one or more non-coding RNAs detected in a sample comprise at least about 70%, 75%, 80%, 85%, 90%, 91%, 92%, 93%, 94%, 95%, 96%, 97%, 98%, 99% or 100% sequence identity to SEQ ID NO: 1186. In some embodiments, the one or more non-coding RNAs detected in a sample comprise at least about 70%, 75%, 80%, 85%, 90%, 91%, 92%, 93%, 94%, 95%, 96%, 97%, 98%, 99% or 100% sequence identity to SEQ ID NO: 1187. In some embodiments, the one or more non-coding RNAs detected in a sample comprise at least about 70%, 75%, 80%, 85%, 90%, 91%, 92%, 93%, 94%, 95%, 96%, 97%, 98%, 99% or 100% sequence identity to SEQ ID NO: 1188. In some embodiments, the one or more non-coding RNAs detected in a sample comprise at least about 70%, 75%, 80%, 85%, 90%, 91%, 92%, 93%, 94%, 95%, 96%, 97%, 98%, 99% or 100% sequence identity to SEQ ID NO: 1189. In some embodiments, the one or more non-coding RNAs detected in a sample comprise at least about 70%, 75%, 80%, 85%, 90%, 91%, 92%, 93%, 94%, 95%, 96%, 97%, 98%, 99% or 100% sequence identity to SEQ ID NO: 1190. In some embodiments, the one or more non-coding RNAs detected in a sample comprise at least about 70%, 75%, 80%, 85%, 90%, 91%, 92%, 93%, 94%, 95%, 96%, 97%, 98%, 99% or 100% sequence identity to SEQ ID NO: 1191. In some embodiments, the one or more non-coding RNAs detected in a sample comprise at least about 70%, 75%, 80%, 85%, 90%, 91%, 92%, 93%, 94%, 95%, 96%, 97%, 98%, 99% or 100% sequence identity to SEQ ID NO: 1192. In some embodiments, the one or more non-coding RNAs detected in a sample comprise at least about 70%, 75%, 80%, 85%, 90%, 91%, 92%, 93%, 94%, 95%, 96%, 97%, 98%, 99% or 100% sequence identity to SEQ ID NO: 1193. In some embodiments, the one or more non-coding RNAs detected in a sample comprise at least about 70%, 75%, 80%, 85%, 90%, 91%, 92%, 93%, 94%, 95%, 96%, 97%, 98%, 99% or 100% sequence identity to SEQ ID NO: 1194. In some embodiments, the one or more non-coding RNAs detected in a sample comprise at least about 70%, 75%, 80%, 85%, 90%, 91%, 92%, 93%, 94%, 95%, 96%, 97%, 98%, 99% or 100% sequence identity to SEQ ID NO: 1195. In some embodiments, the one or more non-coding RNAs detected in a sample comprise at least about 70%, 75%, 80%, 85%, 90%, 91%, 92%, 93%, 94%, 95%, 96%, 97%, 98%, 99% or 100% sequence identity to SEQ ID NO: 1196. In some embodiments, the one or more non-coding RNAs detected in a sample comprise at least about 70%, 75%, 80%, 85%, 90%, 91%, 92%, 93%, 94%, 95%, 96%, 97%, 98%, 99% or 100% sequence identity to SEQ ID NO: 1197. In some embodiments, the one or more non-coding RNAs detected in a sample comprise at least about 70%, 75%, 80%, 85%, 90%, 91%, 92%, 93%, 94%, 95%, 96%, 97%, 98%, 99% or 100% sequence identity to SEQ ID NO: 1198. In some embodiments, the one or more non-coding RNAs detected in a sample comprise at least about 70%, 75%, 80%, 85%, 90%, 91%, 92%, 93%, 94%, 95%, 96%, 97%, 98%, 99% or 100% sequence identity to SEQ ID NO: 1199. In some embodiments, the one or more non-coding RNAs detected in a sample comprise at least about 70%, 75%, 80%, 85%, 90%, 91%, 92%, 93%, 94%, 95%, 96%, 97%, 98%, 99% or 100% sequence identity to SEQ ID NO: 1200. In some embodiments, the one or more non-coding RNAs detected in a sample comprise at least about 70%, 75%, 80%, 85%, 90%, 91%, 92%, 93%, 94%, 95%, 96%, 97%, 98%, 99% or 100% sequence identity to SEQ ID NO: 1201. In some embodiments, the one or more non-coding RNAs detected in a sample comprise at least about 70%, 75%, 80%, 85%, 90%, 91%, 92%, 93%, 94%, 95%, 96%, 97%, 98%, 99% or 100% sequence identity to SEQ ID NO: 1202. In some embodiments, the one or more non-coding RNAs detected in a sample comprise at least about 70%, 75%, 80%, 85%, 90%, 91%, 92%, 93%, 94%, 95%, 96%, 97%, 98%, 99% or 100% sequence identity to SEQ ID NO: 1203. In some embodiments, the one or more non-coding RNAs detected in a sample comprise at least about 70%, 75%, 80%, 85%, 90%, 91%, 92%, 93%, 94%, 95%, 96%, 97%, 98%, 99% or 100% sequence identity to SEQ ID NO: 1204. In some embodiments, the one or more non-coding RNAs detected in a sample comprise at least about 70%, 75%, 80%, 85%, 90%, 91%, 92%, 93%, 94%, 95%, 96%, 97%, 98%, 99% or 100% sequence identity to SEQ ID NO: 1205. In some embodiments, the one or more non-coding RNAs detected in a sample comprise at least about 70%, 75%, 80%, 85%, 90%, 91%, 92%, 93%, 94%, 95%, 96%, 97%, 98%, 99% or 100% sequence identity to SEQ ID NO: 1206. In some embodiments, the one or more non-coding RNAs detected in a sample comprise at least about 70%, 75%, 80%, 85%, 90%, 91%, 92%, 93%, 94%, 95%, 96%, 97%, 98%, 99% or 100% sequence identity to SEQ ID NO: 1207. In some embodiments, the one or more non-coding RNAs detected in a sample comprise at least about 70%, 75%, 80%, 85%, 90%, 91%, 92%, 93%, 94%, 95%, 96%, 97%, 98%, 99% or 100% sequence identity to SEQ ID NO: 1208. In some embodiments, the one or more non-coding RNAs detected in a sample comprise at least about 70%, 75%, 80%, 85%, 90%, 91%, 92%, 93%, 94%, 95%, 96%, 97%, 98%, 99% or 100% sequence identity to SEQ ID NO: 1209. In some embodiments, the one or more non-coding RNAs detected in a sample comprise at least about 70%, 75%, 80%, 85%, 90%, 91%, 92%, 93%, 94%, 95%, 96%, 97%, 98%, 99% or 100% sequence identity to SEQ ID NO: 1210. In some embodiments, the one or more non-coding RNAs detected in a sample comprise at least about 70%, 75%, 80%, 85%, 90%, 91%, 92%, 93%, 94%, 95%, 96%, 97%, 98%, 99% or 100% sequence identity to SEQ ID NO: 1211. In some embodiments, the one or more non-coding RNAs detected in a sample comprise at least about 70%, 75%, 80%, 85%, 90%, 91%, 92%, 93%, 94%, 95%, 96%, 97%, 98%, 99% or 100% sequence identity to SEQ ID NO: 1212. In some embodiments, the one or more non-coding RNAs detected in a sample comprise at least about 70%, 75%, 80%, 85%, 90%, 91%, 92%, 93%, 94%, 95%, 96%, 97%, 98%, 99% or 100% sequence identity to SEQ ID NO: 1213. In some embodiments, the one or more non-coding RNAs detected in a sample comprise at least about 70%, 75%, 80%, 85%, 90%, 91%, 92%, 93%, 94%, 95%, 96%, 97%, 98%, 99% or 100% sequence identity to SEQ ID NO: 1214. In some embodiments, the one or more non-coding RNAs detected in a sample comprise at least about 70%, 75%, 80%, 85%, 90%, 91%, 92%, 93%, 94%, 95%, 96%, 97%, 98%, 99% or 100% sequence identity to SEQ ID NO: 1215. In some embodiments, the one or more non-coding RNAs detected in a sample comprise at least about 70%, 75%, 80%, 85%, 90%, 91%, 92%, 93%, 94%, 95%, 96%, 97%, 98%, 99% or 100% sequence identity to SEQ ID NO: 1216. In some embodiments, the one or more non-coding RNAs detected in a sample comprise at least about 70%, 75%, 80%, 85%, 90%, 91%, 92%, 93%, 94%, 95%, 96%, 97%, 98%, 99% or 100% sequence identity to SEQ ID NO: 1217. In some embodiments, the one or more non-coding RNAs detected in a sample comprise at least about 70%, 75%, 80%, 85%, 90%, 91%, 92%, 93%, 94%, 95%, 96%, 97%, 98%, 99% or 100% sequence identity to SEQ ID NO: 1218. In some embodiments, the one or more non-coding RNAs detected in a sample comprise at least about 70%, 75%, 80%, 85%, 90%, 91%, 92%, 93%, 94%, 95%, 96%, 97%, 98%, 99% or 100% sequence identity to SEQ ID NO: 1219. In some embodiments, the one or more non-coding RNAs detected in a sample comprise at least about 70%, 75%, 80%, 85%, 90%, 91%, 92%, 93%, 94%, 95%, 96%, 97%, 98%, 99% or 100% sequence identity to SEQ ID NO: 1220. In some embodiments, the one or more non-coding RNAs detected in a sample comprise at least about 70%, 75%, 80%, 85%, 90%, 91%, 92%, 93%, 94%, 95%, 96%, 97%, 98%, 99% or 100% sequence identity to SEQ ID NO: 1221. In some embodiments, the one or more non-coding RNAs detected in a sample comprise at least about 70%, 75%, 80%, 85%, 90%, 91%, 92%, 93%, 94%, 95%, 96%, 97%, 98%, 99% or 100% sequence identity to SEQ ID NO: 1222. In some embodiments, the one or more non-coding RNAs detected in a sample comprise at least about 70%, 75%, 80%, 85%, 90%, 91%, 92%, 93%, 94%, 95%, 96%, 97%, 98%, 99% or 100% sequence identity to SEQ ID NO: 1223. In some embodiments, the one or more non-coding RNAs detected in a sample comprise at least about 70%, 75%, 80%, 85%, 90%, 91%, 92%, 93%, 94%, 95%, 96%, 97%, 98%, 99% or 100% sequence identity to SEQ ID NO: 1224. In some embodiments, the one or more non-coding RNAs detected in a sample comprise at least about 70%, 75%, 80%, 85%, 90%, 91%, 92%, 93%, 94%, 95%, 96%, 97%, 98%, 99% or 100% sequence identity to SEQ ID NO: 1225. In some embodiments, the one or more non-coding RNAs detected in a sample comprise at least about 70%, 75%, 80%, 85%, 90%, 91%, 92%, 93%, 94%, 95%, 96%, 97%, 98%, 99% or 100% sequence identity to SEQ ID NO: 1226. In some embodiments, the one or more non-coding RNAs detected in a sample comprise at least about 70%, 75%, 80%, 85%, 90%, 91%, 92%, 93%, 94%, 95%, 96%, 97%, 98%, 99% or 100% sequence identity to SEQ ID NO: 1227. In some embodiments, the one or more non-coding RNAs detected in a sample comprise at least 70%, 75%, 80%, 85%, 90%, 91%, 92%, 93%, 94%, 95%, 96%, 97%, 98%, 99% or 100% sequence identity to SEQ ID NO: 1228. In some embodiments, the one or more non-coding RNAs detected in a sample comprise at least about 70%, 75%, 80%, 85%, 90%, 91%, 92%, 93%, 94%, 95%, 96%, 97%, 98%, 99% or 100% sequence identity to SEQ ID NO: 1229. In some embodiments, the one or more non-coding RNAs detected in a sample comprise at least about 70%, 75%, 80%, 85%, 90%, 91%, 92%, 93%, 94%, 95%, 96%, 97%, 98%, 99% or 100% sequence identity to SEQ ID NO: 1230. In some embodiments, the one or more non-coding RNAs detected in a sample comprise at least about 70%, 75%, 80%, 85%, 90%, 91%, 92%, 93%, 94%, 95%, 96%, 97%, 98%, 99% or 100% sequence identity to SEQ ID NO: 1231. In some embodiments, the one or more non-coding RNAs detected in a sample comprise at least about 70%, 75%, 80%, 85%, 90%, 91%, 92%, 93%, 94%, 95%, 96%, 97%, 98%, 99% or 100% sequence identity to SEQ ID NO: 1232. In some embodiments, the one or more non-coding RNAs detected in a sample comprise at least about 70%, 75%, 80%, 85%, 90%, 91%, 92%, 93%, 94%, 95%, 96%, 97%, 98%, 99% or 100% sequence identity to SEQ ID NO: 1233. In some embodiments, the one or more non-coding RNAs detected in a sample comprise at least about 70%, 75%, 80%, 85%, 90%, 91%, 92%, 93%, 94%, 95%, 96%, 97%, 98%, 99% or 100% sequence identity to SEQ ID NO: 1234. In some embodiments, the one or more non-coding RNAs detected in a sample comprise at least about 70%, 75%, 80%, 85%, 90%, 91%, 92%, 93%, 94%, 95%, 96%, 97%, 98%, 99% or 100% sequence identity to SEQ ID NO: 1235. In some embodiments, the one or more non-coding RNAs detected in a sample comprise at least about 70%, 75%, 80%, 85%, 90%, 91%, 92%, 93%, 94%, 95%, 96%, 97%, 98%, 99% or 100% sequence identity to SEQ ID NO: 1236. In some embodiments, the one or more non-coding RNAs detected in a sample comprise at least about 70%, 75%, 80%, 85%, 90%, 91%, 92%, 93%, 94%, 95%, 96%, 97%, 98%, 99% or 100% sequence identity to SEQ ID NO: 1237. In some embodiments, the one or more non-coding RNAs detected in a sample comprise at least about 70%, 75%, 80%, 85%, 90%, 91%, 92%, 93%, 94%, 95%, 96%, 97%, 98%, 99% or 100% sequence identity to SEQ ID NO: 1238. In some embodiments, the one or more non-coding RNAs detected in a sample comprise at least about 70%, 75%, 80%, 85%, 90%, 91%, 92%, 93%, 94%, 95%, 96%, 97%, 98%, 99% or 100% sequence identity to SEQ ID NO: 1239. In some embodiments, the one or more non-coding RNAs detected in a sample comprise at least about 70%, 75%, 80%, 85%, 90%, 91%, 92%, 93%, 94%, 95%, 96%, 97%, 98%, 99% or 100% sequence identity to SEQ ID NO: 1240. In some embodiments, the one or more non-coding RNAs detected in a sample comprise at least about 70%, 75%, 80%, 85%, 90%, 91%, 92%, 93%, 94%, 95%, 96%, 97%, 98%, 99% or 100% sequence identity to SEQ ID NO: 1241. In some embodiments, the one or more non-coding RNAs detected in a sample comprise at least about 70%, 75%, 80%, 85%, 90%, 91%, 92%, 93%, 94%, 95%, 96%, 97%, 98%, 99% or 100% sequence identity to SEQ ID NO: 1242. In some embodiments, the one or more non-coding RNAs detected in a sample comprise at least about 70%, 75%, 80%, 85%, 90%, 91%, 92%, 93%, 94%, 95%, 96%, 97%, 98%, 99% or 100% sequence identity to SEQ ID NO: 1243. In some embodiments, the one or more non-coding RNAs detected in a sample comprise at least about 70%, 75%, 80%, 85%, 90%, 91%, 92%, 93%, 94%, 95%, 96%, 97%, 98%, 99% or 100% sequence identity to SEQ ID NO: 1244. In some embodiments, the one or more non-coding RNAs detected in a sample comprise at least about 70%, 75%, 80%, 85%, 90%, 91%, 92%, 93%, 94%, 95%, 96%, 97%, 98%, 99% or 100% sequence identity to SEQ ID NO: 1245. In some embodiments, the one or more non-coding RNAs detected in a sample comprise at least about 70%, 75%, 80%, 85%, 90%, 91%, 92%, 93%, 94%, 95%, 96%, 97%, 98%, 99% or 100% sequence identity to SEQ ID NO: 1246. In some embodiments, the one or more non-coding RNAs detected in a sample comprise at least about 70%, 75%, 80%, 85%, 90%, 91%, 92%, 93%, 94%, 95%, 96%, 97%, 98%, 99% or 100% sequence identity to SEQ ID NO: 1247. In some embodiments, the one or more non-coding RNAs detected in a sample comprise at least about 70%, 75%, 80%, 85%, 90%, 91%, 92%, 93%, 94%, 95%, 96%, 97%, 98%, 99% or 100% sequence identity to SEQ ID NO: 1248. In some embodiments, the one or more non-coding RNAs detected in a sample comprise at least about 70%, 75%, 80%, 85%, 90%, 91%, 92%, 93%, 94%, 95%, 96%, 97%, 98%, 99% or 100% sequence identity to SEQ ID NO: 1249. In some embodiments, the one or more non-coding RNAs detected in a sample comprise at least about 70%, 75%, 80%, 85%, 90%, 91%, 92%, 93%, 94%, 95%, 96%, 97%, 98%, 99% or 100% sequence identity to SEQ ID NO: 1250. In some embodiments, the one or more non-coding RNAs detected in a sample comprise at least about 70%, 75%, 80%, 85%, 90%, 91%, 92%, 93%, 94%, 95%, 96%, 97%, 98%, 99% or 100% sequence identity to SEQ ID NO: 1251. In some embodiments, the one or more non-coding RNAs detected in a sample comprise at least about 70%, 75%, 80%, 85%, 90%, 91%, 92%, 93%, 94%, 95%, 96%, 97%, 98%, 99% or 100% sequence identity to SEQ ID NO: 1252. In some embodiments, the one or more non-coding RNAs detected in a sample comprise at least about 70%, 75%, 80%, 85%, 90%, 91%, 92%, 93%, 94%, 95%, 96%, 97%, 98%, 99% or 100% sequence identity to SEQ ID NO: 1253. In some embodiments, the one or more non-coding RNAs detected in a sample comprise at least about 70%, 75%, 80%, 85%, 90%, 91%, 92%, 93%, 94%, 95%, 96%, 97%, 98%, 99% or 100% sequence identity to SEQ ID NO: 1254. In some embodiments, the one or more non-coding RNAs detected in a sample comprise at least about 70%, 75%, 80%, 85%, 90%, 91%, 92%, 93%, 94%, 95%, 96%, 97%, 98%, 99% or 100% sequence identity to SEQ ID NO: 1255. In some embodiments, the one or more non-coding RNAs detected in a sample comprise at least about 70%, 75%, 80%, 85%, 90%, 91%, 92%, 93%, 94%, 95%, 96%, 97%, 98%, 99% or 100% sequence identity to SEQ ID NO: 1256. In some embodiments, the one or more non-coding RNAs detected in a sample comprise at least about 70%, 75%, 80%, 85%, 90%, 91%, 92%, 93%, 94%, 95%, 96%, 97%, 98%, 99% or 100% sequence identity to SEQ ID NO: 1257. In some embodiments, the one or more non-coding RNAs detected in a sample comprise at least about 70%, 75%, 80%, 85%, 90%, 91%, 92%, 93%, 94%, 95%, 96%, 97%, 98%, 99% or 100% sequence identity to SEQ ID NO: 1258. In some embodiments, the one or more non-coding RNAs detected in a sample comprise at least about 70%, 75%, 80%, 85%, 90%, 91%, 92%, 93%, 94%, 95%, 96%, 97%, 98%, 99% or 100% sequence identity to SEQ ID NO: 1259. In some embodiments, the one or more non-coding RNAs detected in a sample comprise at least about 70%, 75%, 80%, 85%, 90%, 91%, 92%, 93%, 94%, 95%, 96%, 97%, 98%, 99% or 100% sequence identity to SEQ ID NO: 1260. In some embodiments, the one or more non-coding RNAs detected in a sample comprise at least about 70%, 75%, 80%, 85%, 90%, 91%, 92%, 93%, 94%, 95%, 96%, 97%, 98%, 99% or 100% sequence identity to SEQ ID NO: 1261. In some embodiments, the one or more non-coding RNAs detected in a sample comprise at least about 70%, 75%, 80%, 85%, 90%, 91%, 92%, 93%, 94%, 95%, 96%, 97%, 98%, 99% or 100% sequence identity to SEQ ID NO: 1262. In some embodiments, the one or more non-coding RNAs detected in a sample comprise at least about 70%, 75%, 80%, 85%, 90%, 91%, 92%, 93%, 94%, 95%, 96%, 97%, 98%, 99% or 100% sequence identity to SEQ ID NO: 1263. In some embodiments, the one or more non-coding RNAs detected in a sample comprise at least about 70%, 75%, 80%, 85%, 90%, 91%, 92%, 93%, 94%, 95%, 96%, 97%, 98%, 99% or 100% sequence identity to SEQ ID NO: 1264. In some embodiments, the one or more non-coding RNAs detected in a sample comprise at least about 70%, 75%, 80%, 85%, 90%, 91%, 92%, 93%, 94%, 95%, 96%, 97%, 98%, 99% or 100% sequence identity to SEQ ID NO: 1265. In some embodiments, the one or more non-coding RNAs detected in a sample comprise at least about 70%, 75%, 80%, 85%, 90%, 91%, 92%, 93%, 94%, 95%, 96%, 97%, 98%, 99% or 100% sequence identity to SEQ ID NO: 1266. In some embodiments, the one or more non-coding RNAs detected in a sample comprise at least about 70%, 75%, 80%, 85%, 90%, 91%, 92%, 93%, 94%, 95%, 96%, 97%, 98%, 99% or 100% sequence identity to SEQ ID NO: 1267. In some embodiments, the one or more non-coding RNAs detected in a sample comprise at least about 70%, 75%, 80%, 85%, 90%, 91%, 92%, 93%, 94%, 95%, 96%, 97%, 98%, 99% or 100% sequence identity to SEQ ID NO: 1268. In some embodiments, the one or more non-coding RNAs detected in a sample comprise at least about 70%, 75%, 80%, 85%, 90%, 91%, 92%, 93%, 94%, 95%, 96%, 97%, 98%, 99% or 100% sequence identity to SEQ ID NO: 1269. In some embodiments, the one or more non-coding RNAs detected in a sample comprise at least about 70%, 75%, 80%, 85%, 90%, 91%, 92%, 93%, 94%, 95%, 96%, 97%, 98%, 99% or 100% sequence identity to SEQ ID NO: 1270. In some embodiments, the one or more non-coding RNAs detected in a sample comprise at least about 70%, 75%, 80%, 85%, 90%, 91%, 92%, 93%, 94%, 95%, 96%, 97%, 98%, 99% or 100% sequence identity to SEQ ID NO: 1271. In some embodiments, the one or more non-coding RNAs detected in a sample comprise at least about 70%, 75%, 80%, 85%, 90%, 91%, 92%, 93%, 94%, 95%, 96%, 97%, 98%, 99% or 100% sequence identity to SEQ ID NO: 1272. In some embodiments, the one or more non-coding RNAs detected in a sample comprise at least about 70%, 75%, 80%, 85%, 90%, 91%, 92%, 93%, 94%, 95%, 96%, 97%, 98%, 99% or 100% sequence identity to SEQ ID NO: 1273. In some embodiments, the one or more non-coding RNAs detected in a sample comprise at least about 70%, 75%, 80%, 85%, 90%, 91%, 92%, 93%, 94%, 95%, 96%, 97%, 98%, 99% or 100% sequence identity to SEQ ID NO: 1274. In some embodiments, the one or more non-coding RNAs detected in a sample comprise at least about 70%, 75%, 80%, 85%, 90%, 91%, 92%, 93%, 94%, 95%, 96%, 97%, 98%, 99% or 100% sequence identity to SEQ ID NO: 1275. In some embodiments, the one or more non-coding RNAs detected in a sample comprise at least about 70%, 75%, 80%, 85%, 90%, 91%, 92%, 93%, 94%, 95%, 96%, 97%, 98%, 99% or 100% sequence identity to SEQ ID NO: 1276. In some embodiments, the one or more non-coding RNAs detected in a sample comprise at least about 70%, 75%, 80%, 85%, 90%, 91%, 92%, 93%, 94%, 95%, 96%, 97%, 98%, 99% or 100% sequence identity to SEQ ID NO: 1277. In some embodiments, the one or more non-coding RNAs detected in a sample comprise at least about 70%, 75%, 80%, 85%, 90%, 91%, 92%, 93%, 94%, 95%, 96%, 97%, 98%, 99% or 100% sequence identity to SEQ ID NO: 1278. In some embodiments, the one or more non-coding RNAs detected in a sample comprise at least about 70%, 75%, 80%, 85%, 90%, 91%, 92%, 93%, 94%, 95%, 96%, 97%, 98%, 99% or 100% sequence identity to SEQ ID NO: 1279. In some embodiments, the one or more non-coding RNAs detected in a sample comprise at least about 70%, 75%, 80%, 85%, 90%, 91%, 92%, 93%, 94%, 95%, 96%, 97%, 98%, 99% or 100% sequence identity to SEQ ID NO: 1280. In some embodiments, the one or more non-coding RNAs detected in a sample comprise at least about 70%, 75%, 80%, 85%, 90%, 91%, 92%, 93%, 94%, 95%, 96%, 97%, 98%, 99% or 100% sequence identity to SEQ ID NO: 1281. In some embodiments, the one or more non-coding RNAs detected in a sample comprise at least about 70%, 75%, 80%, 85%, 90%, 91%, 92%, 93%, 94%, 95%, 96%, 97%, 98%, 99% or 100% sequence identity to SEQ ID NO: 1282. In some embodiments, the one or more non-coding RNAs detected in a sample comprise at least about 70%, 75%, 80%, 85%, 90%, 91%, 92%, 93%, 94%, 95%, 96%, 97%, 98%, 99% or 100% sequence identity to SEQ ID NO: 1283. In some embodiments, the one or more non-coding RNAs detected in a sample comprise at least about 70%, 75%, 80%, 85%, 90%, 91%, 92%, 93%, 94%, 95%, 96%, 97%, 98%, 99% or 100% sequence identity to SEQ ID NO: 1284. In some embodiments, the one or more non-coding RNAs detected in a sample comprise at least about 70%, 75%, 80%, 85%, 90%, 91%, 92%, 93%, 94%, 95%, 96%, 97%, 98%, 99% or 100% sequence identity to SEQ ID NO: 1285. In some embodiments, the one or more non-coding RNAs detected in a sample comprise at least about 70%, 75%, 80%, 85%, 90%, 91%, 92%, 93%, 94%, 95%, 96%, 97%, 98%, 99% or 100% sequence identity to SEQ ID NO: 1286. In some embodiments, the one or more non-coding RNAs detected in a sample comprise at least about 70%, 75%, 80%, 85%, 90%, 91%, 92%, 93%, 94%, 95%, 96%, 97%, 98%, 99% or 100% sequence identity to SEQ ID NO: 1287. In some embodiments, the one or more non-coding RNAs detected in a sample comprise at least about 70%, 75%, 80%, 85%, 90%, 91%, 92%, 93%, 94%, 95%, 96%, 97%, 98%, 99% or 100% sequence identity to SEQ ID NO: 1288. In some embodiments, the one or more non-coding RNAs detected in a sample comprise at least about 70%, 75%, 80%, 85%, 90%, 91%, 92%, 93%, 94%, 95%, 96%, 97%, 98%, 99% or 100% sequence identity to SEQ ID NO: 1289. In some embodiments, the one or more non-coding RNAs detected in a sample comprise at least about 70%, 75%, 80%, 85%, 90%, 91%, 92%, 93%, 94%, 95%, 96%, 97%, 98%, 99% or 100% sequence identity to SEQ ID NO: 1290. In some embodiments, the one or more non-coding RNAs detected in a sample comprise at least about 70%, 75%, 80%, 85%, 90%, 91%, 92%, 93%, 94%, 95%, 96%, 97%, 98%, 99% or 100% sequence identity to SEQ ID NO: 1291. In some embodiments, the one or more non-coding RNAs detected in a sample comprise at least about 70%, 75%, 80%, 85%, 90%, 91%, 92%, 93%, 94%, 95%, 96%, 97%, 98%, 99% or 100% sequence identity to SEQ ID NO: 1292. In some embodiments, the one or more non-coding RNAs detected in a sample comprise at least about 70%, 75%, 80%, 85%, 90%, 91%, 92%, 93%, 94%, 95%, 96%, 97%, 98%, 99% or 100% sequence identity to SEQ ID NO: 1293. In some embodiments, the one or more non-coding RNAs detected in a sample comprise at least about 70%, 75%, 80%, 85%, 90%, 91%, 92%, 93%, 94%, 95%, 96%, 97%, 98%, 99% or 100% sequence identity to SEQ ID NO: 1294. In some embodiments, the one or more non-coding RNAs detected in a sample comprise at least about 70%, 75%, 80%, 85%, 90%, 91%, 92%, 93%, 94%, 95%, 96%, 97%, 98%, 99% or 100% sequence identity to SEQ ID NO: 1295. In some embodiments, the one or more non-coding RNAs detected in a sample comprise at least about 70%, 75%, 80%, 85%, 90%, 91%, 92%, 93%, 94%, 95%, 96%, 97%, 98%, 99% or 100% sequence identity to SEQ ID NO: 1296. In some embodiments, the one or more non-coding RNAs detected in a sample comprise at least about 70%, 75%, 80%, 85%, 90%, 91%, 92%, 93%, 94%, 95%, 96%, 97%, 98%, 99% or 100% sequence identity to SEQ ID NO: 1297. In some embodiments, the one or more non-coding RNAs detected in a sample comprise at least about 70%, 75%, 80%, 85%, 90%, 91%, 92%, 93%, 94%, 95%, 96%, 97%, 98%, 99% or 100% sequence identity to SEQ ID NO: 1298. In some embodiments, the one or more non-coding RNAs detected in a sample comprise at least about 70%, 75%, 80%, 85%, 90%, 91%, 92%, 93%, 94%, 95%, 96%, 97%, 98%, 99% or 100% sequence identity to SEQ ID NO: 1299. In some embodiments, the one or more non-coding RNAs detected in a sample comprise at least about 70%, 75%, 80%, 85%, 90%, 91%, 92%, 93%, 94%, 95%, 96%, 97%, 98%, 99% or 100% sequence identity to SEQ ID NO: 1300. In some embodiments, the one or more non-coding RNAs detected in a sample comprise at least about 70%, 75%, 80%, 85%, 90%, 91%, 92%, 93%, 94%, 95%, 96%, 97%, 98%, 99% or 100% sequence identity to SEQ ID NO: 1301. In some embodiments, the one or more non-coding RNAs detected in a sample comprise at least about 70%, 75%, 80%, 85%, 90%, 91%, 92%, 93%, 94%, 95%, 96%, 97%, 98%, 99% or 100% sequence identity to SEQ ID NO: 1302. In some embodiments, the one or more non-coding RNAs detected in a sample comprise at least about 70%, 75%, 80%, 85%, 90%, 91%, 92%, 93%, 94%, 95%, 96%, 97%, 98%, 99% or 100% sequence identity to SEQ ID NO: 1303. In some embodiments, the one or more non-coding RNAs detected in a sample comprise at least about 70%, 75%, 80%, 85%, 90%, 91%, 92%, 93%, 94%, 95%, 96%, 97%, 98%, 99% or 100% sequence identity to SEQ ID NO: 1304. In some embodiments, the one or more non-coding RNAs detected in a sample comprise at least about 70%, 75%, 80%, 85%, 90%, 91%, 92%, 93%, 94%, 95%, 96%, 97%, 98%, 99% or 100% sequence identity to SEQ ID NO: 1305. In some embodiments, the one or more non-coding RNAs detected in a sample comprise at least about 70%, 75%, 80%, 85%, 90%, 91%, 92%, 93%, 94%, 95%, 96%, 97%, 98%, 99% or 100% sequence identity to SEQ ID NO: 1306. In some embodiments, the one or more non-coding RNAs detected in a sample comprise at least about 70%, 75%, 80%, 85%, 90%, 91%, 92%, 93%, 94%, 95%, 96%, 97%, 98%, 99% or 100% sequence identity to SEQ ID NO: 1307. In some embodiments, the one or more non-coding RNAs detected in a sample comprise at least about 70%, 75%, 80%, 85%, 90%, 91%, 92%, 93%, 94%, 95%, 96%, 97%, 98%, 99% or 100% sequence identity to SEQ ID NO: 1308. In some embodiments, the one or more non-coding RNAs detected in a sample comprise at least about 70%, 75%, 80%, 85%, 90%, 91%, 92%, 93%, 94%, 95%, 96%, 97%, 98%, 99% or 100% sequence identity to SEQ ID NO: 1309. In some embodiments, the one or more non-coding RNAs detected in a sample comprise at least about 70%, 75%, 80%, 85%, 90%, 91%, 92%, 93%, 94%, 95%, 96%, 97%, 98%, 99% or 100% sequence identity to SEQ ID NO: 1310. In some embodiments, the one or more non-coding RNAs detected in a sample comprise at least about 70%, 75%, 80%, 85%, 90%, 91%, 92%, 93%, 94%, 95%, 96%, 97%, 98%, 99% or 100% sequence identity to SEQ ID NO: 1311. In some embodiments, the one or more non-coding RNAs detected in a sample comprise at least about 70%, 75%, 80%, 85%, 90%, 91%, 92%, 93%, 94%, 95%, 96%, 97%, 98%, 99% or 100% sequence identity to SEQ ID NO: 1312. In some embodiments, the one or more non-coding RNAs detected in a sample comprise at least about 70%, 75%, 80%, 85%, 90%, 91%, 92%, 93%, 94%, 95%, 96%, 97%, 98%, 99% or 100% sequence identity to SEQ ID NO: 1313. In some embodiments, the one or more non-coding RNAs detected in a sample comprise at least about 70%, 75%, 80%, 85%, 90%, 91%, 92%, 93%, 94%, 95%, 96%, 97%, 98%, 99% or 100% sequence identity to SEQ ID NO: 1314. In some embodiments, the one or more non-coding RNAs detected in a sample comprise at least about 70%, 75%, 80%, 85%, 90%, 91%, 92%, 93%, 94%, 95%, 96%, 97%, 98%, 99% or 100% sequence identity to SEQ ID NO: 1315. In some embodiments, the one or more non-coding RNAs detected in a sample comprise at least about 70%, 75%, 80%, 85%, 90%, 91%, 92%, 93%, 94%, 95%, 96%, 97%, 98%, 99% or 100% sequence identity to SEQ ID NO: 1316. In some embodiments, the one or more non-coding RNAs detected in a sample comprise at least about 70%, 75%, 80%, 85%, 90%, 91%, 92%, 93%, 94%, 95%, 96%, 97%, 98%, 99% or 100% sequence identity to SEQ ID NO: 1317. In some embodiments, the one or more non-coding RNAs detected in a sample comprise at least about 70%, 75%, 80%, 85%, 90%, 91%, 92%, 93%, 94%, 95%, 96%, 97%, 98%, 99% or 100% sequence identity to SEQ ID NO: 1318. In some embodiments, the one or more non-coding RNAs detected in a sample comprise at least about 70%, 75%, 80%, 85%, 90%, 91%, 92%, 93%, 94%, 95%, 96%, 97%, 98%, 99% or 100% sequence identity to SEQ ID NO: 1319. In some embodiments, the one or more non-coding RNAs detected in a sample comprise at least about 70%, 75%, 80%, 85%, 90%, 91%, 92%, 93%, 94%, 95%, 96%, 97%, 98%, 99% or 100% sequence identity to SEQ ID NO: 1320. In some embodiments, the one or more non-coding RNAs detected in a sample comprise at least about 70%, 75%, 80%, 85%, 90%, 91%, 92%, 93%, 94%, 95%, 96%, 97%, 98%, 99% or 100% sequence identity to SEQ ID NO: 1321. In some embodiments, the one or more non-coding RNAs detected in a sample comprise at least about 70%, 75%, 80%, 85%, 90%, 91%, 92%, 93%, 94%, 95%, 96%, 97%, 98%, 99% or 100% sequence identity to SEQ ID NO: 1322. In some embodiments, the one or more non-coding RNAs detected in a sample comprise at least about 70%, 75%, 80%, 85%, 90%, 91%, 92%, 93%, 94%, 95%, 96%, 97%, 98%, 99% or 100% sequence identity to SEQ ID NO: 1323. In some embodiments, the one or more non-coding RNAs detected in a sample comprise at least about 70%, 75%, 80%, 85%, 90%, 91%, 92%, 93%, 94%, 95%, 96%, 97%, 98%, 99% or 100% sequence identity to SEQ ID NO: 1324. In some embodiments, the one or more non-coding RNAs detected in a sample comprise at least about 70%, 75%, 80%, 85%, 90%, 91%, 92%, 93%, 94%, 95%, 96%, 97%, 98%, 99% or 100% sequence identity to SEQ ID NO: 1325. In some embodiments, the one or more non-coding RNAs detected in a sample comprise at least about 70%, 75%, 80%, 85%, 90%, 91%, 92%, 93%, 94%, 95%, 96%, 97%, 98%, 99% or 100% sequence identity to SEQ ID NO: 1326. In some embodiments, the one or more non-coding RNAs detected in a sample comprise at least about 70%, 75%, 80%, 85%, 90%, 91%, 92%, 93%, 94%, 95%, 96%, 97%, 98%, 99% or 100% sequence identity to SEQ ID NO: 1327. In some embodiments, the one or more non-coding RNAs detected in a sample comprise at least 70%, 75%, 80%, 85%, 90%, 91%, 92%, 93%, 94%, 95%, 96%, 97%, 98%, 99% or 100% sequence identity to SEQ ID NO: 1328. In some embodiments, the one or more non-coding RNAs detected in a sample comprise at least about 70%, 75%, 80%, 85%, 90%, 91%, 92%, 93%, 94%, 95%, 96%, 97%, 98%, 99% or 100% sequence identity to SEQ ID NO: 1329. In some embodiments, the one or more non-coding RNAs detected in a sample comprise at least about 70%, 75%, 80%, 85%, 90%, 91%, 92%, 93%, 94%, 95%, 96%, 97%, 98%, 99% or 100% sequence identity to SEQ ID NO: 1330. In some embodiments, the one or more non-coding RNAs detected in a sample comprise at least about 70%, 75%, 80%, 85%, 90%, 91%, 92%, 93%, 94%, 95%, 96%, 97%, 98%, 99% or 100% sequence identity to SEQ ID NO: 1331. In some embodiments, the one or more non-coding RNAs detected in a sample comprise at least about 70%, 75%, 80%, 85%, 90%, 91%, 92%, 93%, 94%, 95%, 96%, 97%, 98%, 99% or 100% sequence identity to SEQ ID NO: 1332. In some embodiments, the one or more non-coding RNAs detected in a sample comprise at least about 70%, 75%, 80%, 85%, 90%, 91%, 92%, 93%, 94%, 95%, 96%, 97%, 98%, 99% or 100% sequence identity to SEQ ID NO: 1333. In some embodiments, the one or more non-coding RNAs detected in a sample comprise at least about 70%, 75%, 80%, 85%, 90%, 91%, 92%, 93%, 94%, 95%, 96%, 97%, 98%, 99% or 100% sequence identity to SEQ ID NO: 1334. In some embodiments, the one or more non-coding RNAs detected in a sample comprise at least about 70%, 75%, 80%, 85%, 90%, 91%, 92%, 93%, 94%, 95%, 96%, 97%, 98%, 99% or 100% sequence identity to SEQ ID NO: 1335. In some embodiments, the one or more non-coding RNAs detected in a sample comprise at least about 70%, 75%, 80%, 85%, 90%, 91%, 92%, 93%, 94%, 95%, 96%, 97%, 98%, 99% or 100% sequence identity to SEQ ID NO: 1336. In some embodiments, the one or more non-coding RNAs detected in a sample comprise at least about 70%, 75%, 80%, 85%, 90%, 91%, 92%, 93%, 94%, 95%, 96%, 97%, 98%, 99% or 100% sequence identity to SEQ ID NO: 1337. In some embodiments, the one or more non-coding RNAs detected in a sample comprise at least about 70%, 75%, 80%, 85%, 90%, 91%, 92%, 93%, 94%, 95%, 96%, 97%, 98%, 99% or 100% sequence identity to SEQ ID NO: 1338. In some embodiments, the one or more non-coding RNAs detected in a sample comprise at least about 70%, 75%, 80%, 85%, 90%, 91%, 92%, 93%, 94%, 95%, 96%, 97%, 98%, 99% or 100% sequence identity to SEQ ID NO: 1339. In some embodiments, the one or more non-coding RNAs detected in a sample comprise at least about 70%, 75%, 80%, 85%, 90%, 91%, 92%, 93%, 94%, 95%, 96%, 97%, 98%, 99% or 100% sequence identity to SEQ ID NO: 1340. In some embodiments, the one or more non-coding RNAs detected in a sample comprise at least about 70%, 75%, 80%, 85%, 90%, 91%, 92%, 93%, 94%, 95%, 96%, 97%, 98%, 99% or 100% sequence identity to SEQ ID NO: 1341. In some embodiments, the one or more non-coding RNAs detected in a sample comprise at least about 70%, 75%, 80%, 85%, 90%, 91%, 92%, 93%, 94%, 95%, 96%, 97%, 98%, 99% or 100% sequence identity to SEQ ID NO: 1342. In some embodiments, the one or more non-coding RNAs detected in a sample comprise at least about 70%, 75%, 80%, 85%, 90%, 91%, 92%, 93%, 94%, 95%, 96%, 97%, 98%, 99% or 100% sequence identity to SEQ ID NO: 1343. In some embodiments, the one or more non-coding RNAs detected in a sample comprise at least about 70%, 75%, 80%, 85%, 90%, 91%, 92%, 93%, 94%, 95%, 96%, 97%, 98%, 99% or 100% sequence identity to SEQ ID NO: 1344. In some embodiments, the one or more non-coding RNAs detected in a sample comprise at least about 70%, 75%, 80%, 85%, 90%, 91%, 92%, 93%, 94%, 95%, 96%, 97%, 98%, 99% or 100% sequence identity to SEQ ID NO: 1345. In some embodiments, the one or more non-coding RNAs detected in a sample comprise at least about 70%, 75%, 80%, 85%, 90%, 91%, 92%, 93%, 94%, 95%, 96%, 97%, 98%, 99% or 100% sequence identity to SEQ ID NO: 1346. In some embodiments, the one or more non-coding RNAs detected in a sample comprise at least about 70%, 75%, 80%, 85%, 90%, 91%, 92%, 93%, 94%, 95%, 96%, 97%, 98%, 99% or 100% sequence identity to SEQ ID NO: 1347. In some embodiments, the one or more non-coding RNAs detected in a sample comprise at least about 70%, 75%, 80%, 85%, 90%, 91%, 92%, 93%, 94%, 95%, 96%, 97%, 98%, 99% or 100% sequence identity to SEQ ID NO: 1348. In some embodiments, the one or more non-coding RNAs detected in a sample comprise at least about 70%, 75%, 80%, 85%, 90%, 91%, 92%, 93%, 94%, 95%, 96%, 97%, 98%, 99% or 100% sequence identity to SEQ ID NO: 1349. In some embodiments, the one or more non-coding RNAs detected in a sample comprise at least about 70%, 75%, 80%, 85%, 90%, 91%, 92%, 93%, 94%, 95%, 96%, 97%, 98%, 99% or 100% sequence identity to SEQ ID NO: 1350. In some embodiments, the one or more non-coding RNAs detected in a sample comprise at least about 70%, 75%, 80%, 85%, 90%, 91%, 92%, 93%, 94%, 95%, 96%, 97%, 98%, 99% or 100% sequence identity to SEQ ID NO: 1351. In some embodiments, the one or more non-coding RNAs detected in a sample comprise at least about 70%, 75%, 80%, 85%, 90%, 91%, 92%, 93%, 94%, 95%, 96%, 97%, 98%, 99% or 100% sequence identity to SEQ ID NO: 1352. In some embodiments, the one or more non-coding RNAs detected in a sample comprise at least about 70%, 75%, 80%, 85%, 90%, 91%, 92%, 93%, 94%, 95%, 96%, 97%, 98%, 99% or 100% sequence identity to SEQ ID NO: 1353. In some embodiments, the one or more non-coding RNAs detected in a sample comprise at least about 70%, 75%, 80%, 85%, 90%, 91%, 92%, 93%, 94%, 95%, 96%, 97%, 98%, 99% or 100% sequence identity to SEQ ID NO: 1354. In some embodiments, the one or more non-coding RNAs detected in a sample comprise at least about 70%, 75%, 80%, 85%, 90%, 91%, 92%, 93%, 94%, 95%, 96%, 97%, 98%, 99% or 100% sequence identity to SEQ ID NO: 1355. In some embodiments, the one or more non-coding RNAs detected in a sample comprise at least about 70%, 75%, 80%, 85%, 90%, 91%, 92%, 93%, 94%, 95%, 96%, 97%, 98%, 99% or 100% sequence identity to SEQ ID NO: 1356. In some embodiments, the one or more non-coding RNAs detected in a sample comprise at least about 70%, 75%, 80%, 85%, 90%, 91%, 92%, 93%, 94%, 95%, 96%, 97%, 98%, 99% or 100% sequence identity to SEQ ID NO: 1357. In some embodiments, the one or more non-coding RNAs detected in a sample comprise at least about 70%, 75%, 80%, 85%, 90%, 91%, 92%, 93%, 94%, 95%, 96%, 97%, 98%, 99% or 100% sequence identity to SEQ ID NO: 1358. In some embodiments, the one or more non-coding RNAs detected in a sample comprise at least about 70%, 75%, 80%, 85%, 90%, 91%, 92%, 93%, 94%, 95%, 96%, 97%, 98%, 99% or 100% sequence identity to SEQ ID NO: 1359. In some embodiments, the one or more non-coding RNAs detected in a sample comprise at least about 70%, 75%, 80%, 85%, 90%, 91%, 92%, 93%, 94%, 95%, 96%, 97%, 98%, 99% or 100% sequence identity to SEQ ID NO: 1360. In some embodiments, the one or more non-coding RNAs detected in a sample comprise at least about 70%, 75%, 80%, 85%, 90%, 91%, 92%, 93%, 94%, 95%, 96%, 97%, 98%, 99% or 100% sequence identity to SEQ ID NO: 1361. In some embodiments, the one or more non-coding RNAs detected in a sample comprise at least about 70%, 75%, 80%, 85%, 90%, 91%, 92%, 93%, 94%, 95%, 96%, 97%, 98%, 99% or 100% sequence identity to SEQ ID NO: 1362. In some embodiments, the one or more non-coding RNAs detected in a sample comprise at least about 70%, 75%, 80%, 85%, 90%, 91%, 92%, 93%, 94%, 95%, 96%, 97%, 98%, 99% or 100% sequence identity to SEQ ID NO: 1363. In some embodiments, the one or more non-coding RNAs detected in a sample comprise at least about 70%, 75%, 80%, 85%, 90%, 91%, 92%, 93%, 94%, 95%, 96%, 97%, 98%, 99% or 100% sequence identity to SEQ ID NO: 1364. In some embodiments, the one or more non-coding RNAs detected in a sample comprise at least about 70%, 75%, 80%, 85%, 90%, 91%, 92%, 93%, 94%, 95%, 96%, 97%, 98%, 99% or 100% sequence identity to SEQ ID NO: 1365. In some embodiments, the one or more non-coding RNAs detected in a sample comprise at least about 70%, 75%, 80%, 85%, 90%, 91%, 92%, 93%, 94%, 95%, 96%, 97%, 98%, 99% or 100% sequence identity to SEQ ID NO: 1366. In some embodiments, the one or more non-coding RNAs detected in a sample comprise at least about 70%, 75%, 80%, 85%, 90%, 91%, 92%, 93%, 94%, 95%, 96%, 97%, 98%, 99% or 100% sequence identity to SEQ ID NO: 1367. In some embodiments, the one or more non-coding RNAs detected in a sample comprise at least about 70%, 75%, 80%, 85%, 90%, 91%, 92%, 93%, 94%, 95%, 96%, 97%, 98%, 99% or 100% sequence identity to SEQ ID NO: 1368. In some embodiments, the one or more non-coding RNAs detected in a sample comprise at least about 70%, 75%, 80%, 85%, 90%, 91%, 92%, 93%, 94%, 95%, 96%, 97%, 98%, 99% or 100% sequence identity to SEQ ID NO: 1369. In some embodiments, the one or more non-coding RNAs detected in a sample comprise at least about 70%, 75%, 80%, 85%, 90%, 91%, 92%, 93%, 94%, 95%, 96%, 97%, 98%, 99% or 100% sequence identity to SEQ ID NO: 1370. In some embodiments, the one or more non-coding RNAs detected in a sample comprise at least about 70%, 75%, 80%, 85%, 90%, 91%, 92%, 93%, 94%, 95%, 96%, 97%, 98%, 99% or 100% sequence identity to SEQ ID NO: 1371. In some embodiments, the one or more non-coding RNAs detected in a sample comprise at least about 70%, 75%, 80%, 85%, 90%, 91%, 92%, 93%, 94%, 95%, 96%, 97%, 98%, 99% or 100% sequence identity to SEQ ID NO: 1372. In some embodiments, the one or more non-coding RNAs detected in a sample comprise at least about 70%, 75%, 80%, 85%, 90%, 91%, 92%, 93%, 94%, 95%, 96%, 97%, 98%, 99% or 100% sequence identity to SEQ ID NO: 1373. In some embodiments, the one or more non-coding RNAs detected in a sample comprise at least about 70%, 75%, 80%, 85%, 90%, 91%, 92%, 93%, 94%, 95%, 96%, 97%, 98%, 99% or 100% sequence identity to SEQ ID NO: 1374. In some embodiments, the one or more non-coding RNAs detected in a sample comprise at least about 70%, 75%, 80%, 85%, 90%, 91%, 92%, 93%, 94%, 95%, 96%, 97%, 98%, 99% or 100% sequence identity to SEQ ID NO: 1375. In some embodiments, the one or more non-coding RNAs detected in a sample comprise at least about 70%, 75%, 80%, 85%, 90%, 91%, 92%, 93%, 94%, 95%, 96%, 97%, 98%, 99% or 100% sequence identity to SEQ ID NO: 1376. In some embodiments, the one or more non-coding RNAs detected in a sample comprise at least about 70%, 75%, 80%, 85%, 90%, 91%, 92%, 93%, 94%, 95%, 96%, 97%, 98%, 99% or 100% sequence identity to SEQ ID NO: 1377. In some embodiments, the one or more non-coding RNAs detected in a sample comprise at least about 70%, 75%, 80%, 85%, 90%, 91%, 92%, 93%, 94%, 95%, 96%, 97%, 98%, 99% or 100% sequence identity to SEQ ID NO: 1378. In some embodiments, the one or more non-coding RNAs detected in a sample comprise at least about 70%, 75%, 80%, 85%, 90%, 91%, 92%, 93%, 94%, 95%, 96%, 97%, 98%, 99% or 100% sequence identity to SEQ ID NO: 1379. In some embodiments, the one or more non-coding RNAs detected in a sample comprise at least about 70%, 75%, 80%, 85%, 90%, 91%, 92%, 93%, 94%, 95%, 96%, 97%, 98%, 99% or 100% sequence identity to SEQ ID NO: 1380. In some embodiments, the one or more non-coding RNAs detected in a sample comprise at least about 70%, 75%, 80%, 85%, 90%, 91%, 92%, 93%, 94%, 95%, 96%, 97%, 98%, 99% or 100% sequence identity to SEQ ID NO: 1381. In some embodiments, the one or more non-coding RNAs detected in a sample comprise at least about 70%, 75%, 80%, 85%, 90%, 91%, 92%, 93%, 94%, 95%, 96%, 97%, 98%, 99% or 100% sequence identity to SEQ ID NO: 1382. In some embodiments, the one or more non-coding RNAs detected in a sample comprise at least about 70%, 75%, 80%, 85%, 90%, 91%, 92%, 93%, 94%, 95%, 96%, 97%, 98%, 99% or 100% sequence identity to SEQ ID NO: 1383. In some embodiments, the one or more non-coding RNAs detected in a sample comprise at least about 70%, 75%, 80%, 85%, 90%, 91%, 92%, 93%, 94%, 95%, 96%, 97%, 98%, 99% or 100% sequence identity to SEQ ID NO: 1384. In some embodiments, the one or more non-coding RNAs detected in a sample comprise at least about 70%, 75%, 80%, 85%, 90%, 91%, 92%, 93%, 94%, 95%, 96%, 97%, 98%, 99% or 100% sequence identity to SEQ ID NO: 1385. In some embodiments, the one or more non-coding RNAs detected in a sample comprise at least about 70%, 75%, 80%, 85%, 90%, 91%, 92%, 93%, 94%, 95%, 96%, 97%, 98%, 99% or 100% sequence identity to SEQ ID NO: 1386. In some embodiments, the one or more non-coding RNAs detected in a sample comprise at least about 70%, 75%, 80%, 85%, 90%, 91%, 92%, 93%, 94%, 95%, 96%, 97%, 98%, 99% or 100% sequence identity to SEQ ID NO: 1387. In some embodiments, the one or more non-coding RNAs detected in a sample comprise at least about 70%, 75%, 80%, 85%, 90%, 91%, 92%, 93%, 94%, 95%, 96%, 97%, 98%, 99% or 100% sequence identity to SEQ ID NO: 1388. In some embodiments, the one or more non-coding RNAs detected in a sample comprise at least about 70%, 75%, 80%, 85%, 90%, 91%, 92%, 93%, 94%, 95%, 96%, 97%, 98%, 99% or 100% sequence identity to SEQ ID NO: 1389. In some embodiments, the one or more non-coding RNAs detected in a sample comprise at least about 70%, 75%, 80%, 85%, 90%, 91%, 92%, 93%, 94%, 95%, 96%, 97%, 98%, 99% or 100% sequence identity to SEQ ID NO: 1390. In some embodiments, the one or more non-coding RNAs detected in a sample comprise at least about 70%, 75%, 80%, 85%, 90%, 91%, 92%, 93%, 94%, 95%, 96%, 97%, 98%, 99% or 100% sequence identity to SEQ ID NO: 1391. In some embodiments, the one or more non-coding RNAs detected in a sample comprise at least about 70%, 75%, 80%, 85%, 90%, 91%, 92%, 93%, 94%, 95%, 96%, 97%, 98%, 99% or 100% sequence identity to SEQ ID NO: 1392. In some embodiments, the one or more non-coding RNAs detected in a sample comprise at least about 70%, 75%, 80%, 85%, 90%, 91%, 92%, 93%, 94%, 95%, 96%, 97%, 98%, 99% or 100% sequence identity to SEQ ID NO: 1393. In some embodiments, the one or more non-coding RNAs detected in a sample comprise at least about 70%, 75%, 80%, 85%, 90%, 91%, 92%, 93%, 94%, 95%, 96%, 97%, 98%, 99% or 100% sequence identity to SEQ ID NO: 1394. In some embodiments, the one or more non-coding RNAs detected in a sample comprise at least about 70%, 75%, 80%, 85%, 90%, 91%, 92%, 93%, 94%, 95%, 96%, 97%, 98%, 99% or 100% sequence identity to SEQ ID NO: 1395. In some embodiments, the one or more non-coding RNAs detected in a sample comprise at least about 70%, 75%, 80%, 85%, 90%, 91%, 92%, 93%, 94%, 95%, 96%, 97%, 98%, 99% or 100% sequence identity to SEQ ID NO: 1396. In some embodiments, the one or more non-coding RNAs detected in a sample comprise at least about 70%, 75%, 80%, 85%, 90%, 91%, 92%, 93%, 94%, 95%, 96%, 97%, 98%, 99% or 100% sequence identity to SEQ ID NO: 1397. In some embodiments, the one or more non-coding RNAs detected in a sample comprise at least about 70%, 75%, 80%, 85%, 90%, 91%, 92%, 93%, 94%, 95%, 96%, 97%, 98%, 99% or 100% sequence identity to SEQ ID NO: 1398. In some embodiments, the one or more non-coding RNAs detected in a sample comprise at least about 70%, 75%, 80%, 85%, 90%, 91%, 92%, 93%, 94%, 95%, 96%, 97%, 98%, 99% or 100% sequence identity to SEQ ID NO: 1399. In some embodiments, the one or more non-coding RNAs detected in a sample comprise at least about 70%, 75%, 80%, 85%, 90%, 91%, 92%, 93%, 94%, 95%, 96%, 97%, 98%, 99% or 100% sequence identity to SEQ ID NO: 1400. In some embodiments, the one or more non-coding RNAs detected in a sample comprise at least about 70%, 75%, 80%, 85%, 90%, 91%, 92%, 93%, 94%, 95%, 96%, 97%, 98%, 99% or 100% sequence identity to SEQ ID NO: 1401. In some embodiments, the one or more non-coding RNAs detected in a sample comprise at least about 70%, 75%, 80%, 85%, 90%, 91%, 92%, 93%, 94%, 95%, 96%, 97%, 98%, 99% or 100% sequence identity to SEQ ID NO: 1402. In some embodiments, the one or more non-coding RNAs detected in a sample comprise at least about 70%, 75%, 80%, 85%, 90%, 91%, 92%, 93%, 94%, 95%, 96%, 97%, 98%, 99% or 100% sequence identity to SEQ ID NO: 1403. In some embodiments, the one or more non-coding RNAs detected in a sample comprise at least about 70%, 75%, 80%, 85%, 90%, 91%, 92%, 93%, 94%, 95%, 96%, 97%, 98%, 99% or 100% sequence identity to SEQ ID NO: 1404. In some embodiments, the one or more non-coding RNAs detected in a sample comprise at least about 70%, 75%, 80%, 85%, 90%, 91%, 92%, 93%, 94%, 95%, 96%, 97%, 98%, 99% or 100% sequence identity to SEQ ID NO: 1405. In some embodiments, the one or more non-coding RNAs detected in a sample comprise at least about 70%, 75%, 80%, 85%, 90%, 91%, 92%, 93%, 94%, 95%, 96%, 97%, 98%, 99% or 100% sequence identity to SEQ ID NO: 1406. In some embodiments, the one or more non-coding RNAs detected in a sample comprise at least about 70%, 75%, 80%, 85%, 90%, 91%, 92%, 93%, 94%, 95%, 96%, 97%, 98%, 99% or 100% sequence identity to SEQ ID NO: 1407. In some embodiments, the one or more non-coding RNAs detected in a sample comprise at least about 70%, 75%, 80%, 85%, 90%, 91%, 92%, 93%, 94%, 95%, 96%, 97%, 98%, 99% or 100% sequence identity to SEQ ID NO: 1408. In some embodiments, the one or more non-coding RNAs detected in a sample comprise at least about 70%, 75%, 80%, 85%, 90%, 91%, 92%, 93%, 94%, 95%, 96%, 97%, 98%, 99% or 100% sequence identity to SEQ ID NO: 1409. In some embodiments, the one or more non-coding RNAs detected in a sample comprise at least about 70%, 75%, 80%, 85%, 90%, 91%, 92%, 93%, 94%, 95%, 96%, 97%, 98%, 99% or 100% sequence identity to SEQ ID NO: 1410. In some embodiments, the one or more non-coding RNAs detected in a sample comprise at least about 70%, 75%, 80%, 85%, 90%, 91%, 92%, 93%, 94%, 95%, 96%, 97%, 98%, 99% or 100% sequence identity to SEQ ID NO: 1411. In some embodiments, the one or more non-coding RNAs detected in a sample comprise at least about 70%, 75%, 80%, 85%, 90%, 91%, 92%, 93%, 94%, 95%, 96%, 97%, 98%, 99% or 100% sequence identity to SEQ ID NO: 1412. In some embodiments, the one or more non-coding RNAs detected in a sample comprise at least about 70%, 75%, 80%, 85%, 90%, 91%, 92%, 93%, 94%, 95%, 96%, 97%, 98%, 99% or 100% sequence identity to SEQ ID NO: 1413. In some embodiments, the one or more non-coding RNAs detected in a sample comprise at least about 70%, 75%, 80%, 85%, 90%, 91%, 92%, 93%, 94%, 95%, 96%, 97%, 98%, 99% or 100% sequence identity to SEQ ID NO: 1414. In some embodiments, the one or more non-coding RNAs detected in a sample comprise at least about 70%, 75%, 80%, 85%, 90%, 91%, 92%, 93%, 94%, 95%, 96%, 97%, 98%, 99% or 100% sequence identity to SEQ ID NO: 1415. In some embodiments, the one or more non-coding RNAs detected in a sample comprise at least about 70%, 75%, 80%, 85%, 90%, 91%, 92%, 93%, 94%, 95%, 96%, 97%, 98%, 99% or 100% sequence identity to SEQ ID NO: 1416. In some embodiments, the one or more non-coding RNAs detected in a sample comprise at least about 70%, 75%, 80%, 85%, 90%, 91%, 92%, 93%, 94%, 95%, 96%, 97%, 98%, 99% or 100% sequence identity to SEQ ID NO: 1417. In some embodiments, the one or more non-coding RNAs detected in a sample comprise at least about 70%, 75%, 80%, 85%, 90%, 91%, 92%, 93%, 94%, 95%, 96%, 97%, 98%, 99% or 100% sequence identity to SEQ ID NO: 1418. In some embodiments, the one or more non-coding RNAs detected in a sample comprise at least about 70%, 75%, 80%, 85%, 90%, 91%, 92%, 93%, 94%, 95%, 96%, 97%, 98%, 99% or 100% sequence identity to SEQ ID NO: 1419. In some embodiments, the one or more non-coding RNAs detected in a sample comprise at least about 70%, 75%, 80%, 85%, 90%, 91%, 92%, 93%, 94%, 95%, 96%, 97%, 98%, 99% or 100% sequence identity to SEQ ID NO: 1420. In some embodiments, the one or more non-coding RNAs detected in a sample comprise at least about 70%, 75%, 80%, 85%, 90%, 91%, 92%, 93%, 94%, 95%, 96%, 97%, 98%, 99% or 100% sequence identity to SEQ ID NO: 1421. In some embodiments, the one or more non-coding RNAs detected in a sample comprise at least about 70%, 75%, 80%, 85%, 90%, 91%, 92%, 93%, 94%, 95%, 96%, 97%, 98%, 99% or 100% sequence identity to SEQ ID NO: 1422. In some embodiments, the one or more non-coding RNAs detected in a sample comprise at least about 70%, 75%, 80%, 85%, 90%, 91%, 92%, 93%, 94%, 95%, 96%, 97%, 98%, 99% or 100% sequence identity to SEQ ID NO: 1423. In some embodiments, the one or more non-coding RNAs detected in a sample comprise at least about 70%, 75%, 80%, 85%, 90%, 91%, 92%, 93%, 94%, 95%, 96%, 97%, 98%, 99% or 100% sequence identity to SEQ ID NO: 1424. In some embodiments, the one or more non-coding RNAs detected in a sample comprise at least about 70%, 75%, 80%, 85%, 90%, 91%, 92%, 93%, 94%, 95%, 96%, 97%, 98%, 99% or 100% sequence identity to SEQ ID NO: 1425. In some embodiments, the one or more non-coding RNAs detected in a sample comprise at least about 70%, 75%, 80%, 85%, 90%, 91%, 92%, 93%, 94%, 95%, 96%, 97%, 98%, 99% or 100% sequence identity to SEQ ID NO: 1426. In some embodiments, the one or more non-coding RNAs detected in a sample comprise at least about 70%, 75%, 80%, 85%, 90%, 91%, 92%, 93%, 94%, 95%, 96%, 97%, 98%, 99% or 100% sequence identity to SEQ ID NO: 1427. In some embodiments, the one or more non-coding RNAs detected in a sample comprise at least 70%, 75%, 80%, 85%, 90%, 91%, 92%, 93%, 94%, 95%, 96%, 97%, 98%, 99% or 100% sequence identity to SEQ ID NO: 1428. In some embodiments, the one or more non-coding RNAs detected in a sample comprise at least about 70%, 75%, 80%, 85%, 90%, 91%, 92%, 93%, 94%, 95%, 96%, 97%, 98%, 99% or 100% sequence identity to SEQ ID NO: 1429. In some embodiments, the one or more non-coding RNAs detected in a sample comprise at least about 70%, 75%, 80%, 85%, 90%, 91%, 92%, 93%, 94%, 95%, 96%, 97%, 98%, 99% or 100% sequence identity to SEQ ID NO: 1430. In some embodiments, the one or more non-coding RNAs detected in a sample comprise at least about 70%, 75%, 80%, 85%, 90%, 91%, 92%, 93%, 94%, 95%, 96%, 97%, 98%, 99% or 100% sequence identity to SEQ ID NO: 1431. In some embodiments, the one or more non-coding RNAs detected in a sample comprise at least about 70%, 75%, 80%, 85%, 90%, 91%, 92%, 93%, 94%, 95%, 96%, 97%, 98%, 99% or 100% sequence identity to SEQ ID NO: 1432. In some embodiments, the one or more non-coding RNAs detected in a sample comprise at least about 70%, 75%, 80%, 85%, 90%, 91%, 92%, 93%, 94%, 95%, 96%, 97%, 98%, 99% or 100% sequence identity to SEQ ID NO: 1433. In some embodiments, the one or more non-coding RNAs detected in a sample comprise at least about 70%, 75%, 80%, 85%, 90%, 91%, 92%, 93%, 94%, 95%, 96%, 97%, 98%, 99% or 100% sequence identity to SEQ ID NO: 1434. In some embodiments, the one or more non-coding RNAs detected in a sample comprise at least about 70%, 75%, 80%, 85%, 90%, 91%, 92%, 93%, 94%, 95%, 96%, 97%, 98%, 99% or 100% sequence identity to SEQ ID NO: 1435. In some embodiments, the one or more non-coding RNAs detected in a sample comprise at least about 70%, 75%, 80%, 85%, 90%, 91%, 92%, 93%, 94%, 95%, 96%, 97%, 98%, 99% or 100% sequence identity to SEQ ID NO: 1436. In some embodiments, the one or more non-coding RNAs detected in a sample comprise at least about 70%, 75%, 80%, 85%, 90%, 91%, 92%, 93%, 94%, 95%, 96%, 97%, 98%, 99% or 100% sequence identity to SEQ ID NO: 1437. In some embodiments, the one or more non-coding RNAs detected in a sample comprise at least about 70%, 75%, 80%, 85%, 90%, 91%, 92%, 93%, 94%, 95%, 96%, 97%, 98%, 99% or 100% sequence identity to SEQ ID NO: 1438. In some embodiments, the one or more non-coding RNAs detected in a sample comprise at least about 70%, 75%, 80%, 85%, 90%, 91%, 92%, 93%, 94%, 95%, 96%, 97%, 98%, 99% or 100% sequence identity to SEQ ID NO: 1439. In some embodiments, the one or more non-coding RNAs detected in a sample comprise at least about 70%, 75%, 80%, 85%, 90%, 91%, 92%, 93%, 94%, 95%, 96%, 97%, 98%, 99% or 100% sequence identity to SEQ ID NO: 1440. In some embodiments, the one or more non-coding RNAs detected in a sample comprise at least about 70%, 75%, 80%, 85%, 90%, 91%, 92%, 93%, 94%, 95%, 96%, 97%, 98%, 99% or 100% sequence identity to SEQ ID NO: 1441. In some embodiments, the one or more non-coding RNAs detected in a sample comprise at least about 70%, 75%, 80%, 85%, 90%, 91%, 92%, 93%, 94%, 95%, 96%, 97%, 98%, 99% or 100% sequence identity to SEQ ID NO: 1442. In some embodiments, the one or more non-coding RNAs detected in a sample comprise at least about 70%, 75%, 80%, 85%, 90%, 91%, 92%, 93%, 94%, 95%, 96%, 97%, 98%, 99% or 100% sequence identity to SEQ ID NO: 1443. In some embodiments, the one or more non-coding RNAs detected in a sample comprise at least about 70%, 75%, 80%, 85%, 90%, 91%, 92%, 93%, 94%, 95%, 96%, 97%, 98%, 99% or 100% sequence identity to SEQ ID NO: 1444. In some embodiments, the one or more non-coding RNAs detected in a sample comprise at least about 70%, 75%, 80%, 85%, 90%, 91%, 92%, 93%, 94%, 95%, 96%, 97%, 98%, 99% or 100% sequence identity to SEQ ID NO: 1445. In some embodiments, the one or more non-coding RNAs detected in a sample comprise at least about 70%, 75%, 80%, 85%, 90%, 91%, 92%, 93%, 94%, 95%, 96%, 97%, 98%, 99% or 100% sequence identity to SEQ ID NO: 1446. In some embodiments, the one or more non-coding RNAs detected in a sample comprise at least about 70%, 75%, 80%, 85%, 90%, 91%, 92%, 93%, 94%, 95%, 96%, 97%, 98%, 99% or 100% sequence identity to SEQ ID NO: 1447. In some embodiments, the one or more non-coding RNAs detected in a sample comprise at least about 70%, 75%, 80%, 85%, 90%, 91%, 92%, 93%, 94%, 95%, 96%, 97%, 98%, 99% or 100% sequence identity to SEQ ID NO: 1448. In some embodiments, the one or more non-coding RNAs detected in a sample comprise at least about 70%, 75%, 80%, 85%, 90%, 91%, 92%, 93%, 94%, 95%, 96%, 97%, 98%, 99% or 100% sequence identity to SEQ ID NO: 1449. In some embodiments, the one or more non-coding RNAs detected in a sample comprise at least about 70%, 75%, 80%, 85%, 90%, 91%, 92%, 93%, 94%, 95%, 96%, 97%, 98%, 99% or 100% sequence identity to SEQ ID NO: 1450. In some embodiments, the one or more non-coding RNAs detected in a sample comprise at least about 70%, 75%, 80%, 85%, 90%, 91%, 92%, 93%, 94%, 95%, 96%, 97%, 98%, 99% or 100% sequence identity to SEQ ID NO:1451. In some embodiments, the one or more non-coding RNAs detected in a sample comprise at least about 70%, 75%, 80%, 85%, 90%, 91%, 92%, 93%, 94%, 95%, 96%, 97%, 98%, 99% or 100% sequence identity to SEQ ID NO: 1452. In some embodiments, the one or more non-coding RNAs detected in a sample comprise at least about 70%, 75%, 80%, 85%, 90%, 91%, 92%, 93%, 94%, 95%, 96%, 97%, 98%, 99% or 100% sequence identity to SEQ ID NO: 1453. In some embodiments, the one or more non-coding RNAs detected in a sample comprise at least about 70%, 75%, 80%, 85%, 90%, 91%, 92%, 93%, 94%, 95%, 96%, 97%, 98%, 99% or 100% sequence identity to SEQ ID NO: 1454. In some embodiments, the one or more non-coding RNAs detected in a sample comprise at least about 70%, 75%, 80%, 85%, 90%, 91%, 92%, 93%, 94%, 95%, 96%, 97%, 98%, 99% or 100% sequence identity to SEQ ID NO: 1455. In some embodiments, the one or more non-coding RNAs detected in a sample comprise at least about 70%, 75%, 80%, 85%, 90%, 91%, 92%, 93%, 94%, 95%, 96%, 97%, 98%, 99% or 100% sequence identity to SEQ ID NO: 1456. In some embodiments, the one or more non-coding RNAs detected in a sample comprise at least about 70%, 75%, 80%, 85%, 90%, 91%, 92%, 93%, 94%, 95%, 96%, 97%, 98%, 99% or 100% sequence identity to SEQ ID NO: 1457. In some embodiments, the one or more non-coding RNAs detected in a sample comprise at least about 70%, 75%, 80%, 85%, 90%, 91%, 92%, 93%, 94%, 95%, 96%, 97%, 98%, 99% or 100% sequence identity to SEQ ID NO: 1458. In some embodiments, the one or more non-coding RNAs detected in a sample comprise at least about 70%, 75%, 80%, 85%, 90%, 91%, 92%, 93%, 94%, 95%, 96%, 97%, 98%, 99% or 100% sequence identity to SEQ ID NO: 1459. In some embodiments, the one or more non-coding RNAs detected in a sample comprise at least about 70%, 75%, 80%, 85%, 90%, 91%, 92%, 93%, 94%, 95%, 96%, 97%, 98%, 99% or 100% sequence identity to SEQ ID NO: 1460. In some embodiments, the one or more non-coding RNAs detected in a sample comprise at least about 70%, 75%, 80%, 85%, 90%, 91%, 92%, 93%, 94%, 95%, 96%, 97%, 98%, 99% or 100% sequence identity to SEQ ID NO: 1461. In some embodiments, the one or more non-coding RNAs detected in a sample comprise at least about 70%, 75%, 80%, 85%, 90%, 91%, 92%, 93%, 94%, 95%, 96%, 97%, 98%, 99% or 100% sequence identity to SEQ ID NO: 1462. In some embodiments, the one or more non-coding RNAs detected in a sample comprise at least about 70%, 75%, 80%, 85%, 90%, 91%, 92%, 93%, 94%, 95%, 96%, 97%, 98%, 99% or 100% sequence identity to SEQ ID NO: 1463. In some embodiments, the one or more non-coding RNAs detected in a sample comprise at least about 70%, 75%, 80%, 85%, 90%, 91%, 92%, 93%, 94%, 95%, 96%, 97%, 98%, 99% or 100% sequence identity to SEQ ID NO: 1464. In some embodiments, the one or more non-coding RNAs detected in a sample comprise at least about 70%, 75%, 80%, 85%, 90%, 91%, 92%, 93%, 94%, 95%, 96%, 97%, 98%, 99% or 100% sequence identity to SEQ ID NO: 1465. In some embodiments, the one or more non-coding RNAs detected in a sample comprise at least about 70%, 75%, 80%, 85%, 90%, 91%, 92%, 93%, 94%, 95%, 96%, 97%, 98%, 99% or 100% sequence identity to SEQ ID NO: 1466. In some embodiments, the one or more non-coding RNAs detected in a sample comprise at least about 70%, 75%, 80%, 85%, 90%, 91%, 92%, 93%, 94%, 95%, 96%, 97%, 98%, 99% or 100% sequence identity to SEQ ID NO: 1467. In some embodiments, the one or more non-coding RNAs detected in a sample comprise at least about 70%, 75%, 80%, 85%, 90%, 91%, 92%, 93%, 94%, 95%, 96%, 97%, 98%, 99% or 100% sequence identity to SEQ ID NO: 1468. In some embodiments, the one or more non-coding RNAs detected in a sample comprise at least about 70%, 75%, 80%, 85%, 90%, 91%, 92%, 93%, 94%, 95%, 96%, 97%, 98%, 99% or 100% sequence identity to SEQ ID NO: 1469. In some embodiments, the one or more non-coding RNAs detected in a sample comprise at least about 70%, 75%, 80%, 85%, 90%, 91%, 92%, 93%, 94%, 95%, 96%, 97%, 98%, 99% or 100% sequence identity to SEQ ID NO: 1470. In some embodiments, the one or more non-coding RNAs detected in a sample comprise at least about 70%, 75%, 80%, 85%, 90%, 91%, 92%, 93%, 94%, 95%, 96%, 97%, 98%, 99% or 100% sequence identity to SEQ ID NO: 1471. In some embodiments, the one or more non-coding RNAs detected in a sample comprise at least about 70%, 75%, 80%, 85%, 90%, 91%, 92%, 93%, 94%, 95%, 96%, 97%, 98%, 99% or 100% sequence identity to SEQ ID NO: 1472. In some embodiments, the one or more non-coding RNAs detected in a sample comprise at least about 70%, 75%, 80%, 85%, 90%, 91%, 92%, 93%, 94%, 95%, 96%, 97%, 98%, 99% or 100% sequence identity to SEQ ID NO: 1473. In some embodiments, the one or more non-coding RNAs detected in a sample comprise at least about 70%, 75%, 80%, 85%, 90%, 91%, 92%, 93%, 94%, 95%, 96%, 97%, 98%, 99% or 100% sequence identity to SEQ ID NO: 1474. In some embodiments, the one or more non-coding RNAs detected in a sample comprise at least about 70%, 75%, 80%, 85%, 90%, 91%, 92%, 93%, 94%, 95%, 96%, 97%, 98%, 99% or 100% sequence identity to SEQ ID NO: 1475. In some embodiments, the one or more non-coding RNAs detected in a sample comprise at least about 70%, 75%, 80%, 85%, 90%, 91%, 92%, 93%, 94%, 95%, 96%, 97%, 98%, 99% or 100% sequence identity to SEQ ID NO: 1476. In some embodiments, the one or more non-coding RNAs detected in a sample comprise at least about 70%, 75%, 80%, 85%, 90%, 91%, 92%, 93%, 94%, 95%, 96%, 97%, 98%, 99% or 100% sequence identity to SEQ ID NO: 1477. In some embodiments, the one or more non-coding RNAs detected in a sample comprise at least about 70%, 75%, 80%, 85%, 90%, 91%, 92%, 93%, 94%, 95%, 96%, 97%, 98%, 99% or 100% sequence identity to SEQ ID NO: 1478. In some embodiments, the one or more non-coding RNAs detected in a sample comprise at least about 70%, 75%, 80%, 85%, 90%, 91%, 92%, 93%, 94%, 95%, 96%, 97%, 98%, 99% or 100% sequence identity to SEQ ID NO: 1479. In some embodiments, the one or more non-coding RNAs detected in a sample comprise at least about 70%, 75%, 80%, 85%, 90%, 91%, 92%, 93%, 94%, 95%, 96%, 97%, 98%, 99% or 100% sequence identity to SEQ ID NO: 1480. In some embodiments, the one or more non-coding RNAs detected in a sample comprise at least about 70%, 75%, 80%, 85%, 90%, 91%, 92%, 93%, 94%, 95%, 96%, 97%, 98%, 99% or 100% sequence identity to SEQ ID NO: 1481. In some embodiments, the one or more non-coding RNAs detected in a sample comprise at least about 70%, 75%, 80%, 85%, 90%, 91%, 92%, 93%, 94%, 95%, 96%, 97%, 98%, 99% or 100% sequence identity to SEQ ID NO: 1482. In some embodiments, the one or more non-coding RNAs detected in a sample comprise at least about 70%, 75%, 80%, 85%, 90%, 91%, 92%, 93%, 94%, 95%, 96%, 97%, 98%, 99% or 100% sequence identity to SEQ ID NO: 1483. In some embodiments, the one or more non-coding RNAs detected in a sample comprise at least about 70%, 75%, 80%, 85%, 90%, 91%, 92%, 93%, 94%, 95%, 96%, 97%, 98%, 99% or 100% sequence identity to SEQ ID NO: 1484. In some embodiments, the one or more non-coding RNAs detected in a sample comprise at least about 70%, 75%, 80%, 85%, 90%, 91%, 92%, 93%, 94%, 95%, 96%, 97%, 98%, 99% or 100% sequence identity to SEQ ID NO: 1485. In some embodiments, the one or more non-coding RNAs detected in a sample comprise at least about 70%, 75%, 80%, 85%, 90%, 91%, 92%, 93%, 94%, 95%, 96%, 97%, 98%, 99% or 100% sequence identity to SEQ ID NO: 1486. In some embodiments, the one or more non-coding RNAs detected in a sample comprise at least about 70%, 75%, 80%, 85%, 90%, 91%, 92%, 93%, 94%, 95%, 96%, 97%, 98%, 99% or 100% sequence identity to SEQ ID NO: 1487. In some embodiments, the one or more non-coding RNAs detected in a sample comprise at least about 70%, 75%, 80%, 85%, 90%, 91%, 92%, 93%, 94%, 95%, 96%, 97%, 98%, 99% or 100% sequence identity to SEQ ID NO: 1488. In some embodiments, the one or more non-coding RNAs detected in a sample comprise at least about 70%, 75%, 80%, 85%, 90%, 91%, 92%, 93%, 94%, 95%, 96%, 97%, 98%, 99% or 100% sequence identity to SEQ ID NO: 1489. In some embodiments, the one or more non-coding RNAs detected in a sample comprise at least about 70%, 75%, 80%, 85%, 90%, 91%, 92%, 93%, 94%, 95%, 96%, 97%, 98%, 99% or 100% sequence identity to SEQ ID NO: 1490. In some embodiments, the one or more non-coding RNAs detected in a sample comprise at least about 70%, 75%, 80%, 85%, 90%, 91%, 92%, 93%, 94%, 95%, 96%, 97%, 98%, 99% or 100% sequence identity to SEQ ID NO: 1491. In some embodiments, the one or more non-coding RNAs detected in a sample comprise at least about 70%, 75%, 80%, 85%, 90%, 91%, 92%, 93%, 94%, 95%, 96%, 97%, 98%, 99% or 100% sequence identity to SEQ ID NO: 1492. In some embodiments, the one or more non-coding RNAs detected in a sample comprise at least about 70%, 75%, 80%, 85%, 90%, 91%, 92%, 93%, 94%, 95%, 96%, 97%, 98%, 99% or 100% sequence identity to SEQ ID NO: 1493. In some embodiments, the one or more non-coding RNAs detected in a sample comprise at least about 70%, 75%, 80%, 85%, 90%, 91%, 92%, 93%, 94%, 95%, 96%, 97%, 98%, 99% or 100% sequence identity to SEQ ID NO: 1494. In some embodiments, the one or more non-coding RNAs detected in a sample comprise at least about 70%, 75%, 80%, 85%, 90%, 91%, 92%, 93%, 94%, 95%, 96%, 97%, 98%, 99% or 100% sequence identity to SEQ ID NO: 1495. In some embodiments, the one or more non-coding RNAs detected in a sample comprise at least about 70%, 75%, 80%, 85%, 90%, 91%, 92%, 93%, 94%, 95%, 96%, 97%, 98%, 99% or 100% sequence identity to SEQ ID NO: 1496. In some embodiments, the one or more non-coding RNAs detected in a sample comprise at least about 70%, 75%, 80%, 85%, 90%, 91%, 92%, 93%, 94%, 95%, 96%, 97%, 98%, 99% or 100% sequence identity to SEQ ID NO: 1497. In some embodiments, the one or more non-coding RNAs detected in a sample comprise at least about 70%, 75%, 80%, 85%, 90%, 91%, 92%, 93%, 94%, 95%, 96%, 97%, 98%, 99% or 100% sequence identity to SEQ ID NO: 1498. In some embodiments, the one or more non-coding RNAs detected in a sample comprise at least about 70%, 75%, 80%, 85%, 90%, 91%, 92%, 93%, 94%, 95%, 96%, 97%, 98%, 99% or 100% sequence identity to SEQ ID NO: 1499. In some embodiments, the one or more non-coding RNAs detected in a sample comprise at least about 70%, 75%, 80%, 85%, 90%, 91%, 92%, 93%, 94%, 95%, 96%, 97%, 98%, 99% or 100% sequence identity to SEQ ID NO: 1500. In some embodiments, the one or more non-coding RNAs detected in a sample comprise at least about 70%, 75%, 80%, 85%, 90%, 91%, 92%, 93%, 94%, 95%, 96%, 97%, 98%, 99% or 100% sequence identity to SEQ ID NO: 1501. In some embodiments, the one or more non-coding RNAs detected in a sample comprise at least about 70%, 75%, 80%, 85%, 90%, 91%, 92%, 93%, 94%, 95%, 96%, 97%, 98%, 99% or 100% sequence identity to SEQ ID NO: 1502. In some embodiments, the one or more non-coding RNAs detected in a sample comprise at least about 70%, 75%, 80%, 85%, 90%, 91%, 92%, 93%, 94%, 95%, 96%, 97%, 98%, 99% or 100% sequence identity to SEQ ID NO: 1503. In some embodiments, the one or more non-coding RNAs detected in a sample comprise at least about 70%, 75%, 80%, 85%, 90%, 91%, 92%, 93%, 94%, 95%, 96%, 97%, 98%, 99% or 100% sequence identity to SEQ ID NO: 1504. In some embodiments, the one or more non-coding RNAs detected in a sample comprise at least about 70%, 75%, 80%, 85%, 90%, 91%, 92%, 93%, 94%, 95%, 96%, 97%, 98%, 99% or 100% sequence identity to SEQ ID NO: 1505. In some embodiments, the one or more non-coding RNAs detected in a sample comprise at least about 70%, 75%, 80%, 85%, 90%, 91%, 92%, 93%, 94%, 95%, 96%, 97%, 98%, 99% or 100% sequence identity to SEQ ID NO: 1506. In some embodiments, the one or more non-coding RNAs detected in a sample comprise at least about 70%, 75%, 80%, 85%, 90%, 91%, 92%, 93%, 94%, 95%, 96%, 97%, 98%, 99% or 100% sequence identity to SEQ ID NO: 1507. In some embodiments, the one or more non-coding RNAs detected in a sample comprise at least about 70%, 75%, 80%, 85%, 90%, 91%, 92%, 93%, 94%, 95%, 96%, 97%, 98%, 99% or 100% sequence identity to SEQ ID NO: 1508. In some embodiments, the one or more non-coding RNAs detected in a sample comprise at least about 70%, 75%, 80%, 85%, 90%, 91%, 92%, 93%, 94%, 95%, 96%, 97%, 98%, 99% or 100% sequence identity to SEQ ID NO: 1509. In some embodiments, the one or more non-coding RNAs detected in a sample comprise at least about 70%, 75%, 80%, 85%, 90%, 91%, 92%, 93%, 94%, 95%, 96%, 97%, 98%, 99% or 100% sequence identity to SEQ ID NO: 1510. In some embodiments, the one or more non-coding RNAs detected in a sample comprise at least about 70%, 75%, 80%, 85%, 90%, 91%, 92%, 93%, 94%, 95%, 96%, 97%, 98%, 99% or 100% sequence identity to SEQ ID NO: 1511. In some embodiments, the one or more non-coding RNAs detected in a sample comprise at least about 70%, 75%, 80%, 85%, 90%, 91%, 92%, 93%, 94%, 95%, 96%, 97%, 98%, 99% or 100% sequence identity to SEQ ID NO: 1512. In some embodiments, the one or more non-coding RNAs detected in a sample comprise at least about 70%, 75%, 80%, 85%, 90%, 91%, 92%, 93%, 94%, 95%, 96%, 97%, 98%, 99% or 100% sequence identity to SEQ ID NO: 1513. In some embodiments, the one or more non-coding RNAs detected in a sample comprise at least about 70%, 75%, 80%, 85%, 90%, 91%, 92%, 93%, 94%, 95%, 96%, 97%, 98%, 99% or 100% sequence identity to SEQ ID NO: 1514. In some embodiments, the one or more non-coding RNAs detected in a sample comprise at least about 70%, 75%, 80%, 85%, 90%, 91%, 92%, 93%, 94%, 95%, 96%, 97%, 98%, 99% or 100% sequence identity to SEQ ID NO: 1515. In some embodiments, the one or more non-coding RNAs detected in a sample comprise at least about 70%, 75%, 80%, 85%, 90%, 91%, 92%, 93%, 94%, 95%, 96%, 97%, 98%, 99% or 100% sequence identity to SEQ ID NO: 1516. In some embodiments, the one or more non-coding RNAs detected in a sample comprise at least about 70%, 75%, 80%, 85%, 90%, 91%, 92%, 93%, 94%, 95%, 96%, 97%, 98%, 99% or 100% sequence identity to SEQ ID NO: 1517. In some embodiments, the one or more non-coding RNAs detected in a sample comprise at least about 70%, 75%, 80%, 85%, 90%, 91%, 92%, 93%, 94%, 95%, 96%, 97%, 98%, 99% or 100% sequence identity to SEQ ID NO: 1518. In some embodiments, the one or more non-coding RNAs detected in a sample comprise at least about 70%, 75%, 80%, 85%, 90%, 91%, 92%, 93%, 94%, 95%, 96%, 97%, 98%, 99% or 100% sequence identity to SEQ ID NO: 1519. In some embodiments, the one or more non-coding RNAs detected in a sample comprise at least about 70%, 75%, 80%, 85%, 90%, 91%, 92%, 93%, 94%, 95%, 96%, 97%, 98%, 99% or 100% sequence identity to SEQ ID NO: 1520. In some embodiments, the one or more non-coding RNAs detected in a sample comprise at least about 70%, 75%, 80%, 85%, 90%, 91%, 92%, 93%, 94%, 95%, 96%, 97%, 98%, 99% or 100% sequence identity to SEQ ID NO: 1521. In some embodiments, the one or more non-coding RNAs detected in a sample comprise at least about 70%, 75%, 80%, 85%, 90%, 91%, 92%, 93%, 94%, 95%, 96%, 97%, 98%, 99% or 100% sequence identity to SEQ ID NO: 1522. In some embodiments, the one or more non-coding RNAs detected in a sample comprise at least about 70%, 75%, 80%, 85%, 90%, 91%, 92%, 93%, 94%, 95%, 96%, 97%, 98%, 99% or 100% sequence identity to SEQ ID NO: 1523. In some embodiments, the one or more non-coding RNAs detected in a sample comprise at least about 70%, 75%, 80%, 85%, 90%, 91%, 92%, 93%, 94%, 95%, 96%, 97%, 98%, 99% or 100% sequence identity to SEQ ID NO: 1524.

[0118] In some embodiments, the one or more non-coding RNAs detected in a sample comprise one or a plurality of functional fragments of the nucleic acid sequences disclosed in TABLE 1 (SEQ ID NO: 1 through SEQ ID NO: 1543). In some embodiments, the mere presence or expression of one or a plurality of small non-coding RNAs alone or in combination with expression of one or a plurality of the sequences in TABLE 1 (SEQ ID NO: 1 through SEQ ID NO: 1543) is indicative of the presence of cancer in a subject, particularly of the type of cancer associated with the small non-coding RNAs detected. In some embodiments, the mere presence or expression of one or a plurality of small non-coding RNAs alone or in combination with expression of one or a plurality of sequences having at least about 70%, 80%, 81%, 82%, 83%, 84, 85%, 86%, 87%, 88%, 89%, 90%, 91%, 92%, 93%, 94%, 95%, 96%, 97%, 98%, or about 99% sequence identity to any of the nucleic acid sequences in TABLE 1 (SEQ ID NO: 1 through SEQ ID NO: 1543) is indicative of the presence of cancer in a subject, particularly of the type of cancer associated with the small non-coding RNAs detected. The skilled person can readily envision additional suitable controls that may be appropriate depending on the assay in question. The aforementioned suitable controls are exemplary, and are not intended to be limiting.

[0119] Generally, an increase in the level of one or more of the small non-coding RNA biomarkers provided in TABLE 1 (SEQ ID NO: 1 through SEQ ID NO: 1543) in a biological sample of a test subject relative to a suitable control representative of the level of the same small non-coding RNA biomarkers in a normal subject will indicate that the test subject has cancer of a type and tissue of origin associated with the one or more small non-coding RNAs detected in the test subject. In some instances where the levels of two or more small non-coding RNA biomarkers are determined in a test subject, there may be an increase in the level of one or more small non-coding RNA biomarkers, and no change or an increase in the level of one or more additional small non-coding RNA biomarkers, relative to a suitable control. In such instances, a difference in the level of one or more of the small non-coding RNA biomarkers relative to a suitable control representative of the level of the small non-coding RNA biomarkers in a normal subject indicates that the test subject has cancer of a type and tissue of origin associated with the one or more small non-coding RNAs shown different level in the test subject. Determination of such a difference may be aided by the execution of a software classification algorithm, as described herein.

### Biological Samples

[0120] The expression level of one or more disclosed small non-coding RNA biomarkers may be determined in a biological sample obtained from a subject. A sample of a subject is one that originates from a subject. Such a sample may be further processed after it is obtained from the subject. For example, RNA may be isolated from a sample. In this example, the RNA isolated from the sample is also a sample obtained from the subject. A biological sample useful for determining the level of one or more disclosed small non-coding RNA biomarkers may be obtained from essentially any source, including cells, tissues, and fluids throughout the body.

[0121] In some embodiments, the biological sample used for determining the level of one or more disclosed small non-coding RNA biomarkers is a sample containing circulating small non-coding RNAs, e.g., extracellular small non-coding RNAs. Extracellular small non-coding RNAs freely circulate in a wide range of biological material, including bodily fluids, such as fluids from the circulatory system, e.g., a blood sample or a lymph sample, or from another bodily fluid such as urine or saliva. Accordingly, in some embodiments, the biological sample used for determining the level of one or more disclosed small non-coding RNA biomarkers is a bodily fluid, for example, blood, fractions thereof, serum, plasma, urine, saliva, tears, sweat, semen, vaginal secretions, lymph, bronchial secretions, CSF, whole blood, etc. In some embodiments, the sample is a sample that is obtained non-invasively. In some embodiments, the sample is a serum sample from a human. In some embodiments, the sample is a bodily fluid from a human. In some embodiments, the sample is a liquid biopsy from a human.

[0122] In some embodiments, any of the methods disclosed herein comprise using a small volume of sample for detection and/or diagnosis. In some embodiments, the disclosed methods comprise isolating total RNA and/or amplifying small non-coding RNA in a sample of no more than about 20 microliters, about 40 microliters, about 80 microliters, about 100 microliters, about 200 microliters, about 300 microliters, about 400 microliters, about 500 microliters, about 600 microliters, about 700 microliters, about 800 microliters, about 900 microliters, about 1 milliliter, about 1.1 milliliters, about 1.2 milliliters, about 1.3 milliliters, about 1.4 milliliters, about 1.5 milliliters, about 1.6 milliliters, about 1.7 milliliters, about 1.8 milliliters, about 1.9 milliliters, or about 2.0 milliliters. In some embodiments, the sample size is from about 20 microliters to about 2 milliliters of liquid sample in the form of subject plasma, whole blood or serum.

[0123] In some embodiments, the methods disclosed herein comprise isolating total RNA and/or amplifying small non-coding RNA in a sample of no more than about 20 microliters of serum, no more than about 40 microliters of serum, no more than about 80 microliters of serum, no more than about 100 microliters of serum, no more than about 200 microliters of serum, no more than about 300 microliters of serum, no more than about 400 microliters of serum, no more than about 500 microliters of serum, no more than about 600 microliters of serum, no more than about 700 microliters of serum, no more than about 800 microliters of serum, no more than about 900 microliters of serum, no more than about 1 milliliter of serum, no more than about 1.1 milliliters of serum, no more than about 1.2 milliliters of serum, no more than about 1.3 milliliters of serum, no more than about 1.4 milliliters of serum, no more than about 1.5 milliliters of serum, no more than about 1.6 milliliters of serum, no more than about 1.7 milliliters of serum, no more than about 1.8 milliliters of serum, no more than about 1.9 milliliters of serum, or no more than about 2.0 milliliters of serum.

[0124] Circulating small non-coding RNAs include small non-coding RNAs in cells, extracellular small non-coding RNAs in microvesicles, in exosomes and extracellular small non-coding RNAs that are not associated with cells or microvesicles (extracellular, non-vesicular small non-coding RNA). In some embodiments, the biological sample used for determining the level of one or more small non-coding RNA biomarkers (e.g., a sample containing circulating small non-coding RNA) may contain cells. In other embodiments, the biological sample may be free or substantially free of cells (e.g., a serum sample). In some embodiments, a sample containing circulating small non-coding RNAs, e.g., extracellular small non-coding RNAs, is a blood-derived sample. Exemplary blood-derived sample types include, e.g., a plasma sample, a serum sample, a blood sample, etc. In other embodiments, a sample containing circulating small non-coding RNAs is a lymph sample. Circulating small non-coding RNAs are also found in urine and saliva, and biological samples derived from these sources are likewise suitable for determining the level of one or more disclosed small non-coding RNA biomarkers.

[0125] In some embodiments, any of the methods of the disclosure comprises a step of isolating total RNA from a sample or cell or exosome or microvesicle. Methods of isolating RNA for expression analysis from blood, plasma and/or serum (see for example, Tsui N B et al. (2002) Clin. Chem. 48,1647-53, incorporated by reference in its entirety herein) and from urine (see for example, Boom R et al. (1990) J Clin Microbiol. 28, 495-503, incorporated by reference in its entirety herein) have been described and routinely used by the skilled person.

### Determining the Level of Small Non-Coding RNA Biomarkers in a Sample

[0126] The level of one or more disclosed small non-coding RNA biomarkers in a biological sample may be determined by any suitable method. Any reliable method for measuring the level or amount of small non-coding RNA in a sample may be used. Generally, small non-coding RNA can be detected and quantified from a sample (including fractions thereof), such as samples of isolated RNA by various methods known for mRNA, including, for example, amplification-based methods (e.g., Polymerase Chain Reaction (PCR), Real-Time Polymerase Chain Reaction (RT-PCR), Quantitative Polymerase Chain Reaction (qPCR), rolling circle amplification, etc.), hybridization-based methods (e.g., hybridization arrays (e.g., microarrays), NanoString analysis, Northern Blot analysis, branched DNA (bDNA) signal amplification, in situ hybridization, etc.), and sequencing-based methods (e.g., next-generation sequencing methods, for example, using the Illumina or IonTorrent platforms). Other exemplary techniques include ribonuclease protection assay (RPA) and mass spectroscopy.

[0127] In some embodiments, RNA is converted to DNA (cDNA) prior to analysis. cDNA can be generated by reverse transcription of isolated small non-coding RNA using conventional techniques. In some embodiments, small non-coding RNA is amplified prior to measurement. In other embodiments, the level of small non-coding RNA is measured during the amplification process. In still other embodiments, the level of small non-coding RNA is not amplified prior to measurement. Some exemplary methods suitable for determining the level of small non-coding RNA in a sample are described in greater detail below. These methods are provided by way of illustration only, and it will be apparent to a skilled person that other suitable methods may likewise be used.

[0128] Amplification-Based Methods

[0129] Many amplification-based methods exist for detecting the level of small non-coding RNA nucleic acid sequences, including, but not limited to, PCR, RT-PCR, qPCR, and rolling circle amplification. Other amplification-based techniques include, for example, ligase chain reaction, multiplex ligatable probe amplification, in vitro transcription (IVT), strand displacement amplification, transcription-mediated amplification, RNA (Eberwine) amplification, and other methods that are known to persons skilled in the art.

[0130] A typical PCR reaction includes multiple steps, or cycles, that selectively amplify target nucleic acid species: a denaturing step, in which a target nucleic acid is denatured; an annealing step, in which a set of PCR primers (i.e., forward and reverse primers) anneal to complementary DNA strands, and an elongation step, in which a thermostable DNA polymerase elongates the primers. By repeating these steps multiple times, a DNA fragment is amplified to produce an amplicon, corresponding to the target sequence. Typical PCR reactions include 20 or more cycles of denaturation, annealing, and elongation. In many cases, the annealing and elongation steps can be performed concurrently, in which case the cycle contains only two steps. A reverse transcription reaction (which produces a cDNA sequence having complementarity to a small non-coding RNA) may be performed prior to PCR amplification. Reverse transcription reactions include the use of, e.g., a RNA-based DNA polymerase (reverse transcriptase) and a primer.

[0131] The disclosure relates to compostions comprising cDNA sequences that are complementary to the full-length oncRNAs disclosed herein and appear in TABLE 2. In some embodiments, the disclosure relates to a composition comprising a fragment of a cDNA sequence provided in TABLE 2, that is from about 4 to about 200 nucleotides long and complementary to a contiguous portion of the full-length oncRNA from TABLE 2. In some embodiments, the disclosure relates to a kit comprising at least one or at least two probes that are complimentary to a portion of the oncRNAs disclosed in TABLE 2. In some embodiments, the disclosure relates to a composition comprising a fragment of a cDNA sequence provided in TABLE 2, that is from about 4 to about 300 nucleotides in length and complementary to a contiguous portion of the full-length oncRNA from TABLE 2 that is at any position nested within the full-length oncRNA or inclusive of the entire DNA sequence.

[0132] Kits for quantitative real time PCR of small non-coding RNA are known, and are commercially available. Examples of suitable kits include, but are not limited to, the TaqMan miRNA Assay (Applied Biosystems) and the mirVana. qRT-PCR miRNA detection kit (Ambion). The small non-coding RNA can be ligated to a single stranded oligonucleotide containing universal primer sequences, a polyadenylated sequence, or adaptor sequence prior to reverse transcriptase and amplified using a primer complementary to the universal primer sequence, poly(T) primer, or primer comprising a sequence that is complementary to the adaptor sequence. In some embodiments, the disclosure relates to a kit comprising at least one probe that is complementary to a portion of one oncRNA disclosed in TABLE 2. In some embodiments, the kit comprises a DNA sequence that is from TABLE 2, such DNA sequence corresponding to the oncRNA being targeted. In some embodiments, the kit comprises a DNA sequence identified in TABLE 2 or a fragment thereof having at least about 70%, 75%, 80%, 85%, 90%, 91%, 92%, 93%, 94%, 95%, 96%, 97%, 98%, or 99% sequence identity to the complementary DNA sequences of TABLE 2. In some embodiments, the aforementioned cDNA sequences can be one or two or more species of annealing oligos each independently selected from a sequence that is from about 4 to about 250 nucleotides in length nested within (e.g. is a fragment of) the DNA sequence provided in TABLE 2. In some embodiments, the cDNA sequences or fragments thereof can be utilized as probes for a PCR reaction in which they act as primers for detecting the oncRNA with which it is associated.

[0133] In some instances, custom qRT-PCR assays can be developed for determination of small non-coding RNA levels. Custom qRT-PCR assays to measure small non-coding RNAs in a biological sample, e.g., a body fluid, can be developed using, for example, methods that involve an extended reverse transcription primer and locked nucleic acid modified PCR. Custom small non-coding RNA assays can be tested by running the assay on a dilution series of chemically synthesized small non-coding RNA corresponding to the target sequence. This permits determination of the limit of detection and linear range of quantitation of each assay. Furthermore, when used as a standard curve, these data permit an estimate of the absolute abundance of small non-coding RNAs measured in biological samples.

[0134] Amplification curves may optionally be checked to verify that Ct values are assessed in the linear range of each amplification plot. Typically, the linear range spans several orders of magnitude. For each candidate small non-coding RNA assayed, a chemically synthesized version of the small non-coding RNA can be obtained and analyzed in a dilution series to determine the limit of sensitivity of the assay, and the linear range of quantitation. Relative expression levels may be determined, for example, as described by Livak et al., Methods (2001) December; 25(4):402-8.

[0135] In some embodiments, two or more small non-coding RNAs are amplified in a single reaction volume. For example, multiplex q-PCR, such as qRT-PCR, enables simultaneous amplification and quantification of at least two small non-coding RNAs of interest in one reaction volume by using more than one pair of primers and/or more than one probe. The primer pairs comprise at least one amplification primer that specifically binds each small non-coding RNA, and the probes are labeled such that they are distinguishable from one another, thus allowing simultaneous quantification of multiple small non-coding RNAs.

[0136] Rolling circle amplification is a DNA-polymerase driven reaction that can replicate circularized oligonucleotide probes with either linear or geometric kinetics under isothermal conditions (see, for example, Lizardi et al., Nat. Gen. (1998) 19(3):225-232; Gusev et al., Am. J. Pathol. (2001) 159(1):63-69; Nallur et al., Nucleic Acids Res. (2001) 29(23):E118). In the presence of two primers, one hybridizing to the (+) strand of DNA, and the other hybridizing to the (−) strand, a complex pattern of strand displacement results in the generation of over 109 copies of each DNA molecule in 90 minutes or less. Tandemly linked copies of a closed circle DNA molecule may be formed by using a single primer. The process can also be performed using a matrix-associated DNA. The template used for rolling circle amplification may be reverse transcribed. This method can be used as a highly sensitive indicator of small non-coding RNA sequence and expression level at very low small non-coding RNA concentrations (see, for example, Cheng et al., Angew Chem. Int. Ed. Engl. (2009) 48(18):3268-72; Neubacher et al., Chembiochem. (2009) 10(8):1289-91).

[0137] Hybridization-Based Methods

[0138] Small non-coding RNA may be detected using hybridization-based methods, including but not limited to hybridization arrays (e.g., microarrays), NanoString analysis, Northern Blot analysis, branched DNA (bDNA) signal amplification, and in situ hybridization.

[0139] Microarrays can be used to measure the expression levels of large numbers of small non-coding RNAs simultaneously. Microarrays can be fabricated using a variety of technologies, including printing with fine-pointed pins onto glass slides, photolithography using pre-made masks, photolithography using dynamic micromirror devices, ink-jet printing, or electrochemistry on microelectrode arrays. Also useful are microfluidic TaqMan Low-Density Arrays, which are based on an array of microfluidic qRT-PCR reactions, as well as related microfluidic qRT-PCR based methods.

[0140] Axon B-4000 scanner and Gene-Pix Pro 4.0 software or other suitable software can be used to scan images. Non-positive spots after background subtraction, and outliers detected by the ESD procedure, are removed. The resulting signal intensity values are normalized to per-chip median values and then used to obtain geometric means and standard errors for each small non-coding RNA. Each signal can be transformed to log base 2, and a one-sample t test can be conducted. Independent hybridizations for each sample can be performed on chips with each small non-coding RNA spotted multiple times to increase the robustness of the data.

[0141] Microarrays can be used for the expression profiling of small non-coding RNAs in diseases. For example, RNA can be extracted from a sample and, optionally, the small non-coding RNAs are size-selected from total RNA. Oligonucleotide linkers can be attached to the 5′ and 3′ ends of the small non-coding RNAs and the resulting ligation products are used as templates for an RT-PCR reaction. The sense strand PCR primer can have a fluorophore attached to its 5′ end, thereby labeling the sense strand of the PCR product. The PCR product is denatured and then hybridized to the microarray. A PCR product, referred to as the target nucleic acid that is complementary to the corresponding small non-coding RNA capture probe sequence on the array will hybridize, via base pairing, to the spot at which the, capture probes are affixed. The spot will then fluoresce when excited using a microarray laser scanner.

[0142] The fluorescence intensity of each spot is then evaluated in terms of the number of copies of a particular small non-coding RNA, using a number of positive and negative controls and array data normalization methods, which will result in assessment of the level of expression of a particular small non-coding RNA.

[0143] Total RNA containing the small non-coding RNA extracted from a body fluid sample can also be used directly without size-selection of the small non-coding RNAs. For example, the RNA can be 3′ end labeled using T4 RNA ligase and a fluorophore-labeled short RNA linker. Fluorophore-labeled small non-coding RNAs complementary to the corresponding small non-coding RNA capture probe sequences on the array hybridize, via base pairing, to the spot at which the capture probes are affixed. The fluorescence intensity of each spot is then evaluated in terms of the number of copies of a particular small non-coding RNA, using a number of positive and negative controls and array data normalization methods, which will result in assessment of the level of expression of a particular small non-coding RNA.

[0144] Several types of microarrays can be employed including, but not limited to, spotted oligonucleotide microarrays, pre-fabricated oligonucleotide microarrays or spotted long oligonucleotide arrays. In some embodiments, the disclosure relates to a solid support comprising silica, plastic or a combination of both silica or plastic

[0145] Small non-coding RNAs can also be detected without amplification using the nCounter Analysis System (NanoString Technologies, Seattle, Wash.). This technology employs two nucleic acid-based probes that hybridize in solution (e.g., a reporter probe and a capture probe). After hybridization, excess probes are removed, and probe/target complexes are analyzed in accordance with the manufacturer's protocol. nCounter miRNA assay kits are available from NanoString Technologies, which are capable of distinguishing between highly similar small non-coding RNAs with great specificity.

[0146] Small non-coding RNAs can also be detected using branched DNA (bDNA) signal amplification (see, for example, Urdea, Nature Biotechnology (1994), 12:926-928). Small non-coding RNA assays based on bDNA signal amplification are commercially available. One such assay is the QuantiGene® 2.0 miRNA Assay (Affymetrix, Santa Clara, Calif.).

[0147] Northern Blot and in situ hybridization may also be used to detect small non-coding RNAs. Suitable methods for performing Northern Blot and in situ hybridization are known in the art.

[0148] In some embodiments, biomarker expression is determined by an assay known to those of skill in the art, including but not limited to, multi-analyte profile test, enzyme-linked immunosorbent assay (ELISA), radioimmunoassay, Western blot assay, immunofluorescent assay, enzyme immunoassay, immunoprecipitation assay, chemiluminescent assay, immunohistochemical assay, dot blot assay, or slot blot assay. In some embodiments, wherein an antibody is used in the assay the antibody is detectably labeled. The antibody labels may include, but are not limited to, immunofluorescent label, chemiluminescent label, phosphorescent label, enzyme label, radiolabel, avidin/biotin, colloidal gold particles, colored particles, and magnetic particles. In some embodiments, biomarker expression is determined by an IHC assay.

[0149] In some embodiments, biomarker expression is determined using an agent that specifically binds the biomarker. Any molecular entity that displays specific binding to a biomarker can be employed to determine the level of that biomarker protein in a sample. Specific binding agents include, but are not limited to, antibodies, antibody fragments, antibody mimetics, and polynucleotides (e.g., aptamers). One of skill understands that the degree of specificity required is determined by the particular assay used to detect the biomarker protein. In some embodiments, the disclosure relates to a system comprising a solid support (such as an ELISA plate, gel, bead or column comprising an antibody, antibody fragment, antibody mimetic, and/or polynucleotides capable of binding to T3p or a salt thereof.

[0150] A. Sequencing-Based Methods

[0151] Advanced sequencing methods can likewise be used as available. For example, small non-coding RNAs can be detected using Illumina. Next Generation Sequencing (e.g., Sequencing-By-Synthesis or TruSeq methods, using, for example, the HiSeq, HiScan, GenomeAnalyzer, or MiSeq systems (Illumina, Inc., San Diego, Calif.)). Small non-coding RNAs can also be detected using Ion Torrent Sequencing (Ion Torrent Systems, Inc., Gulliford, Conn.), or other suitable methods of semiconductor sequencing.

[0152] Direct detection of the oncRNA can be identified in some embodiments, by sequencing the RNA and identifying the sequence as one or a fragment of the RNA sequences in Table 2.

[0153] Additional Small Non-Coding RNA Detection Tools

[0154] Mass spectroscopy can be used to quantify small non-coding RNA using RNase mapping. Isolated RNAs can be enzymatically digested with RNA endonucleases (RNases) having high specificity (e.g., RNase T1, which cleaves at the 3′-side of all unmodified guanosine residues) prior to their analysis by MS or tandem MS (MS/MS) approaches. The first approach developed utilized the on-line chromatographic separation of endonuclease digests by reversed phase HPLC coupled directly to ESI-MS. The presence of posttranscriptional modifications can be revealed by mass shifts from those expected based upon the RNA sequence. Ions of anomalous mass/charge values can then be isolated for tandem MS sequencing to locate the sequence placement of the posttranscriptionally modified nucleoside.

[0155] Matrix-assisted laser desorption/ionization mass spectrometry (MALDI-MS) has also been used as an analytical approach for obtaining information about posttranscriptionally modified nucleosides. MALDI-based approaches can be differentiated from ESI-based approaches by the separation step. In MALDI-MS, the mass spectrometer is used to separate the small non-coding RNA.

[0156] To analyze a limited quantity of intact small non-coding RNAs, a system of capillary LC coupled with nanoESI-MS can be employed, by using a linear ion trap-orbitrap hybrid mass spectrometer (LTQ Orbitrap XL, Thermo Fisher Scientific) or a tandem-quadrupole time-of-flight mass spectrometer (QSTAR XL, Applied Biosystems) equipped with a custom-made nanospray ion source, a Nanovolume Valve (Valco Instruments), and a splitless nano HPLC system (DiNa, KYA Technologies). Analyte/TEAA is loaded onto a nano-LC trap column, desalted, and then concentrated. Intact small non-coding RNAs are eluted from the trap column and directly injected into a Cl 8 capillary column, and chromatographed by RP-HPLC using a gradient of solvents of increasing polarity. The chromatographic eluent is sprayed from a sprayer tip attached to the capillary column, using an ionization voltage that allows ions to be scanned in the negative polarity mode.

[0157] Additional methods for small non-coding RNA detection and measurement include, for example, strand invasion assay (Third Wave Technologies, Inc.), surface plasmon resonance (SPR), cDNA, MTDNA (metallic DNA; Advance Technologies, Saskatoon, SK), and single-molecule methods such as the one developed by US Genomics. Multiple small non-coding RNAs can be detected in a microarray format using a novel approach that combines a surface enzyme reaction with nanoparticle-amplified SPR imaging (SPRI). The surface reaction of poly(A) polymerase creates poly(A) tails on small non-coding RNAs hybridized onto locked nucleic acid (LNA) microarrays. DNA-modified nanoparticles are then adsorbed onto the poly(A) tails and detected with SPRI. This ultrasensitive nanoparticle-amplified SPRI methodology can be used for small non-coding RNA profiling at attamole levels.

[0158] Detection of Amplified or Non-Amplified Small Non-Coding RNAs

[0159] In certain embodiments, labels, dyes, or labeled probes and/or primers are used to detect amplified or unamplified small non-coding RNAs. The skilled artisan will recognize which detection methods are appropriate based on the sensitivity of the detection method and the abundance of the target. Depending on the sensitivity of the detection method and the abundance of the target, amplification may or may not be required prior to detection. One skilled in the art will recognize the detection methods where small non-coding RNA amplification is preferred.

[0160] A probe or primer may include standard (A, T or U, G and C) bases, or modified bases. Modified bases include, but are not limited to, the AEGIS bases (from Eragen Biosciences), which have been described, e.g., in U.S. Pat. Nos. 5,432,272, 5,965,364, and 6,001,983. In certain aspects, bases are joined by a natural phosphodiester bond or a different chemical linkage. Different chemical linkages include, but are not limited to, a peptide bond or a Locked Nucleic Acid (LNA) linkage, which is described, e.g., in U.S. Pat. No. 7,060,809. In some embodiments, the disclosure relates to a system comprising a probe or primer comprising or consisting of one or a combination of DNA or cDNA sequences of Table 2. In some embodiments, the disclosure relates to a system comprising a probe or primer comprising or consisting of one or a combination of fragments of DNA or cDNA sequences of Table 2.

[0161] In a further aspect, oligonucleotide probes or primers present in an amplification reaction are suitable for monitoring the amount of amplification product produced as a function of time. In certain aspects, probes having different single stranded versus double stranded character are used to detect the nucleic acid. Probes include, but are not limited to, the 5′-exonuclease assay (e.g., TAQMAN) probes (see U.S. Pat. No. 5,538,848), stem-loop molecular beacons (see, e.g., U.S. Pat. Nos. 6,103,476 and 5,925,517), stemless or linear beacons (see, e.g., WO 9921881, U.S. Pat. Nos. 6,485,901 and 6,649,349), peptide nucleic acid (PNA) Molecular Beacons (see, e.g., U.S. Pat. Nos. 6,355,421 and 6,593,091), linear PNA beacons (see, e.g. U.S. Pat. No. 6,329,144), non-FRET probes (see, e.g., U.S. Pat. No. 6,150,097), Sunrise™/AmplifluorB™ probes (see, e.g., U.S. Pat. No. 6,548,250), stem-loop and duplex SCORPION probes (see, e.g., U.S. Pat. No. 6,589,743), bulge loop probes (see, e.g., U.S. Pat. No. 6,590,091), pseudo knot probes (see, e.g., U.S. Pat. No. 6,548,250), cyclicons (see, e.g., U.S. Pat. No. 6,383,752), MGB Eclipse™ probe (Epoch Biosciences), hairpin probes (see, e.g., U.S. Pat. No. 6,596,490), PNA light-up probes, antiprimer quench probes (Li et al., Clin. Chem. 53:624-633 (2006)), self-assembled nanoparticle probes, and ferrocene-modified probes described, for example, in U.S. Pat. No. 6,485,901.

[0162] In certain embodiments, one or more of the primers in an amplification reaction can include a label. In yet further embodiments, different probes or primers comprise detectable labels that are distinguishable from one another. In some embodiments, a nucleic acid, such as the probe or primer, may be labeled with two or more distinguishable labels.

[0163] In some aspects, a label is attached to one or more probes and has one or more of the following properties: (i) provides a detectable signal; (ii) interacts with a second label to modify the detectable signal provided by the second label, e.g., FRET (Fluorescent Resonance Energy Transfer); (iii) stabilizes hybridization, e.g., duplex formation; and (iv) provides a member of a binding complex or affinity set, e.g., affinity, antibody-antigen, ionic complexes, hapten-ligand (e.g., biotin-avidin). In still other aspects, use of labels can be accomplished using any one of a large number of known techniques employing known labels, linkages, linking groups, reagents, reaction conditions, and analysis and purification methods.

[0164] Small non-coding RNAs can be detected by direct or indirect methods. In a direct detection method, one or more small non-coding RNAs are detected by a detectable label that is linked to a nucleic acid molecule. In such methods, the small non-coding RNAs may be labeled prior to binding to the probe. Therefore, binding is detected by screening for the labeled small non-coding RNA that is bound to the probe. The probe is optionally linked to a bead in the reaction volume.

[0165] In certain embodiments, nucleic acids are detected by direct binding with a labeled probe, and the probe is subsequently detected. In some embodiments, the nucleic acids, such as amplified small non-coding RNAs, are detected using FlexMAP Microspheres (Luminex) conjugated with probes to capture the desired nucleic acids. Some methods may involve detection with polynucleotide probes modified with fluorescent labels or branched DNA (bDNA) detection, for example.

[0166] In some embodiments, biomarker expression is determined using a PCR-based assay comprising specific primers and/or probes for each biomarker. As used herein, the term “probe” refers to any molecule that is capable of selectively binding a specifically intended target biomolecule. In some embodiments, as used herein, the term “probe” refers to any molecule that may bind or associate, indirectly or directly, covalently or non-covalently, to any of the substrates and/or reaction products and/or proteases disclosed herein and whose association or binding is detectable using the methods disclosed herein. In some embodiments, the probe is a fluorogenic probe, antibody or absorbance-based probes. If an absorbance-based probe, the chromophore pNA (para-nitroaniline) may be used as a probe for detection and/or quantification of a target nucleic acid sequence disclosed herein. In some embodiments, the probe may comprise a nucleic acid sequence labeled with a fluorogenic molecule or a substrate that when exposed to an enzyme becomes fluorogenic and the nucleic acid sequence is complementary to any of the nucleic acid sequences disclosed in TABLE 1 or one comprising at least about 70%, 80%, 81%, 82%, 83%, 84, 85%, 86%, 87%, 88%, 89%, 90%, 91%, 92%, 93%, 94%, 95%, 96%, 97%, 98% or 99% sequence identity to any of the nucleic acid sequences disclosed in TABLE 1 (SEQ ID NO: 1 through SEQ ID NO: 1543). Probes can be synthesized by one of skill in the art using known techniques, or derived from biological preparations. Probes may include but are not limited to, RNA, DNA, proteins, peptides, aptamers, antibodies, and organic molecules. The term “primer” or “probe” encompasses oligonucleotides that have a specific sequence or oligoribonucleotides that have a specific sequence.

[0167] The target molecule could be any one or a combination of nucleic acid sequences identified in TABLE 1, or any one or combination of nucleic acid sequences chosen from SEQ ID NO: 1 through SEQ ID NO: 1543. In some embodiments, the target molecule is a nucleic acid sequence comprising at least about 70%, 80%, 81%, 82%, 83%, 84, 85%, 86%, 87%, 88%, 89%, 90%, 91%, 92%, 93%, 94%, 95%, 96%, 97%, 98%, or about 99% sequence identity to any one or combination of nucleic acid sequences provided in TABLE 1, or any one or combination of nucleic acid sequences chosen from SEQ ID NO: 1 through SEQ ID NO: 1543. In some embodiments, the target molecule is any amplified fragment of any one or combination of nucleic acid sequences identified in TABLE 2, or any one or combination of nucleic acid sequences chosen from SEQ ID NO: 1544 through SEQ ID NO: 6843, and/or any one or combination of nucleic acid sequence comprising at least about 70%, 80%, 81%, 82%, 83%, 84, 85%, 86%, 87%, 88%, 89%, 90%, 91%, 92%, 93%, 94%, 95%, 96%, 97%, 98%, or about 99% sequence identity to any one or combination of nucleic acid sequences in TABLE 2, or any one or combination of nucleic acid sequences chosen from SEQ ID NO: 1544 through SEQ ID NO: 6843. The target molecule could be any one or a combination of nucleic acid sequences identified in TABLE 2, or any one or combination of nucleic acid sequences chosen from SEQ ID NO: 1544 through SEQ ID NO: 18. In some embodiments, the target molecule is a nucleic acid sequence comprising at least about 70%, 80%, 81%, 82%, 83%, 84, 85%, 86%, 87%, 88%, 89%, 90%, 91%, 92%, 93%, 94%, 95%, 96%, 97%, 98%, or about 99% sequence identity to any one or combination of nucleic acid sequences provided in TABLE 1, or any one or combination of nucleic acid sequences chosen from SEQ ID NO: 1 through SEQ ID NO: 1543

[0168] In other embodiments, nucleic acids are detected by indirect detection methods. For example, a biotinylated probe may be combined with a streptavidin-conjugated dye to detect the bound nucleic acid. The streptavidin molecule binds a biotin label on amplified small non-coding RNA, and the bound small non-coding RNA is detected by detecting the dye molecule attached to the streptavidin molecule. In some embodiments, the streptavidin-conjugated dye molecule comprises PHYCOLINK. Streptavidin R-Phycoerythrin (PROzyme). Other conjugated dye molecules are known to persons skilled in the art.

[0169] Labels include, but are not limited to, light-emitting, light-scattering, and light-absorbing compounds which generate or quench a detectable fluorescent, chemiluminescent, or bioluminescent signal (see, e.g., Kricka, L., Nonisotopic DNA Probe Techniques, Academic Press, San Diego (1992) and Garman A., Non-Radioactive Labeling, Academic Press (1997)). A dual labeled fluorescent probe that includes a reporter fluorophore and a quencher fluorophore is used in some embodiments. It will be appreciated that pairs of fluorophores are chosen that have distinct emission spectra so that they can be easily distinguished.

[0170] In certain embodiments, labels are hybridization-stabilizing moieties which serve to enhance, stabilize, or influence hybridization of duplexes, e.g., intercalators and intercalating dyes (including, but not limited to, ethidium bromide and SYBR-Green), minor-groove binders, and cross-linking functional groups (see, e.g., Blackburn et al., eds. “DNA and RNA Structure” in Nucleic Acids in Chemistry and Biology (1996)).

[0171] In other embodiments, methods relying on hybridization and/or ligation to quantify small non-coding RNAs may be used, including oligonucleotide ligation (OLA) methods and methods that allow a distinguishable probe that hybridizes to the target nucleic acid sequence to be separated from an unbound probe. As an example, HARP-like probes, as disclosed in U.S. Publication No. 2006/0078894 may be used to measure the quantity of miRNAs. In such methods, after hybridization between a probe and the targeted nucleic acid, the probe is modified to distinguish the hybridized probe from the unhybridized probe. Thereafter, the probe may be amplified and/or detected. In general, a probe inactivation region comprises a subset of nucleotides within the target hybridization region of the probe. To reduce or prevent amplification or detection of a HARP probe that is not hybridized to its target nucleic acid, and thus allow detection of the target nucleic acid, a post-hybridization probe inactivation step is carried out using an agent which is able to distinguish between a HARP probe that is hybridized to its targeted nucleic acid sequence and the corresponding unhybridized HARP probe. The agent is able to inactivate or modify the unhybridized HARP probe such that it cannot be amplified. A probe ligation reaction may also be used to quantify small non-coding RNAs. In a Multiplex Ligation-dependent Probe Amplification (MLPA) technique (Schouten et al., Nucleic Acids Research 30:e57 (2002)), pairs of probes which hybridize immediately adjacent to each other on the target nucleic acid are ligated to each other driven by the presence of the target nucleic acid. In some aspects, MLPA probes have flanking PCR primer binding sites. MLPA probes are specifically amplified when ligated, thus allowing for detection and quantification of small non-coding RNA biomarkers.

### Detecting a Level of Small Non-Coding RNA Biomarkers

[0172] The small non-coding RNA biomarkers described herein can be used individually or in combination in diagnostic tests to assess the type of cancer, tissue of origin, and status or stage of the cancer in a subject. Cancer status or stage includes the presence or absence of the cancer. Cancer status or stage may also include monitoring the course of the cancer, for example, monitoring disease progression. Based on the cancer status or stage of a subject, additional procedures may be indicated, including, for example, additional diagnostic tests or therapeutic procedures.

[0173] The power of a diagnostic test to correctly predict disease status is commonly measured in terms of the accuracy of the assay, the sensitivity of the assay, the specificity of the assay, or the “Area Under a Curve” (AUC), for example, the area under a Receiver Operating Characteristic (ROC) curve. As used herein, accuracy is a measure of the fraction of misclassified samples. Accuracy may be calculated as the total number of correctly classified samples divided by the total number of samples, e.g., in a test population. Sensitivity is a measure of the “true positives” that are predicted by a test to be positive, and may be calculated as the number of correctly identified breast cancer samples divided by the total number of breast cancer samples. Specificity is a measure of the “true negatives” that are predicted by a test to be negative, and may be calculated as the number of correctly identified normal samples divided by the total number of normal samples. AUC is a measure of the area under a Receiver Operating Characteristic curve, which is a plot of sensitivity vs. the false positive rate (1-specificity). The greater the AUC, the more powerful the predictive value of the test. Other useful measures of the utility of a test include the “positive predictive value,” which is the percentage of actual positives who test as positives, and the “negative predictive value,” which is the percentage of actual negatives who test as negatives. In some embodiments, the level of one or more small non-coding RNA biomarkers in samples obtained from subjects having different cancer statuses show a statistically significant difference of at least about 0.05 (p=0.05) relative to normal subjects, as determined relative to a suitable control. In some embodiments, the level of one or more small non-coding RNA biomarkers in samples obtained from subjects having different cancer statuses show a statistically significant difference of at least about 0.01 (p=0.01) relative to normal subjects, as determined relative to a suitable control. In some embodiments, the level of one or more small non-coding RNA biomarkers in samples obtained from subjects having different cancer statuses show a statistically significant difference of at least about 0.005 (p=0.005) relative to normal subjects, as determined relative to a suitable control. In some embodiments, the level of one or more small non-coding RNA biomarkers in samples obtained from subjects having different cancer statuses show a statistically significant difference of at least about 0.001 (p=0.001) relative to normal subjects, as determined relative to a suitable control.

[0174] In other embodiments, diagnostic tests that use small non-coding RNA biomarkers described herein individually or in combination show an accuracy of at least about 75%, e.g., an accuracy of at least about 75%, about 80%, about 85%, about 90%, about 95%, about 97%, about 99% or about 100%. In other embodiments, diagnostic tests that use small non-coding RNA biomarkers described herein individually or in combination show a specificity of at least about 75%, e.g., a specificity of at least about 75%, about 80%, about 85%, about 90%, about 95%, about 97%, about 99% or about 100%. In other embodiments, diagnostic tests that use small non-coding RNA biomarkers described herein individually or in combination show a sensitivity of at least about 75%, e.g., a sensitivity of at least about 75%, about 80%, about 85%, about 90%, about 95%, about 97%, about 99% or about 100%. In other embodiments, diagnostic tests that use small non-coding RNA biomarkers described herein individually or in combination show a specificity and sensitivity of at least about 75% each, e.g., a specificity and sensitivity of at least about 75%, about 80%, about 85%, about 90%, about 95%, about 97%, about 99% or about 100% (for example, a specificity of at least about 80% and sensitivity of at least about 80%, or for example, a specificity of at least about 80% and sensitivity of at least about 95%).

[0175] Each biomarker listed in TABLE 1 (SEQ ID NO: 1 through SEQ ID NO: 1543) is identified as being associated with certain type(s) of cancer as provided. In some instances, one particular small non-coding RNA biomarker may be associated with more than one types of cancers (e.g., SEQ ID NO: 1). In other instances, one particular small non-coding RNA biomarker may be associated with only one type of cancer (e.g., SEQ ID NO: 28).

[0176] Each biomarker listed in TABLE 1 (SEQ ID NO: 1 through SEQ ID NO: 1543) is differentially present in biological samples derived from subjects having certain types of cancers as compared with normal subjects, and thus each is individually useful in facilitating the determination of those types of cancer in a test subject. Such a method involves determining the level of the biomarker in a sample obtained from the subject. Determining the level of the biomarker in a sample may include measuring, detecting, or assaying the level of the biomarker in the sample using any suitable method, for example, the methods set forth herein. Determining the level of the biomarker in a sample may also include examining the results of an assay that measured, detected, or assayed the level of the biomarker in the sample. The method may also involve comparing the level of the biomarker in a sample with a suitable control. A change in the level of the biomarker relative to that in a normal subject as assessed using a suitable control is indicative of the cancer status or stage of the subject. A diagnostic amount of a biomarker that represents an amount of the biomarker above or below which a subject is classified as having a particular cancer status or stage can be used. For example, if the biomarker is upregulated in samples from an individual having cancer as compared to a normal individual, a measured amount above the diagnostic cutoff provides a diagnosis of the type of cancer that individual has. Generally, the individual small non-coding RNA biomarkers in TABLE 1 (SEQ ID NO: 1 through SEQ ID NO: 1543) are upregulated in cancer samples relative to samples obtained from normal individuals. As is well-understood in the art, adjusting the particular diagnostic cut-off used in an assay allows one to adjust the sensitivity and/or specificity of the diagnostic assay as desired. The particular diagnostic cut-off can be determined, for example, by measuring the amount of the biomarker in a statistically significant number of samples from subjects with different cancer statuses, and drawing the cut-off at the desired level of accuracy, sensitivity, and/or specificity. In certain embodiments, the diagnostic cut-off can be determined with the assistance of a classification algorithm, as described herein. In some embodiments, the

[0177] Accordingly, methods are provided for diagnosing cancer in a subject, by determining the level of at least one small non-coding RNA in a sample from the subject, wherein a difference in the level of the at least one small non-coding RNA versus that in a normal subject (as determined relative to a suitable control) is indicative of cancer in the subject. In some embodiments, the at least one small non-coding RNA includes one or more small non-coding RNAs from TABLE 1 (SEQ ID NO: 1 through SEQ ID NO: 1543). In some embodiments, the at least one small non-coding RNA includes one or more small non-coding RNAs from TABLE 2 (SEQ ID NO: 1544 through SEQ ID NO: 6569). In some embodiments, a difference in the level of the at least one small non-coding RNA versus that in a normal subject (as determined relative to a suitable control) is indicative of the type(s) of cancer identified as being associated with the detected at least one small non-coding RNA in the subject. For example, the disclosed method of determining the level of at least one small non-coding RNA in a sample from a subject, wherein an increase in the level of the at least one small non-coding RNA relative to a control is indicative of cancer in the subject, particularly of the type(s) of cancer identified as being associated with the at least one small non-coding RNA detected.

[0178] Optionally, the method may further comprise providing a diagnosis that the subject has or does not have cancer based on the level of at least one small non-coding RNA in the sample. In addition or alternatively, the method may further comprise correlating a difference in the level or levels of at least one small non-coding RNA relative to a suitable control with a diagnosis of cancer in the subject. In some embodiments, such a diagnosis may be provided directly to the subject, or it may be provided to another party involved in the subject's care.

[0179] While individual small non-coding RNA biomarkers are useful in diagnostic applications for various types of cancer, as shown herein, a combination of small non-coding RNA biomarkers may provide greater predictive value of cancer status or stage than the small non-coding RNA biomarkers when used alone. Specifically, the detection of a plurality of small non-coding RNA biomarkers can increase the accuracy, sensitivity, and/or specificity of a diagnostic test. The detection of a plurality of small non-coding RNA biomarkers can also assist in narrowing down the type of cancer and/or status or stage thereof in a subject. This is particular useful when a given small non-coding RNA biomarker is identified as being associated with more than one type of cancer. For instance, if RNA biomarker A is identified as being associated with cancers X, Y and Z, RNA biomarker B is identified as being associated with cancers X and Y, and RNA biomarker C is identified as being associated with cancers X and Z, by a process of elimination, a detection of the presence of RNA biomarkers A, B and C in a subject is indicative that the subject has cancer X. The disclosure thus includes the individual RNA biomarker provided in TABLE 1 (SEQ ID NO: 1 through SEQ ID NO: 1543) and biomarker combinations as set forth herein, and their use in methods and kits described herein.

[0180] Accordingly, methods are provided for diagnosing cancer in a subject, by determining the level of two or more small non-coding RNAs in a sample from the subject, wherein a difference in the level of the small non-coding RNAs versus that in a normal subject (as determined relative to a suitable control) is indicative of cancer in the subject. In some embodiments, the small non-coding RNAs include one or more of small non-coding RNAs provided in TABLE 1 (SEQ ID NO: 1 through SEQ ID NO: 1543). In some embodiments, the type(s) of cancer thus diagnosed is/are the one(s) provided in TABLE 1 as being associated with each individual small non-coding RNA provided in TABLE 1 (SEQ ID NO: 1 through SEQ ID NO: 1543). In some embodiments, the type(s) of cancer thus diagnosed is/are the one(s) provided in TABLE 2 as being associated with each individual small non-coding RNA provided in TABLE 2 (SEQ ID NO: 1544 through SEQ ID NO: 6834).

[0181] Also provided is a method of diagnosing cancer in a subject by determining the levels of two or more small non-coding RNAs in a sample from the subject, comparing the levels of the two or more small non-coding RNAs in the sample to a set of data representing levels of the same small non-coding RNAs present in normal subjects and subjects having a particular type of cancer, and diagnosing the subject as having or not having that particular type of cancer based on the comparison. In such a method, the set of data serves as a suitable control or reference standard for comparison with the sample from the subject.

[0182] Comparison of the sample from the subject with the set of data may be assisted by a classification algorithm, which computes whether or not a statistically significant difference exists between the collective levels of the two or more small non-coding RNAs in the sample, and the levels of the same small non-coding RNAs present in normal subjects or subjects having cancer.

### Generation of Classification Algorithms for Qualifying Cancer Status

[0183] In some embodiments, data that are generated using samples such as “known samples” can then be used to “train” a classification model. A “known sample” is a sample that has been pre-classified, e.g., classified as being derived from a normal subject or from a subject having a particular type of cancer. The data that are derived from the spectra and are used to form the classification model can be referred to as a “training data set.” Once trained, the classification model can recognize patterns in data derived from spectra generated using unknown samples. The classification model can then be used to classify the unknown samples into classes. This can be useful, for example, in predicting whether or not a particular biological sample is associated with a certain biological condition (e.g., diseased versus non-diseased).

[0184] In some embodiments, data for the training data set that is used to form the classification model can be obtained directly from quantitative PCR (for example, Ct values obtained using the double delta Ct method), or from high-throughput expression profiling, such as microarray analysis (for example, total counts or normalized counts from a small non-coding RNA expression assay).

[0185] Classification models can be formed using any suitable statistical classification (or “learning”) method that attempts to segregate bodies of data into classes based on objective parameters present in the data. Classification methods may be either supervised or unsupervised. Examples of supervised and unsupervised classification processes are described in Jain, “Statistical Pattern Recognition: A Review,” IEEE Transactions on Pattern Analysis and Machine Intelligence, Vol. 22, No. 1, January 2000, the teachings of which are incorporated by reference.

[0186] In supervised classification, training data containing examples of known categories are presented to a learning mechanism, which learns one or more sets of relationships that define each of the known classes. New data may then be applied to the learning mechanism, which then classifies the new data using the learned relationships. Examples of supervised classification processes include linear regression processes (e.g., multiple linear regression (MLR), partial least squares (PLS) regression and principal components regression (PCR)), binary decision trees (e.g., recursive partitioning processes such as CART—classification and regression trees), artificial neural networks such as back propagation networks, discriminant analyses (e.g., Bayesian classifier or Fischer analysis), logistic classifiers, and support vector classifiers (support vector machines).

[0187] In other embodiments, the classification models that are created can be formed using unsupervised learning methods. Unsupervised classification attempts to learn classifications based on similarities in the training data set, without pre-classifying the spectra from which the training data set was derived. Unsupervised learning methods include cluster analyses. A cluster analysis attempts to divide the data into “clusters” or groups that ideally should have members that are very similar to each other, and very dissimilar to members of other clusters. Similarity is then measured using some distance metric, which measures the distance between data items, and clusters together data items that are closer to each other. Clustering techniques include the MacQueen's K-means algorithm and the Kohonen's Self-Organizing Map algorithm. Learning algorithms asserted for use in classifying biological information are described, for example, in PCT International Publication No. WO 01/31580 (Barnhill et al., “Methods and devices for identifying patterns in biological systems and methods of use thereof”), U.S. application publication No. 2002/0193950 A1 (Gavin et al, “Method or analyzing mass spectra”), U.S. application publication No. 2003/0004402 A1 (Hitt et al., “Process for discriminating between biological states based on hidden patterns from biological data”), and U.S. application publication No. 2003/0055615 A1 (Zhang and Zhang, “Systems and methods for processing biological expression data”). The contents of the foregoing patent applications are incorporated herein by reference in their entireties.

[0188] The classification models can be formed on and used on any suitable digital computer. Suitable digital computers include micro, mini, or large computers using any standard or specialized operating system, such as a Unix, WINDOWS or LINUX based operating system.

[0189] The training data set(s) and the classification models can be embodied by computer code that is executed or used by a digital computer. The computer code can be stored on any suitable computer readable media including optical or magnetic disks, sticks, tapes, etc., and can be written in any suitable computer programming language including C, C++, visual basic, etc.

[0190] The learning algorithms described above can be used for developing classification algorithms for small non-coding RNA biomarkers for various types of cancer. The classification algorithms can, in turn, be used in diagnostic tests by providing diagnostic values (e.g., cut-off points) for biomarkers used singly or in combination.

### Additional Diagnostic Tests

[0191] The level of small non-coding RNA biomarkers indicative of various types of cancer may be used as a stand-alone diagnostic indicator of cancer in a subject. Optionally, the methods may include the performance of at least one additional test to facilitate the diagnosis of cancer. For example, other tests in addition to determining the level of one or more small non-coding RNA biomarkers in order to facilitate a diagnosis of cancer may be performed. Any other test or combination of tests used in clinical practice to facilitate a diagnosis of cancer may be used in conjunction with the small non-coding RNA biomarkers described herein.

### Methods of Treatment

[0192] In some embodiments, where a subject is diagnosed with a particular type of cancer by the methods described herein, the present disclosure further provides methods of treating the subject identified to have cancer. Accordingly, in some embodiments, the disclosure relates to a method of treating cancer in a subject, comprising determining the level of at least one small non-coding RNA biomarker in a sample from the subject, wherein a difference in the level of at least one small non-coding RNA biomarker versus that in a normal subject as determined relative to a suitable control is indicative of cancer in the subject, and administering a therapeutically effective amount of a cancer therapeutic to the subject. In another embodiments, the disclosure relates to a method of treating a subject having cancer, comprising identifying a subject having cancer in which the level of at least one small non-coding RNA biomarker in a sample from the subject is different (e.g., increased) versus that in a normal subject as determined relative to a suitable control, and administering a therapeutically effective amount of a cancer therapeutic to the subject.

[0193] In some embodiments, the disclosure relates to a method of treating lung cancer in a subject, comprising determining the level of at least one small non-coding RNA biomarker chosen from SEQ ID NO: 121 and 241-593 in a sample from the subject, wherein a difference in the level of the at least one small non-coding RNA biomarker versus that in a normal subject as determined relative to a suitable control is indicative of lung cancer in the subject, and administering a therapeutically effective amount of a cancer therapeutic to the subject. In some embodiments, the disclosure relates to a method of treating breast cancer in a subject, comprising determining the level of at least one small non-coding RNA biomarker chosen from SEQ ID NO: 1-11 in a sample from the subject, wherein a difference in the level of the at least one small non-coding RNA biomarker versus that in a normal subject as determined relative to a suitable control is indicative of breast cancer in the subject, and administering a therapeutically effective amount of a cancer therapeutic to the subject. In some embodiments, the disclosure relates to a method of treating prostate cancer in a subject, comprising determining the level of at least one small non-coding RNA biomarker chosen from SEQ ID NO: 1367 through SEQ ID NO: 1423 in a sample from the subject, wherein a difference in the level of the at least one small non-coding RNA biomarker versus that in a normal subject as determined relative to a suitable control is indicative of prostate cancer in the subject, and administering a therapeutically effective amount of a cancer therapeutic to the subject. In some embodiments, the disclosure relates to a method of treating colon cancer in a subject, comprising determining the level of at least one small non-coding RNA biomarker chosen from SEQ ID NO: 12-172 in a sample from the subject, wherein a difference in the level of the at least one small non-coding RNA biomarker versus that in a normal subject as determined relative to a suitable control is indicative of colon cancer in the subject, and administering a therapeutically effective amount of a cancer therapeutic to the subject. In some embodiments, the disclosure relates to a method of treating rectal cancer in a subject, comprising determining the level of at least one small non-coding RNA biomarker chosen from SEQ ID NO: 1191 and 1424-1543 in a sample from the subject, wherein a difference in the level of the at least one small non-coding RNA biomarker versus that in a normal subject as determined relative to a suitable control is indicative of rectal cancer in the subject, and administering a therapeutically effective amount of a cancer therapeutic to the subject. In some embodiments, the disclosure relates to a method of treating pancreatic cancer in a subject, comprising determining the level of at least one small non-coding RNA biomarker chosen from SEQ ID NO: 261, 264, 315, 494 and 1057-1366 in a sample from the subject, wherein a difference in the level of the at least one small non-coding RNA biomarker versus that in a normal subject as determined relative to a suitable control is indicative of pancreatic cancer in the subject, and administering a therapeutically effective amount of a cancer therapeutic to the subject. In some embodiments, the disclosure relates to a method of treating liver cancer in a subject, comprising determining the level of at least one small non-coding RNA biomarker chosen from SEQ ID NO: 148 and 173-240 in a sample from the subject, wherein a difference in the level of the at least one small non-coding RNA biomarker versus that in a normal subject as determined relative to a suitable control is indicative of liver cancer in the subject, and administering a therapeutically effective amount of a cancer therapeutic to the subject. In some embodiments, the disclosure relates to a method of treating ovarian cancer in a subject, comprising determining the level of at least one small non-coding RNA biomarker chosen from SEQ ID NO: 594-1056 in a sample from the subject, wherein a difference in the level of the at least one small non-coding RNA biomarker versus that in a normal subject as determined relative to a suitable control is indicative of ovarian cancer in the subject, and administering a therapeutically effective amount of a cancer therapeutic to the subject. In some embodiments, the methods of the disclosure comprise a step of detecting, wherein the step of detecting the oncRNA is detected by sequencing isolated RNA from a sample or by amplifying a reverse transcribed DNA corresponding to the oncRNA in the sample.

[0194] The term “cancer therapeutic” includes, for example, substances approved by the U.S. Food and Drug Administration for the treatment of cancer. For instance, drugs approved to treat breast cancer include, but are not limited to, Abemaciclib, Abitrexate (Methotrexate), Abraxane (Paclitaxel Albumin-stabilized Nanoparticle Formulation), Ado-Trastuzumab Emtansine, Afinitor (Everolimus), Anastrozole, Aredia (Pamidronate Disodium), Arimidex (Anastrozole), Aromasin (Exemestane), Capecitabine, Clafen (Cyclophosphamide), Cyclophosphamide, Cytoxan (Cyclophosphamide), Docetaxel, Doxorubicin Hydrochloride, Ellence (Epirubicin Hydrochloride), Epirubicin Hydrochloride, Eribulin Mesylate, Everolimus, Exemestane, 5-FU (Fluorouracil Injection), Fareston (Toremifene), Faslodex (Fulvestrant), Femara (Letrozole), Fluorouracil Injection, Folex (Methotrexate), Folex PFS (Methotrexate), Fulvestrant, Gemcitabine Hydrochloride, Gemzar (Gemcitabine Hydrochloride), Goserelin Acetate, Halaven (Eribulin Mesylate), Herceptin (Trastuzumab), Ibrance (Palbociclib), Ixabepilone, Ixempra (Ixabepilone), Kadcyla (Ado-Trastuzumab Emtansine), Kisqali (Ribociclib), Lapatinib, Ditosylate, Letrozole, Megestrol Acetate, Methotrexate, Methotrexate LPF (Methotrexate), Mexate (Methotrexate), Mexate-AQ (Methotrexate), Neosar (Cyclophosphamide), Neratinib Maleate, Nerlynx (Neratinib Maleate), Nolvadex (Tamoxifen Citrate), Paclitaxel, Paclitaxel Albumin-stabilized Nanoparticle Formulation, Palbociclib, Pamidronate Disodium, Perjeta (Pertuzumab), Pertuzumab, Ribociclib, Tamoxifen Citrate, Taxol (Paclitaxel), Taxotere (Docetaxel), Thiotepa, Toremifene, Trastuzumab, Tykerb (Lapatinib Ditosylate), Velban (Vinblastine Sulfate), Velsar (Vinblastine Sulfate), Verzenio (Abemaciclib), Vinblastine Sulfate, Xeloda (Capecitabine), Zoladex (Goserelin Acetate).

[0195] The cancer therapeutics may be administered to a subject using a pharmaceutical composition. Suitable pharmaceutical compositions comprise a pharmaceutically effective amount of a cancer therapeutic (or a pharmaceutically acceptable salt or ester thereof), and optionally comprise a pharmaceutically acceptable carrier. In certain embodiments, these compositions optionally further comprise one or more additional therapeutic agents.

[0196] As used herein, the term “pharmaceutically acceptable salt” refers to those salts which are, within the scope of sound medical judgment, suitable for use in contact with the tissues of humans and lower animals without undue toxicity, irritation, allergic response and the like, and are commensurate with a reasonable benefit/risk ratio. Pharmaceutically acceptable salts of amines, carboxylic acids, and other types of compounds, are well known in the art. For example, S. M. Berge, et al. describe pharmaceutically acceptable salts in detail in J. Pharmaceutical Sciences, 66: 1-19 (1977), incorporated herein by reference. The salts can be prepared in situ during the final isolation and purification of the compounds, or separately by reacting a free base or free acid function with a suitable reagent. For example, a free base function can be reacted with a suitable acid. Furthermore, where the compounds carry an acidic moiety, suitable pharmaceutically acceptable salts thereof may, include metal salts such as alkali metal salts, e.g., sodium or potassium salts, and alkaline earth metal salts, e.g., calcium or magnesium salts. In some embodiments, the cancer therapeutic is a pharmaceutically acceptable salt.

[0197] The term “pharmaceutically acceptable ester,” as used herein, refers to esters that hydrolyze in vivo and include those that break down readily in the human body to leave the parent compound or a salt thereof. Suitable ester groups include, for example, those derived from pharmaceutically acceptable aliphatic carboxylic acids, particularly alkanoic, alkenoic, cycloalkanoic and alkanedioic acids, in which each alkyl or alkenyl moiety advantageously has not more than 6 carbon atoms. In some embodiments, the cancer therapeutic is a pharmaceutically acceptable ester.

[0198] As described above, the pharmaceutical compositions may additionally comprise a pharmaceutically acceptable carrier. The term “pharmaceutically acceptable carrier” includes any and all solvents, diluents, or other liquid vehicle, dispersion or suspension aids, surface active agents, isotonic agents, thickening or emulsifying agents, preservatives, solid binders, lubricants and the like, suitable for preparing the particular dosage form desired. Remington's Pharmaceutical Sciences, Sixteenth Edition, E. W. Martin (Mack Publishing Co., Easton, Pa., 1980) discloses various carriers used in formulating pharmaceutical compositions and known techniques for the preparation thereof. Some examples of materials which can serve as pharmaceutically acceptable carriers include, but are not limited to, sugars such as lactose, glucose and sucrose; starches such as corn starch and potato starch; cellulose and its derivatives such as sodium carboxymethyl cellulose, ethyl cellulose and cellulose acetate; powdered tragacanth; malt; gelatine; talc; excipients such as cocoa butter and suppository waxes; oils such as peanut oil, cottonseed oil; safflower oil, sesame oil; olive oil; corn oil and soybean oil; glycols; such as propylene glycol; esters such as ethyl oleate and ethyl laurate; agar, buffering agents such as magnesium hydroxide and aluminum hydroxide; alginic acid; pyrogen free water, isotonic saline; Ringer's solution; ethyl alcohol, and phosphate buffer solutions, as well as other non-toxic compatible lubricants such as sodium lauryl sulfate and magnesium stearate, as well as coloring agents, releasing agents, coating agents, sweetening, flavoring and perfuming agents, preservatives and antioxidants can also be present in the composition, according to the judgment of the formulator.

[0199] Compositions for use in the present disclosure may be formulated to have any concentration of the cancer therapeutic desired. In some embodiments, the composition is formulated such that it comprises a therapeutically effective amount of the cancer therapeutic.

[0200] The disclosure generally relates to a method of diagnosing a subject with a benign, pre-malignant, or malignant hyperproliferative cell comprising: detecting the presence, absence, and/or quantity of at least one non-coding RNA or functional fragment thereof in a sample. In some embodiments, the step of detecting comprise exposing a sample from a subject (e.g., a human subject) to one or a plurality of probes, each probe capable of binding one or a plurality of non-coding RNA molecules in the sample. In some embodiments, the probe is a labeled nucleic acid molecule (DNA, RNA or hybrid thereof) that comprises at least about 70%, 80%, 85%, 90%, 95%, 96%, 97%, 98%, 99% or 100% sequence identity to the complement of any nucleic acid sequences of TABLE 1 (SEQ ID NO: 1 through SEQ ID NO: 1543). In some embodiments, the probe is a labeled nucleic acid molecule (DNA, RNA or hybrid thereof) that is an RNA sequence comprising at least about 70%, 80%, 85%, 90%, 95%, 96%, 97%, 98%, 99% or 100% sequence identity to the complement of any nucleic acid sequences of TABLE 1 (SEQ ID NO: 1 through SEQ ID NO: 1543), where each thymine is replaced with a uracil. In some embodiments, the probe is a labeled nucleic acid molecule (DNA, RNA or hybrid thereof) that comprises at least about 70%, 80%, 85%, 90%, 95%, 96%, 97%, 98%, 99% or 100% sequence identity to the DNA sequences of TABLE 2. In some embodiments, the plurality of probes are one or a combination of labeled nucleic acid sequences that are an RNA or DNA complementary to a nucleic acid sequence comprising at least about 70%, 80%, 85%, 90%, 95%, 96%, 97%, 98%, 99% or 100% sequence identity to any nucleic acid sequences of TABLE 2 (SEQ ID NO: 1544 through SEQ ID NO: 18676). In some embodiments, the plurality of probes are one or a combination of labeled nucleic acid sequences that are an RNA or DNA complementary to a nucleic acid sequence comprising at least about 70%, 80%, 85%, 90%, 95%, 96%, 97%, 98%, 99% or 100% sequence identity to any nucleic acid sequences of TABLE 1 (SEQ ID NO: 1 through SEQ ID NO: 1543). In some embodiments, the plurality of probes are one or a combination of labeled nucleic acid sequences chosen from any nucleic acid sequences of TABLE 1 (SEQ ID NO: 1 through SEQ ID NO: 1543). In some embodiments, the plurality of probes comprise one or a combination of nucleic acid sequences complementary to the nucleic acid sequences chosen from any nucleic acid sequences of TABLE 1 or TABLE 2 (SEQ ID NO: 1 through SEQ ID NO:18676).

[0201] In any of the disclosed method embodiments, the subject may be a human diagnosed with or suspected as having cancer. In any of the disclosed method embodiments, wherein the step of detecting is preceded by a step of acquiring a sample from the subject.

[0202] In some embodiments, the probe or plurality of probes are one or a plurality of antibodies or antibody fragments comprising a CDR that binds to a nucleic acid molecule (DNA, RNA or hybrid thereof) that comprises at least 70%, 80%, 85%, 90%, 95%, 96%, 97%, 98%, 99% or 100% sequence identity to any nucleic acid sequences of TABLE 1 (SEQ ID NO: 1 through SEQ ID NO: 18676). In some embodiments, the probe or plurality of probes are one or a plurality of antibodies or antibody fragments comprising a CDR that binds to a nucleic acid molecule (DNA, RNA or hybrid thereof) that comprises at least about 70%, 80%, 85%, 90%, 95%, 96%, 97%, 98%, 99% or 100% sequence identity to any nucleic acid sequences of TABLE 1 (SEQ ID NO: 1 through SEQ ID NO: 18676), wherein each of sequences are modified such that the thymines in each sequence are replaced with a uracil. In some of the embodiments, the methods further comprise isolating RNA from the sample before exposing the sample to one or a plurality of probes. In some embodiments, the method comprises detecting or quantifying an amount of non-coding RNAs, such as small RNAs (smRNAs), in a sample by performing semiquantitative or quantitative PCR or sequencing analysis of the non-coding RNAs in a sample. Probes may be immobilized to a solid support such as an ELISA plate, plastic, slide, microarray, silica chip or other surface such that the single-strand nucleotide sequences are exposed to a sample comprising non-coding RNAs from a subject. The probes may comprise, in some embodiments, from about 5 to bout 100 nucleotides in length and comprise any of the sequences provided in TABLE 1 (SEQ ID NO: 1 through SEQ ID NO: 1543) or any complementary sequence in RNA or DNA form of the sequences set forth in TABLE 1 (SEQ ID NO: 1 through SEQ ID NO: 1543). In any of the disclosed method embodiments, the step of detecting the presence, absence, and/or quantity of at least one small non-coding RNA or functional fragments thereof having at least about 70% sequence identity to one of the non-coding RNAs in a sample comprises using a chemoluminescent probe, fluorescent probe, and/or fluorescence microscopy, calculating the presence or quantity by correlating the signal of the detectable probe to the presence of the non-coding RNA.

[0203] In some embodiments, any of the methods disclosed herein further comprise a step of correlating the presence or quantity of one or more small non-coding RNAs such as those disclosed in TABLE 1 (SEQ ID NO: 1 through SEQ ID NO: 1543) or any combination thereof to the likelihood that the subject has cancer. In some embodiments, any of the methods disclosed herein further comprise a step of correlating the presence or quantity of one or more small non-coding RNAs such as those disclosed in TABLE 2 (SEQ ID NO: 1544 through SEQ ID NO: 6834) or any combination thereof to the likelihood that the subject has cancer In some embodiments, the disclosure relates to a method of preparing, isolating or assessing a ribonucleic acid (RNA) fraction from a subject useful for analyzing a miRNA involved in cancer comprising: extracting RNA from a substantially cell-free sample of blood plasma or blood serum of a subject to obtain RNA pools; (b) producing a fraction of the RNA extracted in (a) by: (i) sequence discrimination of the RNA; and (ii) selectively removing non-coding RNA by exposing one or a plurality of probes to the non-coding RNA, wherein the non-coding RNA after (b) comprises one or a plurality of RNAs disclosed in TABLE 1; and (c) analyzing the non-coding RNA in the fraction of RNA produced in (b). In some embodiments, the step of analyzing comprises normalizing the amount of non-coding RNA in the sample as compared to a control amount of non-coding RNA from a control sample and determining whether the subject has cancer by comparing the normalized presence, absence or quantity of non-coding RNA in the sample to presence, absence or quantity of non-coding RNA in a control sample.

### Kits for Detection Small RNA Biomarkers

[0204] In another aspect, the present disclosure provides kits for diagnosing type of cancer, tissue of origin, and status or stage of the cancer in a subject, which kits are useful for determining the level of one or more small non-coding RNA biomarkers from TABLE 1 (SEQ ID NO: 1 through SEQ ID NO: 1543; wherein the sequences optionally comprise uracils in place of one, more than one, or all of the disclosed thymines), and combinations thereof. In some embodiments, the one or more small non-coding RNAs are selected from the biomarkers listed in TABLE 1 (SEQ ID NO: 1 through SEQ ID NO: 1543). Kits may include materials and reagents adapted to selectively detect the presence of a small non-coding RNA or group of small non-coding RNAs diagnostic for cancer in a sample of a subject. For example, in one embodiment, the kit may include a reagent that specifically hybridizes to a small non-coding RNA. Such a reagent may be a nucleic acid molecule in a form suitable for detecting the small non-coding RNA, for example, a probe or a primer. The kit may include reagents useful for performing an assay to detect one or more small non-coding RNAs, for example, reagents which may be used to detect one or more small non-coding RNAs in a qPCR reaction. The kit may likewise include a microarray useful for detecting one or more small non-coding RNAs.

[0205] In some embodiments, the kit may contain instructions for suitable operational parameters in the form of a label or product insert. For example, the instructions may include information or directions regarding how to collect a sample, how to determine the level of one or more small non-coding RNA biomarkers in a sample, and/or how to correlate the level of one or more small non-coding RNA biomarkers in a sample with the type of cancer, tissue of origin, and status or stage of the cancer of a subject.

[0206] In some embodiments, the kit can contain one or more containers with small non-coding RNA biomarker samples, to be used as reference standards, suitable controls, or for calibration of an assay to detect the biomarkers in a test sample.

[0207] Other embodiments are described in the following non-limiting Examples. Various publications, including patents, published applications, technical articles and scholarly articles are cited throughout the specification. Each of these cited publications is incorporated by reference herein in its entirety.

### EXAMPLES

### Example 1. A Systematic Search for Orphan Small Non-Coding RNAs in Cancers

[0208] Performing a systematic screen for small non-coding RNAs that are expressed by breast cancer but are absent from healthy normal, a set of 201 small non-coding RNAs were previously identified as being strongly associated with breast cancer but mostly undetectable in normal cells. See WO 2019/094780 published on May 16, 2019 and Fish et al., Nat. Med., 2018, 24:1743-1751 (incorporated herein by reference). Because these small non-coding RNA are cancer-associated but functionally unknown, they have been named “orphan non-coding RNAs” or “oncRNAs.” The approaches and concepts were expanded and applied across several cancers to examine the cancer-specific RNA landscape.

[0209] To identify pan-cancer orphan noncoding RNAs (oncRNAs) that are expressed in cancer cells but undetectable in normal tissue, a database was designed and a systemic approach using small-RNA (smRNA) sequencing datasets from The Cancer Genome Atlas (TCGA) was implemented. 11082 datasets were downloaded via the Genomic Data Center Data Portal in BAM format. The read sequences, along with the reads' normalized counts (counts-per-million), study metadata, and chromosomal coordinates, were then uploaded onto the database and then grouped based on their strand-specific sequences across all datasets. Following the aggregation, smRNAs with low-complexity sequences were eliminated from the database. The smRNAs were then grouped based on the tissue type in which they are present, allowing for overlaps across different tissues. For each tissue type, the proportion of normal, undiseased samples and the proportion of cancer samples in which the smRNAs were present were calculated. Small-RNAs that were present in more than 10% of the normal samples for at least one tissue type or present in less than 10% of the cancer samples for every tissue type were filtered out. The remaining smRNAs were again grouped based on tissue type, allowing for overlaps. For each tissue type, a one-sided Fisher Exact Test was used to compare the presence and absence of each smRNA within the tissue group between the tissue-specific cancer samples and the normal samples of all tissue types. The smRNAs with corrected fdr<0.1 in at least one of the tissue-specific tests were selected. There were 1,543 smRNAs that satisfied all these criteria in the oncRNA database. The sequence of each of the 1,543 smRNAs thus identified are provided in TABLE 1 below together with their respective cancerous indications.

TABLE 1

| SEQ ID | | |
|---|---|---|
| NO: | Sequence | Cancers |
| 1 | CAGCTTCCATGACTCCTGATGG | acute myeloid leukemia, breast invasive |
| | | carcinoma |
| 2 | CATAGTGTAATGGTTAGCACTCTGGACT | adrenocortical carcinoma, breast invasive |
| | | carcinoma |
| 3 | AACTGATACTGGACAAGGA | breast invasive carcinoma |
| 4 | ATGCCATGATGCTAGACTCCTGAGCAGA | breast invasive carcinoma |
| 5 | GCATGGGTGGTTCAGTGGTAGAAGTCTCGC | breast invasive carcinoma |
| 6 | GTAGTCGTGGCCGAGTGTTAAGGC | breast invasive carcinoma |
| 7 | GTTATAAGCTAATTTTTTGTAAGC | breast invasive carcinoma |
| 8 | TATAAGCTAATTTTTTGTAAGC | breast invasive carcinoma |
| 9 | TGGGTCGGAAAAAAGGACTTTTT | breast invasive carcinoma, esophageal |
| | | carcinoma |
| 10 | TGGTAGAATTCACTG | breast invasive carcinoma |
| 11 | TTTGGCAATGGTAGAACTCACACTATT | breast invasive carcinoma |
| 12 | CACATGGGTCGGAAAAAAGG | adrenocortical carcinoma, colon |
| | | adenocarcinoma |
| 13 | ACATGGGTCGGAAAAAAGGA | adrenocortical carcinoma, colon |
| | | adenocarcinoma |
| 14 | AGCCTGGTCCACATGGGTCGGAA | adrenocortical carcinoma, colon |
| | | adenocarcinoma |
| 15 | CATGGGTCGGAAAAAAGG | adrenocortical carcinoma, colon |
| | | adenocarcinoma |
| 16 | GGGTCGGAAAAAAGGACTTTT | adrenocortical carcinoma, colon |
| | | adenocarcinoma |
| 17 | TGCTGTGATGACTATCTTAGGACACCT | adrenocortical carcinoma, colon |
| | | adenocarcinoma |
| 18 | TGGGTCGGAAAAAAGGACTT | adrenocortical carcinoma, colon |
| | | adenocarcinoma |
| 19 | TGGGTCGGAAAAAAGGACTTTTTT | adrenocortical carcinoma, colon |
| | | adenocarcinoma |
| 20 | AAACTGTAATTACTTTTGGACA | colon adenocarcinoma |
| 21 | AAAGGTCCCTGGTTCGTTCCCG | colon adenocarcinoma |
| 22 | AACACTGTCTGGTAAAGATGGA | colon adenocarcinoma |
| 23 | AACGCCTCGGGGACCTGTTTGA | colon adenocarcinoma |
| 24 | AAGGTCCTGAGTTCGTACCTCAGAGGG | colon adenocarcinoma |
| 25 | ACACGTGTCGGTACCGGAG | colon adenocarcinoma |
| 26 | ACAGAATCGCCGGACAGGTGGC | colon adenocarcinoma |
| 27 | ACAGACCAAGGAGAACTGGAG | colon adenocarcinoma |
| 28 | ACCGCGCCGGGCTGCGGG | colon adenocarcinoma |
| 29 | ACCTACAGAGCTCATGGTCGG | colon adenocarcinoma |
| 30 | ACCTCGTGGCGCAATGGTAGCGC | colon adenocarcinoma |
| 31 | ACTAACGGAACGTCAGGAAG | colon adenocarcinoma |
| 32 | ACTATGGAACTTTCCCCC | colon adenocarcinoma |
| 33 | ACTCGGGCTGTAGAAACTG | colon adenocarcinoma |
| 34 | ACTTGCCAGATACGGGGG | colon adenocarcinoma |
| 35 | AGACGCGACCTCAGATCAGACGTGGCGA | colon adenocarcinoma |
| 36 | AGAGCTACTGAACCAGAG | colon adenocarcinoma |
| 37 | AGCACCCCGTGCTGCTGACCGAGG | colon adenocarcinoma |
| 38 | AGCTTATCAGACTCATGTTGA | colon adenocarcinoma |
| 39 | AGGAGGTGGTTAGGAATGTGG | colon adenocarcinoma |
| 40 | AGGTACAGGCCTGGAGA | colon adenocarcinoma |
| 41 | AGTCCGCCGAGGGCGCACCAC | colon adenocarcinoma |
| 42 | AGTGGCTAAGTTCTGA | colon adenocarcinoma |
| 43 | AGTGGTTGATCGTTGG | colon adenocarcinoma |
| 44 | ATAGCTCAGTGGTAGAGCATTTGACTATCG | colon adenocarcinoma |
| 45 | ATCATTATTTGCTGCTCTA | colon adenocarcinoma |
| 46 | ATCGTAGGACAGTGAAG | colon adenocarcinoma |
| 47 | ATGAACGAGATTCCCACT | colon adenocarcinoma |
| 48 | ATGATGAAATCACCCAAAATA | colon adenocarcinoma |
| 49 | ATGGGTCGGAAAAAAGG | colon adenocarcinoma |
| 50 | ATGGTTAGCACTCTGGACTCTGAATCGT | colon adenocarcinoma |
| 51 | ATTGGTCGTGGTTGTAGGA | colon adenocarcinoma |
| 52 | ATTGTCCAGGCTCTAGAAC | colon adenocarcinoma |
| 53 | CACTGTCTGGTAAAGATGGCAT | colon adenocarcinoma |
| 54 | CAGGACTGCTCACTACTG | colon adenocarcinoma |
| 55 | CAGTGCATCACAGAACTTTGTA | colon adenocarcinoma |
| 56 | CATGGGTCAGTCGGTCCTGAGAGATCGT | colon adenocarcinoma |
| 57 | CCCAGGGTCGTGGGTTCG | colon adenocarcinoma |
| 58 | CCGCGCGCCGGCCGGGCG | colon adenocarcinoma |
| 59 | CCTCCCCGGAGGGGGCGG | colon adenocarcinoma |
| 60 | CGAGGTGGCCGAGTGGTT | colon adenocarcinoma |
| 61 | CGATCACTCCCGTTGAG | colon adenocarcinoma |
| 62 | CGATGTGATTTCTGCCCCGT | colon adenocarcinoma |
| 63 | CGCAAGACGGACCAGAGCGAAAGCA | colon adenocarcinoma |
| 64 | CGCTGTCGGTGAGTTTT | colon adenocarcinoma |
| 65 | CGGTTTGGGTCCGAGAGGTCCCG | colon adenocarcinoma |
| 66 | CGTGGATACCCTGGGA | colon adenocarcinoma |
| 67 | CTAAATGATGCAACTCTGACT | colon adenocarcinoma |
| 68 | CTCGACCGGACCGGTGC | colon adenocarcinoma |
| 69 | CTCTGAGTAAGGGGAGGAC | colon adenocarcinoma, kidney renal clear cell |
| | | carcinoma, uterine corpus endometrial |
| | | carcinoma |
| 70 | CTCTGCGTATGTGGACGGC | colon adenocarcinoma |
| 71 | CTCTGTACGGCTTCGGCGGTT | colon adenocarcinoma |
| 72 | CTGAAGAAGAGGAAACTG | colon adenocarcinoma |
| 73 | CTGAAGGAGCTGATCCAGAAG | colon adenocarcinoma |
| 74 | CTGACTTCTGAGGAAGAGGC | colon adenocarcinoma |
| 75 | CTGAGAGAACCAGACGGA | colon adenocarcinoma |
| 76 | CTGCGGGATGAACCGAA | colon adenocarcinoma |
| 77 | CTGCGGGATGAACCGAACGCCGGGTT | colon adenocarcinoma |
| 78 | CTGGGAATACCGGGTGCTGTAGGCTTCGT | colon adenocarcinoma |
| 79 | CTGTGGGATTATGACTGAACGCCTCGTATG | colon adenocarcinoma |
| 80 | CTTAATGATGACTGTTTTA | colon adenocarcinoma |
| 81 | CTTCTCACTACTGCACTTGACTAGTTCGT | colon adenocarcinoma |
| 82 | CTTCTGACACATACTTTTCT | colon adenocarcinoma |
| 83 | CTTCTGCGTCCCGCCCGCCGC | colon adenocarcinoma |
| 84 | CTTGCAGTTTGATCTCAGACTG | colon adenocarcinoma |
| 85 | CTTTCCCTAGGGCTGGATG | colon adenocarcinoma |
| 86 | CTTTTAATGGATAACAGCTAT | colon adenocarcinoma |
| 87 | GAAACCTCTGCGCCATGAGAGC | colon adenocarcinoma |
| 88 | GAAGGACTGTGGAAGTTG | colon adenocarcinoma |
| 89 | GAAGGTCGTGAGTTCGTTCCT | colon adenocarcinoma |
| 90 | GACCCAGTGGCCTAATGGATAAGGCATCGT | colon adenocarcinoma |
| 91 | GACCCTTAGCGGTGGATCACTCGGCTCGT | colon adenocarcinoma |
| 92 | GACGACCTGCTTCTGG | colon adenocarcinoma |
| 93 | GACTCTTAGCGGTGGATCACTCGGCTAGT | colon adenocarcinoma |
| 94 | GAGAGTTCAAGAGGGCGTG | colon adenocarcinoma |
| 95 | GAGGCGTGGGTTCGTATCC | colon adenocarcinoma |
| 96 | GAGGTCCCGGGTTCAGATCCC | colon adenocarcinoma |
| 97 | GAGTTCTGGGCTGTAGTGCGCCA | colon adenocarcinoma |
| 98 | GATATTCCTGGACTGACTGAT | colon adenocarcinoma |
| 99 | GATCCCGAGGCCTCTCCAGT | colon adenocarcinoma |
| 100 | GATCGAGGAGCTCACAGTCTAGT | colon adenocarcinoma |
| 101 | GATCTGGCTGCGACATCTGT | colon adenocarcinoma |
| 102 | GATGACCGTGGGACCTGCC | colon adenocarcinoma |
| 103 | GATGGACGAGAATCACGAGC | colon adenocarcinoma |
| 104 | GCCCCCCCCCCCTCGCGGC | colon adenocarcinoma |
| 105 | GCCCGGATAGCTCAGTCGGTAGAGCATCGT | colon adenocarcinoma |
| 106 | GCCCGGCTAGCTCAGTCGGTAGAGCATCGT | colon adenocarcinoma |
| 107 | GCGCGTTCGGCTGTTAACC | colon adenocarcinoma |
| 108 | GCGGAGCGAGCGCACGGGGTCG | colon adenocarcinoma |
| 109 | GCGGCGGCGGCGACTCTGGACGCGAGCCAC | colon adenocarcinoma |
| 110 | GCTGATAGACTTGAACTG | colon adenocarcinoma |
| 111 | GCTGCATGTGGCAGTCTG | colon adenocarcinoma |
| 112 | GCTTATCAGCCTGATGTTGA | colon adenocarcinoma |
| 113 | GGAAGAGCCCAGCGCCGAA | colon adenocarcinoma |
| 114 | GGAATTACAAGACAGTTG | colon adenocarcinoma |
| 115 | GGACCGAAACCCCCCCC | colon adenocarcinoma, head and neck |
| | | squamous cell carcinoma |
| 116 | GGAGATTTCAACTTAACTTGACAG | colon adenocarcinoma |
| 117 | GGAGCCATTGTGGCTCAGGCCGG | colon adenocarcinoma |
| 118 | GGAGTTGTTCCTTTGGCCAC | colon adenocarcinoma |
| 119 | GGATGAGAACTCTAAT | colon adenocarcinoma |
| 120 | GGATGGCCGAGTGGTTAAGGC | colon adenocarcinoma |
| 121 | GGCACTGGTAGAATTCACTGA | colon adenocarcinoma, lung squamous cell |
| | | carcinoma |
| 122 | GGCCGCGTGGCCTAATGGATAAGTCGTATG | colon adenocarcinoma |
| 123 | GGCTCGTTGGTCTAGGGGTATGATTCGT | colon adenocarcinoma |
| 124 | GGCTCGTTGGTCTAGGGGTATGATTTTCGT | colon adenocarcinoma |
| 125 | GGCTCGTTGGTCTAGTGGTATGATTATCGT | colon adenocarcinoma |
| 126 | GGGCAAGTCTGGTGCCAGCA | colon adenocarcinoma |
| 127 | GGGTCGGAAAAAAGGACTTT | colon adenocarcinoma |
| 128 | GGGTCGGAAAAAAGGATTTTT | colon adenocarcinoma |
| 129 | GGGTTCAGGTCCCTGTTCAG | colon adenocarcinoma |
| 130 | GGGTTCATGTCCCTGTCCAG | colon adenocarcinoma, head and neck |
| | | squamous cell carcinoma |
| 131 | GGTAGAACTCACACTG | colon adenocarcinoma |
| 132 | GGTCGGAAAAAAGGATTT | colon adenocarcinoma |
| 133 | GGTTCGGATCCCACTCCTGA | colon adenocarcinoma |
| 134 | GGTTCGGGTCCCTTC | colon adenocarcinoma |
| 135 | GGTTTGGTTCCGAGAGGTCCCG | colon adenocarcinoma |
| 136 | GTAGCAAAGTGCTTACAGTGCAG | colon adenocarcinoma |
| 137 | GTCACTAGTGGTTCCGTT | colon adenocarcinoma |
| 138 | GTCATTTCGATGGCGTGG | colon adenocarcinoma |
| 139 | GTCGGAAAAAAGGACTTTT | colon adenocarcinoma |
| 140 | GTGACTGGAAGGGCCTGA | colon adenocarcinoma |
| 141 | GTGCAAATCTATGCAAAACTGA | colon adenocarcinoma |
| 142 | GTGCTGATAACGCCAAGGTCGCG | colon adenocarcinoma |
| 143 | GTTGACCCGGGTTCGTTTC | colon adenocarcinoma |
| 144 | GTTGTGGGCTGTAGTGCGCT | colon adenocarcinoma |
| 145 | TCCCCAAATTAATACTTTTATA | colon adenocarcinoma |
| 146 | TCGTTGTAAGTTGAAAATATAG | colon adenocarcinoma |
| 147 | TCTGGGCTGTAGTGCGCTATGCCGATCGT | colon adenocarcinoma |
| 148 | TCTGTGAGAACTAGGAGC | colon adenocarcinoma, liver hepatocellular |
| | | carcinoma |
| 149 | TGAAAAGAACTTTGAAGAGAC | colon adenocarcinoma |
| 150 | TGATCAGAAAGCTGTGGA | colon adenocarcinoma |
| 151 | TGATGTAATGATTCTGC | colon adenocarcinoma |
| 152 | TGCAGATCTTGGTGGTAGTAGCAAATCGT | colon adenocarcinoma |
| 153 | TGCATCACAGAACTTTGTT | colon adenocarcinoma |
| 154 | TGCTGATCGGCTGTATG | colon adenocarcinoma |
| 155 | TGGAAGATCGAAAGACTG | colon adenocarcinoma |
| 156 | TGGAATGGAAATCCATTGGG | colon adenocarcinoma |
| 157 | TGGATTGGAAATCCATTG | colon adenocarcinoma, kidney renal clear cell |
| | | carcinoma |
| 158 | TGGATTTGAAATCCATTGGG | colon adenocarcinoma |
| 159 | TGGCACTGGCAGAATTCACTG | colon adenocarcinoma |
| 160 | TGGCGCAATGAAGGTGAAGG | colon adenocarcinoma |
| 161 | TGGGCTGTAGTGCGCTATGCCGATCGTATG | colon adenocarcinoma |
| 162 | TGGGTCGGAAAAAAGG | colon adenocarcinoma |
| 163 | TGGGTCGGAAAAAAGGA | colon adenocarcinoma |
| 164 | TGTAGTTTCCTGTTGTTGG | colon adenocarcinoma |
| 165 | TGTCATCTTCCTCATCGGTATCATCGTATG | colon adenocarcinoma |
| 166 | TGTTAGTGATGATTTTAAAA | colon adenocarcinoma |
| 167 | TTAGATCGCTGTGAAGGA | colon adenocarcinoma |
| 168 | TTCCAGGTTCGTCTCCTG | colon adenocarcinoma |
| 169 | TTCTGTGGAGCTGTGAAGGA | colon adenocarcinoma |
| 170 | TTGACCTCTGAATTGACAGCC | colon adenocarcinoma |
| 171 | TTGCTGCTGTGCAGAAG | colon adenocarcinoma |
| 172 | TTGGCAATGGTAGAACTCCCAC | colon adenocarcinoma |
| 173 | AGATCGGAACTGGTAGACT | cervical squamous cell carcinoma and |
| | | endocervical adenocarcinoma, liver |
| | | hepatocellular carcinoma |
| 174 | AACTGGCCCTCAAAGTCCCGATT | liver hepatocellular carcinoma |
| 175 | AATGATGTTGATCAAATGTCTG | liver hepatocellular carcinoma |
| 176 | AATGGTGAGCACTTTGGACTCTGT | liver hepatocellular carcinoma |
| 177 | ACTGTGATGAACTTCTGAGG | liver hepatocellular carcinoma, uterine corpus |
| | | endometrial carcinoma |
| 178 | AGCCATGATGATACCACTGAG | liver hepatocellular carcinoma, uterine corpus |
| | | endometrial carcinoma |
| 179 | AGGAGGACTGGGACCCATGAA | liver hepatocellular carcinoma |
| 180 | AGGTGACTGGTTAATAGAACTA | liver hepatocellular carcinoma |
| 181 | ATGGACTGAGCCATGCTACT | liver hepatocellular carcinoma |
| 182 | ATGTCTGACCTGAAATGAGCATGTAGACA | liver hepatocellular carcinoma |
| 183 | ATTAATGATGAGATATAACCGTGACTGAAG | liver hepatocellular carcinoma |
| 184 | ATTTCTGACGAGATCTTGGATGATGC | liver hepatocellular carcinoma |
| 185 | CAAAAGTAACTGTGGTTTTG | liver hepatocellular carcinoma |
| 186 | CAACACCAGTCGATGGGCTAAC | liver hepatocellular carcinoma, uterine corpus |
| | | endometrial carcinoma |
| 187 | CAACACCTGTCGATGGGCTGTCA | liver hepatocellular carcinoma |
| 188 | CAAGTCACTAGTGGTTCCGTGTAG | liver hepatocellular carcinoma |
| 189 | CACAGTGATGAACAAGACAGACCTGATG | liver hepatocellular carcinoma, uveal melanoma |
| 190 | CCAGATCGTCTGTGAACTCAGG | liver hepatocellular carcinoma |
| 191 | CCCCCACTGCTAAATTTGACGGG | liver hepatocellular carcinoma |
| 192 | CCTGGGTGATGATAAGCAAATGCTGACT | liver hepatocellular carcinoma |
| 193 | CGGGACTGAGCCATGCTAC | liver hepatocellular carcinoma |
| 194 | CGTGATGATGACTTGCTGAAC | liver hepatocellular carcinoma |
| 195 | CTAACCGATGAATTGACAGC | liver hepatocellular carcinoma |
| 196 | CTAGAGGAGCCTGTTCTGTACA | liver hepatocellular carcinoma |
| 197 | CTCACCTATGAATTGAC | liver hepatocellular carcinoma |
| 198 | CTGCAAAGGGAAGCCCTTTC | liver hepatocellular carcinoma |
| 199 | CTGCACTGAGCCATGCTACT | liver hepatocellular carcinoma |
| 200 | CTGGACTGAGCCATGCTAAGA | liver hepatocellular carcinoma |
| 201 | CTGGACTGAGCCATGCTACTGAC | liver hepatocellular carcinoma |
| 202 | CTGGACTGAGCCATGCTACTGAG | liver hepatocellular carcinoma |
| 203 | CTGGACTGAGCCATGCTACTGGAC | liver hepatocellular carcinoma |
| 204 | CTGGACTGAGCCATGCTACTGGAG | liver hepatocellular carcinoma |
| 205 | CTGGACTGAGCCATGCTACTGGAGA | liver hepatocellular carcinoma |
| 206 | CTGGACTGAGCCATGCTACTGGTTT | liver hepatocellular carcinoma |
| 207 | CTGGACTGAGCCATGCTTT | liver hepatocellular carcinoma |
| 208 | CTGGACTGAGTCATGCTACTGG | liver hepatocellular carcinoma |
| 209 | CTGGATGAGGATAAGCAAATGCTGACTGA | liver hepatocellular carcinoma |
| 210 | CTGGATGATGATAAGCAAATGCCGACTGA | liver hepatocellular carcinoma |
| 211 | CTGGATGATGATAAGCAAATGCTGACGGA | liver hepatocellular carcinoma, uterine |
| | | carcinosarcoma |
| 212 | CTGGATGATGTAGCCTGACA | liver hepatocellular carcinoma |
| 213 | CTTCGTGATCGATGTGGTGACGTCGA | liver hepatocellular carcinoma |
| 214 | CTTTAGCTCTAGAATTACTCTG | liver hepatocellular carcinoma |
| 215 | CTTTGTGACCTCTGATG | liver hepatocellular carcinoma |
| 216 | GAATATGATGGTTGCTGAGA | liver hepatocellular carcinoma |
| 217 | GACAATGATGAACTGCTGA | liver hepatocellular carcinoma |
| 218 | GATTATGATGAATTCTGAAA | liver hepatocellular carcinoma |
| 219 | GCGAAGGTTGTCGGGATC | liver hepatocellular carcinoma |
| 220 | GGAGGGCCGGCGGCGGCGGCGACT | liver hepatocellular carcinoma |
| 221 | GTAGCTTATCAGACTGTTGTTGA | liver hepatocellular carcinoma |
| 222 | GTCACTAGTGGTTCCGTTTAGT | liver hepatocellular carcinoma |
| 223 | GTCCCGGGTTCAGATCCCGGACG | liver hepatocellular carcinoma |
| 224 | GTGCGCGCGGGTCGGGGCGGCGGCG | liver hepatocellular carcinoma |
| 225 | GTGGACTGAGCCGTGCTACTGA | liver hepatocellular carcinoma |
| 226 | NTGGACTGAGCCATGCTACTGG | liver hepatocellular carcinoma |
| 227 | TAATTGAAGTTCTTGCCATCAC | liver hepatocellular carcinoma |
| 228 | TCCCACTCCTGACACCATTT | liver hepatocellular carcinoma |
| 229 | TCCGGCTCGGAGGACCATAG | liver hepatocellular carcinoma, uterine corpus |
| | | endometrial carcinoma |
| 230 | TCTTTGTGACCTCTGATG | liver hepatocellular carcinoma |
| 231 | TGACCTATTAATTGACAGCCAAT | liver hepatocellular carcinoma |
| 232 | TGCCGGTGATGCTGATCTGAGG | liver hepatocellular carcinoma |
| 233 | TTACGGCTCGAAGGACCAAG | liver hepatocellular carcinoma |
| 234 | TTCTGACGAGATCTTGGATGATGC | liver hepatocellular carcinoma |
| 235 | TTCTGACGAGATCTTGGATGATGCT | liver hepatocellular carcinoma |
| 236 | TTGGACTGAGCCATGCTACTGG | liver hepatocellular carcinoma |
| 237 | TTTCTGACGAGATCTTGGATGATGCT | liver hepatocellular carcinoma |
| 238 | TTTGGCGATGGTAGAACTCACACTGT | liver hepatocellular carcinoma |
| 239 | TTTTCTGACATGCTCTAAAGGATGATGA | liver hepatocellular carcinoma |
| 240 | TTTTGTTATCTAGCTGTATG | liver hepatocellular carcinoma |
| 241 | AACTGGATTTTTGGAGCAGG | adrenocortical carcinoma, lung adenocarcinoma |
| 242 | AAGAGCCCAGCGCCGAATCCCCGCC | adrenocortical carcinoma, esophageal |
| | | carcinoma , lung adenocarcinoma |
| 243 | AATTGATTTTTGGAGCAGGGAGAT | adrenocortical carcinoma, lung adenocarcinoma |
| 244 | AGTGGATTTTTGGAGCAGG | adrenocortical carcinoma, lung adenocarcinoma |
| 245 | ATGTATTTTTGGAGCAGGGAGA | adrenocortical carcinoma, lung adenocarcinoma |
| 246 | ATGTATTTTTGGAGCAGGGAGAT | adrenocortical carcinoma, cervical squamous |
| | | cell carcinoma and endocervical |
| | | adenocarcinoma, lung adenocarcinoma |
| 247 | ATTGGATTTTTGGAGCAGGGA | adrenocortical carcinoma, cervical squamous |
| | | cell carcinoma and endocervical |
| | | adenocarcinoma, lung adenocarcinoma |
| 248 | CATTTTGGAACAATGTAGGTAA | adrenocortical carcinoma, lung squamous cell |
| | | carcinoma |
| 249 | GATTTTGGCCTAGTTCTGTG | adrenocortical carcinoma, lung squamous cell |
| | | carcinoma |
| 250 | GCCGCGAGGCGTCCAGTGCGGTAACGCGA | adrenocortical carcinoma, lung adenocarcinoma |
| 251 | GTCTCTGGAGCGTCGGGCCCA | adrenocortical carcinoma, lung squamous cell |
| | | carcinoma |
| 252 | TGTGCGGACCAGGGGAATC | bladder urothelial carcinoma, lung |
| | | adenocarcinoma |
| 253 | AATTCCGATAACGAACGCGACTCTG | cervical squamous cell carcinoma and |
| | | endocervical adenocarcinoma, lung |
| | | adenocarcinoma |
| 254 | ACGCGCATGAATGGATGCACG | cervical squamous cell carcinoma and |
| | | endocervical adenocarcinoma, lung |
| | | adenocarcinoma |
| 255 | AGACTGTGATGACTGGGAGAG | cervical squamous cell carcinoma and |
| | | endocervical adenocarcinoma, lung squamous |
| | | cell carcinoma |
| 256 | CTCTAACTTTGAAGGCCGAAG | cervical squamous cell carcinoma and |
| | | endocervical adenocarcinoma, lung squamous |
| | | cell carcinoma |
| 257 | GACAGGGAGTCGGGTTCAGAT | cervical squamous cell carcinoma and |
| | | endocervical adenocarcinoma, lung squamous |
| | | cell carcinoma |
| 258 | ATGTGAATCCGACTGTT | cervical squamous cell carcinoma and |
| | | endocervical adenocarcinoma, lung squamous |
| | | cell carcinoma |
| 259 | CATGGTGACCACGGGTGCCG | cervical squamous cell carcinoma and |
| | | endocervical adenocarcinoma, lung |
| | | adenocarcinoma |
| 260 | CGCCTGTCACGCGGGAGCCCGG | cervical squamous cell carcinoma and |
| | | endocervical adenocarcinoma, lung |
| | | adenocarcinoma |
| 261 | GCGCCGCCGCCCCCCCCCCG | cervical squamous cell carcinoma and |
| | | endocervical adenocarcinoma, lung |
| | | adenocarcinoma, pancreatic adenocarcinoma |
| 262 | GCGCGGACCAGGGGAATCC | cervical squamous cell carcinoma and |
| | | endocervical adenocarcinoma, lung squamous |
| | | cell carcinoma |
| 263 | GCTACCACATCCAAGGACGG | cervical squamous cell carcinoma and |
| | | endocervical adenocarcinoma, lung |
| | | adenocarcinoma |
| 264 | GGACCAGCCCGTGGACGGTGTG | cervical squamous cell carcinoma and |
| | | endocervical adenocarcinoma, head and neck |
| | | squamous cell carcinoma, lung adenocarcinoma, |
| | | pancreatic adenocarcinoma |
| 265 | GGCCGCCGCCGGGCGCA | cervical squamous cell carcinoma and |
| | | endocervical adenocarcinoma, lung squamous |
| | | cell carcinoma, skin cutaneous melanoma |
| 266 | GTCGGGGTTTCGTACGTCG | cervical squamous cell carcinoma and |
| | | endocervical adenocarcinoma, lung |
| | | adenocarcinoma |
| 267 | TGGGATCCCGAGGCCTCTCCAG | cervical squamous cell carcinoma and |
| | | endocervical adenocarcinoma, lung |
| | | adenocarcinoma |
| 268 | CCCGTGCCGAGTCGTGACCGGTG | esophageal carcinoma , lung squamous cell |
| | | carcinoma |
| 269 | AACAGGGTTTGTTAGG | head and neck squamous cell carcinoma, lung |
| | | adenocarcinoma |
| 270 | AAGCGGAGTCGGGTTCAGA | head and neck squamous cell carcinoma, lung |
| | | adenocarcinoma |
| 271 | ACGAAAGCCGCCGTGGCG | head and neck squamous cell carcinoma, lung |
| | | adenocarcinoma |
| 272 | AGAGGCAACTCTGGTGGAGG | head and neck squamous cell carcinoma, lung |
| | | squamous cell carcinoma |
| 273 | AGCTGTTGAACATGGGTCAGTCGG | head and neck squamous cell carcinoma, lung |
| | | adenocarcinoma |
| 274 | ATGGCCAGAGCTCACACAGAGG | head and neck squamous cell carcinoma, lung |
| | | adenocarcinoma |
| 275 | CAACACCCGTCGATGGGCT | head and neck squamous cell carcinoma, lung |
| | | adenocarcinoma |
| 276 | CAGGTGTCCTAAGGCGAGCTCA | head and neck squamous cell carcinoma, lung |
| | | adenocarcinoma |
| 277 | CAGTCCGCCGAGGGCGCACC | head and neck squamous cell carcinoma, lung |
| | | squamous cell carcinoma |
| 278 | CCGGGTGATGTAGGCTT | head and neck squamous cell carcinoma, lung |
| | | adenocarcinoma |
| 279 | GAGCCAGTCGGTCCTGAGAG | head and neck squamous cell carcinoma, lung |
| | | squamous cell carcinoma |
| 280 | GCCAAAGCTCGCTTGATCTT | head and neck squamous cell carcinoma, lung |
| | | squamous cell carcinoma |
| 281 | GTGCTGTGATGAGCTCTGAGC | kidney renal clear cell carcinoma, lung |
| | | adenocarcinoma |
| 282 | TGTAGGTAAGGGAAGTCGGCAAGCCG | kidney renal clear cell carcinoma, lung |
| | | adenocarcinoma |
| 283 | GTGCTGTGATGAGCTCTGAGCC | head and neck squamous cell carcinoma, kidney |
| | | renal clear cell carcinoma, lung adenocarcinoma |
| 284 | AAAATTCAACGCTGTCGGTTAG | lung adenocarcinoma |
| 285 | AAACGGATTTTTGGAGCAGG | lung adenocarcinoma |
| 286 | AACACCAGTCGATGGGCTGTAAG | lung adenocarcinoma |
| 287 | AACGATGCCGACCGGCGCTGCGG | lung adenocarcinoma |
| 288 | AACTAGACTCTGGCA | lung adenocarcinoma |
| 289 | AAGCATTTTTGGAAATAGGAGA | lung adenocarcinoma |
| 290 | AATAGCTCAGAATGTCAGT | lung adenocarcinoma |
| 291 | ACAGCACTAGATTGTAAAGACTGGGGTGG | lung adenocarcinoma |
| 292 | ACCCGGTCAGCCCCTCT | lung adenocarcinoma |
| 293 | ACCGGGTGCTGTCGGCTTG | lung adenocarcinoma |
| 294 | AGATCTGGGCTGTAGTGCG | lung adenocarcinoma |
| 295 | AGCACTAGATTGTAAAGACTGGGGTG | lung adenocarcinoma |
| 296 | AGTAGGAGGGCCGCTGCGGTGAG | lung adenocarcinoma |
| 297 | ATCCCACCTTCGTCGCCAT | lung adenocarcinoma, uterine corpus |
| | | endometrial carcinoma |
| 298 | ATCGATTTTTGGAGCAGGG | lung adenocarcinoma |
| 299 | ATGCATTTTTGGAGCAGGGA | lung adenocarcinoma |
| 300 | ATGCTGACTGAACATGAAGGTC | lung adenocarcinoma |
| 301 | ATGGATTTTTGGAAATCGGA | lung adenocarcinoma |
| 302 | ATGGATTTTTGGCGCAGGGA | lung adenocarcinoma |
| 303 | ATTAGCAATGGTAGAACTCAC | lung adenocarcinoma |
| 304 | CAAACCGGGTGCTGTAGGCT | lung adenocarcinoma |
| 305 | CAACACCAGTAGATGG | lung adenocarcinoma |
| 306 | CAAGACGGACCAGAGCG | lung adenocarcinoma |
| 307 | CACAGCTGGGTTGAGAGGGCGT | lung adenocarcinoma |
| 308 | CACGACGGTGGCCATGGAAGTCGGA | lung adenocarcinoma |
| 309 | CAGCCAGTAGTGGACAGG | lung adenocarcinoma |
| 310 | CAGCGCGGTAACGCGACCGATCCCGGAGA | lung adenocarcinoma |
| 311 | CAGGATCGCGTGAGCTCGGAG | lung adenocarcinoma |
| 312 | CATCTCGCTGTAGCATCGAACC | lung adenocarcinoma |
| 313 | CATGGTGCTGTCGGAGCTAG | lung adenocarcinoma |
| 314 | CCACCGCCCGTCCCCG | lung adenocarcinoma |
| 315 | CCCCCCACAACCGCGCTTGACTGG | lung adenocarcinoma, pancreatic |
| | | adenocarcinoma |
| 316 | CCCCGAGGGGCTCTCGCTTCTGGCG | lung adenocarcinoma |
| 317 | CCTACCAGAGTCGCCA | lung adenocarcinoma |
| 318 | CCTATTGGCCAGTTTTGTCTGATG | lung adenocarcinoma |
| 319 | CCTCGGGCCGCTCGCAC | lung adenocarcinoma |
| 320 | CCTGAGGGAGCTCGTCGGTG | lung adenocarcinoma |
| 321 | CGAGCTTATCAGACTGATGTTGAC | lung adenocarcinoma |
| 322 | CGAGGCCCAGCCCGTGGCCGGTGTGA | lung adenocarcinoma |
| 323 | CGGCGACGGGGGGGGTGCCGCG | lung adenocarcinoma |
| 324 | CGGCGCCGCTCGTGGGGG | lung adenocarcinoma |
| 325 | CGTACATTGCCAGGGATTTC | lung adenocarcinoma |
| 326 | CGTGTGGTGTGCGTCGGCGGGC | lung adenocarcinoma |
| 327 | CTAGCACTGGTAGAATTCA | lung adenocarcinoma |
| 328 | CTCCCGTGCTGATCAGTCGTGG | lung adenocarcinoma |
| 329 | CTCTCTCTCTCTGCCT | lung adenocarcinoma |
| 330 | CTGGAATTCTGGACCCGG | lung adenocarcinoma |
| 331 | CTGTGCGTGCGACAGCGGCTG | lung adenocarcinoma |
| 332 | CTGTGCGTGTGACAGCGGCTTC | lung adenocarcinoma |
| 333 | CTTGTGGTGTGCGTCGGAGGG | lung adenocarcinoma |
| 334 | GAATGTTTAGACGGGCTCTGG | lung adenocarcinoma |
| 335 | GACACCAGGCCGGCCCCGG | lung adenocarcinoma |
| 336 | GACGAATTTTTGAGCGGGTA | lung adenocarcinoma |
| 337 | GAGCACAGCATCGTCGGG | lung adenocarcinoma |
| 338 | GAGCCCAGGAACTGGAGGCTGT | lung adenocarcinoma |
| 339 | GAGCCGAAGCTGGACTGTACTG | lung adenocarcinoma |
| 340 | GAGGCCAGCGCCGAATCCCCG | lung adenocarcinoma |
| 341 | GCCCCCCGTGGCGGCGACGACCCAT | lung adenocarcinoma |
| 342 | GCCCCGAGGCGTCCAGTGCGG | lung adenocarcinoma |
| 343 | GCCGCCGGTGCAATACCACTACTCTG | lung adenocarcinoma |
| 344 | GCGACGAGTAGGAGGGCCGCTG | lung adenocarcinoma |
| 345 | GCGCTCGCCGGCCGAGGTGGGAT | lung adenocarcinoma |
| 346 | GGCGGCGGCGGCAGGCGGCG | lung adenocarcinoma |
| 347 | GGGATGAACCGACCGCCGG | lung adenocarcinoma |
| 348 | GGGCTGTGATGAAGCTGAGCA | lung adenocarcinoma |
| 349 | GGTCCCGTGCCCGTCGTCGTC | lung adenocarcinoma, skin cutaneous |
| | | melanoma |
| 350 | GTAGCTTATCAGCCTGATGTT | lung adenocarcinoma |
| 351 | GTGCGGAACGCTGGCCGG | lung adenocarcinoma |
| 352 | GTGCGGTAACGCGACCGCTCCCGG | lung adenocarcinoma |
| 353 | TAATGTGATGAACTTCTGAGG | lung adenocarcinoma, mesothelioma |
| 354 | TACTTTCTCAGACTGATGTTGA | lung adenocarcinoma |
| 355 | TAGATGTCCGGGGCTGCCCG | lung adenocarcinoma |
| 356 | TATCGCACTGGTAGAATTCAAT | lung adenocarcinoma |
| 357 | TATCGCACTTGTAGAATTCACT | lung adenocarcinoma |
| 358 | TATCGCGCTGGTAGAATTCACTG | lung adenocarcinoma |
| 359 | TATGATTCTCGCTTCGGTGTG | lung adenocarcinoma |
| 360 | TATGTTCGTTCGGCTCGCGTGAAG | lung adenocarcinoma |
| 361 | TATTGCACTCGTCCCGA | lung adenocarcinoma |
| 362 | TATTGTACTGGTAGAATTCACTG | lung adenocarcinoma |
| 363 | TCACACCAGAGTCGCCA | lung adenocarcinoma |
| 364 | TCAGGTCTCGGTGGAACCTC | lung adenocarcinoma |
| 365 | TCATCATCGGACTGGACGGGAGCTT | lung adenocarcinoma |
| 366 | TCTCACTGTAGCATCGACC | lung adenocarcinoma |
| 367 | TCTGGACTCTGAATCCGGTA | lung adenocarcinoma |
| 368 | TGAGGCAATGCTAGAACTCACA | lung adenocarcinoma |
| 369 | TGCTATGATGAACTGTCCTGAGA | lung adenocarcinoma |
| 370 | TGGTCGTGGTTGTAGTCCCCA | lung adenocarcinoma |
| 371 | TGTTGCACTCGTCCCGGCC | lung adenocarcinoma |
| 372 | TTACAGCCCCCCCGGCA | lung adenocarcinoma |
| 373 | TTCATCTTAAACTGAAC | lung adenocarcinoma |
| 374 | TTCCTTATCACACTGATGTTGAC | lung adenocarcinoma |
| 375 | TTCTTTATAAGACTGATGTTGAC | lung adenocarcinoma |
| 376 | TTGAAGGCTCCGCGGACCGG | lung adenocarcinoma |
| 377 | TTGCTTATCAGACTGAAGTTGAC | lung adenocarcinoma |
| 378 | TTGGATTTTTGGAAATAGG | lung adenocarcinoma |
| 379 | TTGGTGATCAGACTGATGTTG | lung adenocarcinoma |
| 380 | TTGGTTATCAGACTGAAGTTGAC | lung adenocarcinoma |
| 381 | TTGGTTATCAGACTGATGATGA | lung adenocarcinoma |
| 382 | TTGGTTATCAGACTGATGCTG | lung adenocarcinoma |
| 383 | TTTAGCAATGGTAGAACTCAAAC | lung adenocarcinoma |
| 384 | TTTGGCAATGGTAGAATTAAC | lung adenocarcinoma |
| 385 | TTTTGCAATGGTAGAAATAACACT | lung adenocarcinoma |
| 386 | AAATCACTGGTAGAATTCACTG | lung squamous cell carcinoma |
| 387 | AAATGAGGCCATGATTAAGAGG | lung squamous cell carcinoma |
| 388 | AACCCCATTCGTGATGG | lung squamous cell carcinoma |
| 389 | AACGTCGGGCCGATCGCA | lung squamous cell carcinoma |
| 390 | AACTCGGAGGTTCGAAGACG | lung squamous cell carcinoma |
| 391 | AAGACACTGGTAGAATTCAC | lung squamous cell carcinoma |
| 392 | AATCAGCGGGGAAAGAA | lung squamous cell carcinoma |
| 393 | AATGGATTTTTGGAAATAGGG | lung squamous cell carcinoma |
| 394 | AATGTATTGTACATCGGATGAG | lung squamous cell carcinoma |
| 395 | ACAGCAGATCAGACGTGGCGACC | lung squamous cell carcinoma |
| 396 | ACAGGGTGCTGTAGGATT | lung squamous cell carcinoma |
| 397 | ACCCGACCTCAGATCAGAC | lung squamous cell carcinoma |
| 398 | ACCGAAGTCTTTGGGTTCCGG | lung squamous cell carcinoma |
| 399 | ACGCGTTAGGACCCGAAA | lung squamous cell carcinoma |
| 400 | ACGTGGCGACCCGCTGAATTT | lung squamous cell carcinoma |
| 401 | ACGTTCGTGGGGAACC | lung squamous cell carcinoma |
| 402 | ACTCCCTGATGAACA | lung squamous cell carcinoma |
| 403 | ACTGCGGGATAAGGATTGGCTCTA | lung squamous cell carcinoma |
| 404 | AGACGACTTAGAACTGGTG | lung squamous cell carcinoma |
| 405 | AGAGATGTGGTGACGTCGTG | lung squamous cell carcinoma |
| 406 | AGCGCACTGGTAGAATTCAC | lung squamous cell carcinoma |
| 407 | AGCTGGTGCTGTAGGCT | lung squamous cell carcinoma |
| 408 | AGCTGTCCGGGGCTGCACG | lung squamous cell carcinoma |
| 409 | AGGAACCGCAGGTTCAGACA | lung squamous cell carcinoma |
| 410 | AGGACAGAAACCTCCCGTGGAGCA | lung squamous cell carcinoma |
| 411 | AGGCCGCGGAGCCAGCGACGAC | lung squamous cell carcinoma, testicular germ |
| | | cell tumors, uterine corpus endometrial |
| | | carcinoma |
| 412 | AGGTATTTTTGGAGCAGGGAGA | lung squamous cell carcinoma |
| 413 | AGTCGGGGGCTCGCA | lung squamous cell carcinoma |
| 414 | ATCCCACTACTCTGATCGT | lung squamous cell carcinoma |
| 415 | ATCCCAGCGCCGAATCCCC | lung squamous cell carcinoma |
| 416 | ATCCCCGGCCGTCGCCGGC | lung squamous cell carcinoma |
| 417 | ATCTCAAAAGCTCGCTTGATCT | lung squamous cell carcinoma |
| 418 | ATGCCAAAAGCTCGCTTGATC | lung squamous cell carcinoma |
| 419 | ATGTCAGTGGTAGAATTCACT | lung squamous cell carcinoma |
| 420 | ATGTGTGGTTCAGTGGTAGA | lung squamous cell carcinoma |
| 421 | CAACACCAGTCGATGGCCTG | lung squamous cell carcinoma |
| 422 | CAACATGATGAAACCCTGACT | lung squamous cell carcinoma |
| 423 | CACATGCTCAGACTCCTGTGGT | lung squamous cell carcinoma |
| 424 | CACCGCGGCGGTGCG | lung squamous cell carcinoma |
| 425 | CACGCACCGCACGTTCGTG | lung squamous cell carcinoma |
| 426 | CACTGACCAAGGAGTCTAAC | lung squamous cell carcinoma |
| 427 | CAGACCAGGGGAATCCGACTG | lung squamous cell carcinoma |
| 428 | CAGAGCACAGCATCGTCGGG | lung squamous cell carcinoma |
| 429 | CAGCCCAGGGAACGGGCTTG | lung squamous cell carcinoma |
| 430 | CAGCCGGTCCTGAGAGATGGG | lung squamous cell carcinoma |
| 431 | CATGTGTTAGGACCCGAAAG | lung squamous cell carcinoma |
| 432 | CCACGCCCGGGGCACCCC | lung squamous cell carcinoma |
| 433 | CCAGCCACTGCTAAATTTGAC | lung squamous cell carcinoma |
| 434 | CCAGGACACGGACAGGATTG | lung squamous cell carcinoma |
| 435 | CCAGGACACGGACAGGATTG | lung squamous cell carcinoma |
| 436 | CCAGGGAGCGGGGGACCACCAG | lung squamous cell carcinoma |
| 437 | CCAGTCCGCCGAGGGCGCAC | lung squamous cell carcinoma |
| 438 | CCATACCCCCCCGGCCCCGTC | lung squamous cell carcinoma |
| 439 | CCCACTGCTAAATTTGCCTGG | lung squamous cell carcinoma |
| 440 | CCCCCAGGAGTGGAGCCTGCG | lung squamous cell carcinoma |
| 441 | CCCCTACTCTGATCGTTTTTT | lung squamous cell carcinoma |
| 442 | CCCGACCCGGGGAGGTAGTGAC | lung squamous cell carcinoma |
| 443 | CCCGCACTGCTAAATTTGAC | lung squamous cell carcinoma |
| 444 | CCCTACCTACTATCC | lung squamous cell carcinoma |
| 445 | CCGAAGTCTTTGGGTTCCGG | lung squamous cell carcinoma |
| 446 | CCGCAGGTGCAGATCTTGGTG | lung squamous cell carcinoma |
| 447 | CCGCGCGGCGCCTCGCCTCGGCCGGCGCCT | lung squamous cell carcinoma |
| 448 | CCGCGGAGCCTCGGTT | lung squamous cell carcinoma |
| 449 | CCGGCCCCACCGGTCCCGG | lung squamous cell carcinoma |
| 450 | CCGGCGGGCCCGGGGGAGG | lung squamous cell carcinoma |
| 451 | CCGTAGAGGGAGCCTGAGA | lung squamous cell carcinoma |
| 452 | CCGTCCCCCTAAGCGCAGACCC | lung squamous cell carcinoma |
| 453 | CCTTTACGACTCTTAGCGGTG | lung squamous cell carcinoma |
| 454 | CGAGGCGTGTGACAGCGGCT | lung squamous cell carcinoma |
| 455 | CGAGGGAGCGAGACCCG | lung squamous cell carcinoma |
| 456 | CGCGCAAATTACCCACTCCCGAC | lung squamous cell carcinoma |
| 457 | CGCGCGTGTGGTGTG | lung squamous cell carcinoma |
| 458 | CGCTCTGAGCGTCGCT | lung squamous cell carcinoma |
| 459 | CGGCGGTGCGCCGCGACCGGCTCCGGGAC | lung squamous cell carcinoma |
| 460 | CGGGTGCTGTAGGCTCTG | lung squamous cell carcinoma |
| 461 | CGTGGGTTATCTAGCTGTATG | lung squamous cell carcinoma |
| 462 | CGTTCCCGGGTTTCGGCAGA | lung squamous cell carcinoma |
| 463 | CTAAGGGCTGGGTCGGGCGGGC | lung squamous cell carcinoma |
| 464 | CTAGACCTCAGATCAGACGTGGCGACCC | lung squamous cell carcinoma |
| 465 | CTCAAGGGAGTCGGGTTCAG | lung squamous cell carcinoma |
| 466 | CTCAAGTCGGAGGTTCGAAGA | lung squamous cell carcinoma |
| 467 | CTCAGTTGGATCTTGGGAGCG | lung squamous cell carcinoma |
| 468 | CTCCACCAGTCGATGGGCTG | lung squamous cell carcinoma |
| 469 | CTCCCATGGTGACCACG | lung squamous cell carcinoma |
| 470 | CTCCTACCGATTGGATGG | lung squamous cell carcinoma |
| 471 | CTCCTTAGAACTGGTGCG | lung squamous cell carcinoma |
| 472 | CTCGATAACCTCGGGCCGA | lung squamous cell carcinoma |
| 473 | CTCGATAACCTCGGGCCGATCG | lung squamous cell carcinoma |
| 474 | CTCGCTGGCCCTTGAAAAT | lung squamous cell carcinoma |
| 475 | CTCGGTTTCTATCTCTCCATCC | lung squamous cell carcinoma |
| 476 | CTCTCCCCCGCTCCCCGCC | lung squamous cell carcinoma |
| 477 | CTCTCTGCCTGTTTCTCTTT | lung squamous cell carcinoma |
| 478 | CTGCGGGATGAACCGA | lung squamous cell carcinoma |
| 479 | CTGGGAAAGAAGACCCTGTTG | lung squamous cell carcinoma |
| 480 | CTGGGATTATGACTGAACG | lung squamous cell carcinoma |
| 481 | CTGTACACAAGGGTTTGT | lung squamous cell carcinoma |
| 482 | CTGTAGCGTCGGGCCCAT | lung squamous cell carcinoma |
| 483 | CTGTGCGTGTGACAGCGCC | lung squamous cell carcinoma |
| 484 | CTGTGCTGTAGTGCGCTATGCCG | lung squamous cell carcinoma |
| 485 | CTGTGCTTGTGACAGCGGCTGT | lung squamous cell carcinoma |
| 486 | CTGTGTGTGTGACAGCGGCTG | lung squamous cell carcinoma |
| 487 | CTGTTGCTGTCGGCTT | lung squamous cell carcinoma |
| 488 | CTTCTGGCGCCAAGCGCCC | lung squamous cell carcinoma |
| 489 | CTTTGGAGCGGGCGGGCGGTCC | lung squamous cell carcinoma |
| 490 | GAACCATCTAGTAGCT | lung squamous cell carcinoma |
| 491 | GACAAGAACTTTGAAGAG | lung squamous cell carcinoma |
| 492 | GACCGCACTTGCGGCCCCG | lung squamous cell carcinoma |
| 493 | GACCGCCGGTGAAATACCACTACTCTGA | lung squamous cell carcinoma |
| 494 | GACCTGGTGCGGACCAGGGGAA | lung squamous cell carcinoma, pancreatic |
| | | adenocarcinoma |
| 495 | GACGCTTAGCGGTGGAT | lung squamous cell carcinoma |
| 496 | GACGGAAGGGCACCACC | lung squamous cell carcinoma |
| 497 | GAGAGTTCAAGAGGGCGTGAA | lung squamous cell carcinoma |
| 498 | GAGCGAAAGCATTTGCCAA | lung squamous cell carcinoma |
| 499 | GATGCCGACGCTCATCAGAC | lung squamous cell carcinoma |
| 500 | GATGGGCTCTAAGGGCTGG | lung squamous cell carcinoma |
| 501 | GATTTCCGGGGCTGCACGC | lung squamous cell carcinoma |
| 502 | GATTTGTTGTTGCCATGG | lung squamous cell carcinoma |
| 503 | GCACTGGAGCGTCGGGCC | lung squamous cell carcinoma |
| 504 | GCAGACTTAGAACTGGTG | lung squamous cell carcinoma |
| 505 | GCATACTTAGAACTGGTGCGGACC | lung squamous cell carcinoma |
| 506 | GCATCGAGGCGTCCAGTGCGG | lung squamous cell carcinoma |
| 507 | GCATGATGATGAGCACTCTGAAG | lung squamous cell carcinoma |
| 508 | GCCATGGTAATCCTGCT | lung squamous cell carcinoma |
| 509 | GCCCCCCGTCCTCCCCCCT | lung squamous cell carcinoma |
| 510 | GCCCGGAGGATTCAACCC | lung squamous cell carcinoma |
| 511 | GCCGCGGCCGGGGGGCGGGCGC | lung squamous cell carcinoma |
| 512 | GCCTACTTAGAACTG | lung squamous cell carcinoma |
| 513 | GCCTGGCGTGGAATGCG | lung squamous cell carcinoma |
| 514 | GCGCACCAGGGGAATCC | lung squamous cell carcinoma |
| 515 | GCGCGTCCCCCGAAGA | lung squamous cell carcinoma |
| 516 | GCGGGCATTTATCAGATC | lung squamous cell carcinoma |
| 517 | GCGGTGAGCCTTGAAGCCTA | lung squamous cell carcinoma |
| 518 | GCGTACCAGGGGAATCC | lung squamous cell carcinoma |
| 519 | GCTCGAGCGTCGGGCC | lung squamous cell carcinoma |
| 520 | GCTGGCGCGTCGGGCCCAT | lung squamous cell carcinoma |
| 521 | GGAAGGCAGCAGGCGCGCA | lung squamous cell carcinoma |
| 522 | GGAGCCCGAGGCCTCTCCAG | lung squamous cell carcinoma |
| 523 | GGATCGGTCGGGCGGCGGCGG | lung squamous cell carcinoma |
| 524 | GGATCGTCGGGCCCATAC | lung squamous cell carcinoma |
| 525 | GGATTGTGGGTTCGTG | lung squamous cell carcinoma |
| 526 | GGCACGGTGAAGAGACATGA | lung squamous cell carcinoma |
| 527 | GGCCGACTCTTAGCGGTGG | lung squamous cell carcinoma |
| 528 | GGCGCGCGCCTTGGGGACCGGG | lung squamous cell carcinoma |
| 529 | GGCTGGGTTTCGTACGTAG | lung squamous cell carcinoma |
| 530 | GGGGGATTATGACTGAACGCC | lung squamous cell carcinoma |
| 531 | GTATTTGGATCTTGG | lung squamous cell carcinoma |
| 532 | GTCCCGGACACGGACAGGATTG | lung squamous cell carcinoma |
| 533 | GTCCGGGGGGCGGGGCGGACTGT | lung squamous cell carcinoma |
| 534 | GTCGAGCCGGGCGTGGAAT | lung squamous cell carcinoma |
| 535 | GTCGCGGACCAGGGGAATCCGA | lung squamous cell carcinoma |
| 536 | GTCGGGGTTTCGTAC | lung squamous cell carcinoma |
| 537 | GTCTCGATTCCCGGTCAGGGAACCA | lung squamous cell carcinoma |
| 538 | GTCTCGGGTTCATATCCCGGA | lung squamous cell carcinoma |
| 539 | GTCTGGGCGGCGGCGGCGGCGGC | lung squamous cell carcinoma |
| 540 | GTCTGGGTGGTTCAGTGGTAGAATTCTCG | lung squamous cell carcinoma |
| 541 | GTGAATCTGACAACAGAGG | lung squamous cell carcinoma |
| 542 | GTGATAACTGGCTTGTGG | lung squamous cell carcinoma |
| 543 | GTGATCGGGGATTGCA | lung squamous cell carcinoma |
| 544 | GTGGGCGTCGGAGGG | lung squamous cell carcinoma |
| 545 | GTGGTTAGTAATCTGCGTT | lung squamous cell carcinoma |
| 546 | GTGTCAGTCGGTCCTGAGA | lung squamous cell carcinoma |
| 547 | TACTTTATCACACTGATGTTGAC | lung squamous cell carcinoma |
| 548 | TAGCTGGATCTTGGG | lung squamous cell carcinoma |
| 549 | TAGCTTATCAGACTGATGTTCTC | lung squamous cell carcinoma |
| 550 | TCAACTGCTCAGACTCCTGTGG | lung squamous cell carcinoma |
| 551 | TCAGCCGGCCCGGACACG | lung squamous cell carcinoma |
| 552 | TCAGTCATTCCACCGGAG | lung squamous cell carcinoma, thymoma |
| 553 | TCAGTGTTTATCTAGCTGTATGA | lung squamous cell carcinoma |
| 554 | TCCCGCCGTCGGGCCCGGGGGAG | lung squamous cell carcinoma |
| 555 | TCCGACGACTCTTAGCGGT | lung squamous cell carcinoma |
| 556 | TCCGACGACTCTTAGCGGTGGAT | lung squamous cell carcinoma |
| 557 | TCCGATGGTAGTGGGTTATCAGAA | lung squamous cell carcinoma |
| 558 | TCCGCCCAGTGCTCTGAATG | lung squamous cell carcinoma |
| 559 | TCCGGCGAGGGAGCCTGA | lung squamous cell carcinoma |
| 560 | TCCGGGCACTACAGACCTTTGT | lung squamous cell carcinoma |
| 561 | TCTGTGTTTATCTAGCTGTAT | lung squamous cell carcinoma |
| 562 | TCTGTGTTTATCTAGCTGTAT | lung squamous cell carcinoma |
| 563 | TGAAAGAAAACTATTCTGAGC | lung squamous cell carcinoma |
| 564 | TGAAGGACACATTGATCATCG | lung squamous cell carcinoma |
| 565 | TGACGGAGAGGGAGCCTGAGA | lung squamous cell carcinoma |
| 566 | TGAGCCATGGTTGTCTGAGCATGC | lung squamous cell carcinoma |
| 567 | TGATGTAATGATTCTGCCAAATGAAATAT | lung squamous cell carcinoma |
| 568 | TGCCTCTAGTCTGGCACGGTG | lung squamous cell carcinoma |
| 569 | TGCGTGGGGAACCTGGCGCT | lung squamous cell carcinoma |
| 570 | TGCTAGTGTGCTGATG | lung squamous cell carcinoma |
| 571 | TGGAACAATGTAGGTAAGGGAA | lung squamous cell carcinoma |
| 572 | TGGACTGAGCCATGCTACTGG | lung squamous cell carcinoma |
| 573 | TGGTGCGTCGGGCCCATACCC | lung squamous cell carcinoma |
| 574 | TGTGGCAATGGTAGACCTCACACTG | lung squamous cell carcinoma |
| 575 | TGTGGCAATGGTAGACCTCACACTGG | lung squamous cell carcinoma |
| 576 | TTACCAGACTGATGTTGAC | lung squamous cell carcinoma |
| 577 | TTACGGAGAGGGAGCCTGAG | lung squamous cell carcinoma |
| 578 | TTATCATACTGATGTTGA | lung squamous cell carcinoma |
| 579 | TTCAATGTTTAGGACCACTAA | lung squamous cell carcinoma |
| 580 | TTCCAGTGTCTTAGCTGGTTG | lung squamous cell carcinoma |
| 581 | TTCCCAGACTGATGTTGA | lung squamous cell carcinoma |
| 582 | TTCGTCTTTGCGGGCGAGATG | lung squamous cell carcinoma |
| 583 | TTCGTGCATTTATCAGATCAAAA | lung squamous cell carcinoma |
| 584 | TTCGTTTACGTTGGGAGAACT | lung squamous cell carcinoma |
| 585 | TTCGTTTACGTTGGGAGAACTT | lung squamous cell carcinoma |
| 586 | TTCTGACCAGGGGAAT | lung squamous cell carcinoma |
| 587 | TTCTGACCAGGGGAATCC | lung squamous cell carcinoma |
| 588 | TTCTGGATAAGGATTGGCT | lung squamous cell carcinoma |
| 589 | TTCTTTATCAGACTGATGTGGAC | lung squamous cell carcinoma |
| 590 | TTGAGCCGGGCGTGGAA | lung squamous cell carcinoma |
| 591 | TTGCCTCTAAGGGCTGGG | lung squamous cell carcinoma |
| 592 | TTGGATTATGACTGAACGCCTC | lung squamous cell carcinoma |
| 593 | TTTTGTGTGCGTCGGAGGGC | lung squamous cell carcinoma |
| 594 | AAAAGCTGGGTTGCGAGGGAAT | ovarian serous cystadenocarcinoma |
| 595 | AAAATGGCGGATTCCTCGG | ovarian serous cystadenocarcinoma |
| 596 | AAAGAGCGCCCGGACCTG | ovarian serous cystadenocarcinoma |
| 597 | AACGGGGCGCGGCCGGAAA | ovarian serous cystadenocarcinoma |
| 598 | AACTCCAGAGAGGCCGGGCAG | ovarian serous cystadenocarcinoma |
| 599 | AACTGAGGCTCTGAGGA | ovarian serous cystadenocarcinoma |
| 600 | AAGAAAAGGACCAGGGAAGG | ovarian serous cystadenocarcinoma |
| 601 | AAGAAAGTCGACAGAGACA | ovarian serous cystadenocarcinoma |
| 602 | AAGATCGCGGGCAGATG | ovarian serous cystadenocarcinoma |
| 603 | AAGATGATCAGGTTGATAGGT | ovarian serous cystadenocarcinoma |
| 604 | AAGCAGATCTAAGGATGAGTATGAGAA | ovarian serous cystadenocarcinoma |
| 605 | AAGCTCAGCAGGGTCGGGCCTG | ovarian serous cystadenocarcinoma |
| 606 | AAGGCAGGGCCCCCGCTCCAT | ovarian serous cystadenocarcinoma |
| 607 | AAGGTCAGGGCCCAGGG | ovarian serous cystadenocarcinoma |
| 608 | AAGTGATTCTCCTGCCTCAGC | ovarian serous cystadenocarcinoma |
| 609 | AAGTGCACTTGGACGAAAA | ovarian serous cystadenocarcinoma |
| 610 | AATACCGGGTGCTGTAGGCTCTG | ovarian serous cystadenocarcinoma |
| 611 | AATACCGGGTGGTGTAGGC | ovarian serous cystadenocarcinoma |
| 612 | AATACCGGGTGGTGTAGGCTA | ovarian serous cystadenocarcinoma |
| 613 | AATCGGTCGTCCGCCCTGG | ovarian serous cystadenocarcinoma |
| 614 | AATGGCTGGCGCTGGAG | ovarian serous cystadenocarcinoma |
| 615 | ACAGAAACCTCCCGTG | ovarian serous cystadenocarcinoma |
| 616 | ACAGATCGACTATGTTGAT | ovarian serous cystadenocarcinoma |
| 617 | ACAGTCCGCCGATCTG | ovarian serous cystadenocarcinoma |
| 618 | ACCCCCGGGCGCCTG | ovarian serous cystadenocarcinoma |
| 619 | ACCCTGCTCGCTGCGCCTAT | ovarian serous cystadenocarcinoma |
| 620 | ACCCTGGTCGCACTGCTG | ovarian serous cystadenocarcinoma |
| 621 | ACCGACGTCGGCGCGGGCTGCA | ovarian serous cystadenocarcinoma |
| 622 | ACCTCAGATCGGACGTGGCGAC | ovarian serous cystadenocarcinoma |
| 623 | ACCTCGCCGTCCCGCCCGCCGC | ovarian serous cystadenocarcinoma |
| 624 | ACGATGAAGGTCTTCGGATT | ovarian serous cystadenocarcinoma |
| 625 | ACGCCAGGGTAGTGGATAGG | ovarian serous cystadenocarcinoma |
| 626 | ACGCCTCCTCCCCTCCTG | ovarian serous cystadenocarcinoma |
| 627 | ACGCTCGTGAAGGAACTCTG | ovarian serous cystadenocarcinoma |
| 628 | ACGGCTGTGGGGCAGAGAAG | ovarian serous cystadenocarcinoma |
| 629 | ACGTCGGCTGCTGGGAA | ovarian serous cystadenocarcinoma |
| 630 | ACTACCAGGGCCGGAGGATT | ovarian serous cystadenocarcinoma |
| 631 | ACTACTGCACTTGCCTAG | ovarian serous cystadenocarcinoma |
| 632 | ACTAGAACTCAGAATTAAGA | ovarian serous cystadenocarcinoma |
| 633 | ACTCAGAGGCCAGCGGACCGG | ovarian serous cystadenocarcinoma |
| 634 | ACTCAGCTTCGGACACCCTGG | ovarian serous cystadenocarcinoma |
| 635 | ACTCCCTGGGGTTGGCCGG | ovarian serous cystadenocarcinoma |
| 636 | ACTCGATCCTAAGACATAG | ovarian serous cystadenocarcinoma |
| 637 | ACTGCCGGGTACTGATGG | ovarian serous cystadenocarcinoma |
| 638 | ACTGTCTGGTCTTCTGCTTGT | ovarian serous cystadenocarcinoma |
| 639 | ACTGTGATGAGCTTCTGCAGT | ovarian serous cystadenocarcinoma |
| 640 | AGAAGATGGGCAGGGCTGTGG | ovarian serous cystadenocarcinoma |
| 641 | AGAGAACGCGGTCTGGTGGT | ovarian serous cystadenocarcinoma |
| 642 | AGCAGTGGAAGAAGACTGAAT | ovarian serous cystadenocarcinoma |
| 643 | AGCGCCGGAGAGGACCACTGA | ovarian serous cystadenocarcinoma |
| 644 | AGCGGTGGTCTGTGGAGCTC | ovarian serous cystadenocarcinoma |
| 645 | AGCTCCGGGGAGAGCATTTGACT | ovarian serous cystadenocarcinoma |
| 646 | AGCTGGCCGGGTTGGAGG | ovarian serous cystadenocarcinoma |
| 647 | AGCTGTGGTCTCTGAGAGA | ovarian serous cystadenocarcinoma |
| 648 | AGCTTGACTGTGAGA | ovarian serous cystadenocarcinoma |
| 649 | AGGACTGTGAGCCGGCTGC | ovarian serous cystadenocarcinoma |
| 650 | AGGAGCTCTGGGCCCACCCAT | ovarian serous cystadenocarcinoma, thymoma |
| 651 | AGGAGCTGGAGGATCTGG | ovarian serous cystadenocarcinoma |
| 652 | AGGAGGTCGTCGTGGCGC | ovarian serous cystadenocarcinoma |
| 653 | AGGCCAAGAGCAGGAGAGA | ovarian serous cystadenocarcinoma |
| 654 | AGGCCGAGAGCGAAGCGCG | ovarian serous cystadenocarcinoma |
| 655 | AGGCCTGCAGCGAACTCTGG | ovarian serous cystadenocarcinoma |
| 656 | AGGCGGACGGACTGAGGCTG | ovarian serous cystadenocarcinoma |
| 657 | AGGCTGTAGGCACCACGCA | ovarian serous cystadenocarcinoma |
| 658 | AGGGAACCTGGGCTGCAG | ovarian serous cystadenocarcinoma |
| 659 | AGGGACTGACGGGGGCATT | ovarian serous cystadenocarcinoma |
| 660 | AGGGACTGTGGCCTCGGCGGTAT | ovarian serous cystadenocarcinoma |
| 661 | AGGGAGAGAGTCGGACGA | ovarian serous cystadenocarcinoma |
| 662 | AGGGATTGTGGAGCTCTGG | ovarian serous cystadenocarcinoma |
| 663 | AGGGCCCCCCCTCAATCCCGT | ovarian serous cystadenocarcinoma |
| 664 | AGGGCCGTCGCGGTG | ovarian serous cystadenocarcinoma |
| 665 | AGGGCTGCGCATTGCACTGGCC | ovarian serous cystadenocarcinoma |
| 666 | AGGGCTGCGGCAGGGACT | ovarian serous cystadenocarcinoma |
| 667 | AGGGTGAAGGATGTCGGTTGG | ovarian serous cystadenocarcinoma |
| 668 | AGGGTTCGTGACTGGGGT | ovarian serous cystadenocarcinoma |
| 669 | AGGTCGCGGAGAGAAGGGG | ovarian serous cystadenocarcinoma |
| 670 | AGGTCGGCAGGGCTGGTG | ovarian serous cystadenocarcinoma |
| 671 | AGGTGATCGAGAGAACTCT | ovarian serous cystadenocarcinoma |
| 672 | AGGTGGACCCGGGCTGTG | ovarian serous cystadenocarcinoma |
| 673 | AGGTGGTGGGACTGGGGGC | ovarian serous cystadenocarcinoma |
| 674 | AGTCCACGATCTGGTCAC | ovarian serous cystadenocarcinoma |
| 675 | AGTCCGACGATCTGATCCA | ovarian serous cystadenocarcinoma |
| 676 | AGTCGAACGCTTGGCCAGAT | ovarian serous cystadenocarcinoma |
| 677 | AGTCGCAGGAGCAGCCGCAGTAG | ovarian serous cystadenocarcinoma |
| 678 | ATAATACTGCCGGGTAATGAT | ovarian serous cystadenocarcinoma |
| 679 | ATACCGGTTGCTGTAGGCTA | ovarian serous cystadenocarcinoma |
| 680 | ATAGGAAACCGAACTCATGC | ovarian serous cystadenocarcinoma |
| 681 | ATATCGCCGGGCCGGCCGC | ovarian serous cystadenocarcinoma |
| 682 | ATCGAGGCCCAGCCCGTG | ovarian serous cystadenocarcinoma |
| 683 | ATGCCATCACGGCAGCGCTCTGACC | ovarian serous cystadenocarcinoma |
| 684 | ATGCGAACCGCGTGGCTGGG | ovarian serous cystadenocarcinoma |
| 685 | ATGCTATGACTGTATCTTGAT | ovarian serous cystadenocarcinoma |
| 686 | ATGCTCAACATCTCCCCCTT | ovarian serous cystadenocarcinoma |
| 687 | ATGGAGCCGGGCGTGG | ovarian serous cystadenocarcinoma |
| 688 | ATGGCAGCCAGGTAGTCAGG | ovarian serous cystadenocarcinoma |
| 689 | ATGGGCGAGCGCCGTTCCGA | ovarian serous cystadenocarcinoma |
| 690 | ATGTGCGGACGCCGGGAGCTT | ovarian serous cystadenocarcinoma |
| 691 | ATTAATAAATTCTGATCAG | ovarian serous cystadenocarcinoma |
| 692 | ATTCCAGGGTTCGGTTGCG | ovarian serous cystadenocarcinoma |
| 693 | ATTGGCTCTAAGGGCTGGGTCGGGCGGG | ovarian serous cystadenocarcinoma |
| 694 | ATTGGTGGCTCTCGCCGGGCAGC | ovarian serous cystadenocarcinoma |
| 695 | CAAACGAGCACTTTGA | ovarian serous cystadenocarcinoma |
| 696 | CAACATCTCTGCCAAGT | ovarian serous cystadenocarcinoma |
| 697 | CAACCCAGATCACCCGCTAAG | ovarian serous cystadenocarcinoma |
| 698 | CAAGAACCGAGAGCTCTTC | ovarian serous cystadenocarcinoma |
| 699 | CAAGCCGGATCCGTACCTTCGGGA | ovarian serous cystadenocarcinoma |
| 700 | CAAGGAAGAAGTGGGCTGAAG | ovarian serous cystadenocarcinoma |
| 701 | CAAGGCGACGATCTGTAG | ovarian serous cystadenocarcinoma |
| 702 | CAAGTGTTGGATTGTT | ovarian serous cystadenocarcinoma |
| 703 | CAATACCCCGCCATGACGAC | ovarian serous cystadenocarcinoma |
| 704 | CACACCGGATGTCATCTTTGT | ovarian serous cystadenocarcinoma |
| 705 | CACAGAGGCCGGGGAGAG | ovarian serous cystadenocarcinoma |
| 706 | CACCAAGATCTCTGATGCAC | ovarian serous cystadenocarcinoma |
| 707 | CACCGTGATGACCAGGTCGGTCTCAAATTT | ovarian serous cystadenocarcinoma |
| 708 | CACCTCGCGGACTCCATG | ovarian serous cystadenocarcinoma |
| 709 | CACCTGACCTCCCCTGCCTGTGT | ovarian serous cystadenocarcinoma |
| 710 | CACGATCCTTCTGACCTT | ovarian serous cystadenocarcinoma |
| 711 | CACGCGTCGGGCCCCCA | ovarian serous cystadenocarcinoma |
| 712 | CACTGCCCCAGGTGCTGCT | ovarian serous cystadenocarcinoma |
| 713 | CACTGGGACTGAGCCACGGC | ovarian serous cystadenocarcinoma |
| 714 | CAGAAGGAAGGATTGTGGGG | ovarian serous cystadenocarcinoma |
| 715 | CAGCAGCACTCGCCGAA | ovarian serous cystadenocarcinoma |
| 716 | CAGCTCCAGAACCGACTCCG | ovarian serous cystadenocarcinoma |
| 717 | CAGCTCCCTCGCTGCGATCTAT | ovarian serous cystadenocarcinoma |
| 718 | CAGCTGTAGATTTCAACTTAG | ovarian serous cystadenocarcinoma |
| 719 | CAGGAGCGAGCAGCCAAGGG | ovarian serous cystadenocarcinoma |
| 720 | CAGGCGGCTCGGACTGA | ovarian serous cystadenocarcinoma |
| 721 | CAGTCCGACCATCTGGTCAC | ovarian serous cystadenocarcinoma |
| 722 | CATACAGACTAGGCCGGGCG | ovarian serous cystadenocarcinoma |
| 723 | CATCCCGGACGAGCCCTG | ovarian serous cystadenocarcinoma |
| 724 | CATCCGACGATCTGGTCA | ovarian serous cystadenocarcinoma |
| 725 | CATGCAAGTCGAGCGGACTTT | ovarian serous cystadenocarcinoma |
| 726 | CATGCTGACCTCCCTCCTGCCCCAAA | ovarian serous cystadenocarcinoma |
| 727 | CATGGGTCGGAAAAAAGGATT | ovarian serous cystadenocarcinoma |
| 728 | CATGTGGATGACTCTGTG | ovarian serous cystadenocarcinoma |
| 729 | CATTGCACTCCGGATGTGC | ovarian serous cystadenocarcinoma |
| 730 | CCAAGATCGGGGACCCGGC | ovarian serous cystadenocarcinoma |
| 731 | CCACGAGGTCTGAGTGGT | ovarian serous cystadenocarcinoma |
| 732 | CCACTAATAAACATAGTAGTCTTA | ovarian serous cystadenocarcinoma |
| 733 | CCAGGCGGCCCGGGTTCGTCTCCCGGTGTG | ovarian serous cystadenocarcinoma |
| 734 | CCATTGATGATCGTTCT | ovarian serous cystadenocarcinoma |
| 735 | CCCACCGCGGACAGAGCCTGA | ovarian serous cystadenocarcinoma |
| 736 | CCCACCTCGGCCTCC | ovarian serous cystadenocarcinoma |
| 737 | CCCAGAACTCCGGCCGTGTG | ovarian serous cystadenocarcinoma |
| 738 | CCCAGAAGTCCAAGTTATGGAAGATCTCG | ovarian serous cystadenocarcinoma |
| 739 | CCCCCGCCGCCCCTCCTA | ovarian serous cystadenocarcinoma |
| 740 | CCCCCGCCGCCCCTCCTCCTA | ovarian serous cystadenocarcinoma |
| 741 | CCCGCCGGGGCCCGTCGTA | ovarian serous cystadenocarcinoma |
| 742 | CCCGCGTCGGCTGCGCAGCGC | ovarian serous cystadenocarcinoma |
| 743 | CCCGCTGGTGAGGACTCGCG | ovarian serous cystadenocarcinoma |
| 744 | CCCGGGTCGAGCATGTAGCG | ovarian serous cystadenocarcinoma |
| 745 | CCCGTCCGTCCGTCCGTA | ovarian serous cystadenocarcinoma |
| 746 | CCCTGAGGATGACAGAATAAGAACTGAG | ovarian serous cystadenocarcinoma |
| 747 | CCCTGGGCCGGGGAGGAGTGGA | ovarian serous cystadenocarcinoma |
| 748 | CCCTTCCTGGCCGCCGGGCTG | ovarian serous cystadenocarcinoma |
| 749 | CCGAATCCGGAGTGGCG | ovarian serous cystadenocarcinoma |
| 750 | CCGCCCCCCGGCCCCC | ovarian serous cystadenocarcinoma |
| 751 | CCGGCAGATTGTCTCTGG | ovarian serous cystadenocarcinoma |
| 752 | CCGTTCCCCCCTCCTAT | ovarian serous cystadenocarcinoma |
| 753 | CCGTTCCCCCCTCCTTA | ovarian serous cystadenocarcinoma |
| 754 | CCGTTTCGCCGGACTCTTCGC | ovarian serous cystadenocarcinoma |
| 755 | CCTACCTTGAGCACATCTTTGAG | ovarian serous cystadenocarcinoma |
| 756 | CCTAGTCAAGGGTTAGATTTTTATT | ovarian serous cystadenocarcinoma |
| 757 | CCTCACTGAGATCAGGGACATGTTGCTGGC | ovarian serous cystadenocarcinoma |
| 758 | CCTGCTGGTCCCACTGGAGCTCG | ovarian serous cystadenocarcinoma |
| 759 | CCTGGCGGCCGGGGGCGAT | ovarian serous cystadenocarcinoma |
| 760 | CCTTCGTCCTGGGAA | ovarian serous cystadenocarcinoma |
| 761 | CGAATACAGACCGTGAAAG | ovarian serous cystadenocarcinoma |
| 762 | CGAGAGGGCGCGAGCGGCGGCG | ovarian serous cystadenocarcinoma |
| 763 | CGAGGCCGCGGCGGAGGC | ovarian serous cystadenocarcinoma |
| 764 | CGAGTTGTTGCCTGGGCTGG | ovarian serous cystadenocarcinoma |
| 765 | CGATCGCCGCCGGGACCTGA | ovarian serous cystadenocarcinoma |
| 766 | CGCACAGTTAACTGGAACTCT | ovarian serous cystadenocarcinoma |
| 767 | CGCCGCGGGGCCGGCGGCGGGGGC | ovarian serous cystadenocarcinoma |
| 768 | CGCCTAGCAGCCGACTTCG | ovarian serous cystadenocarcinoma |
| 769 | CGCGCCAGGCAGTCGTCGGTAA | ovarian serous cystadenocarcinoma |
| 770 | CGCGCTGAGGCTCCAGGACC | ovarian serous cystadenocarcinoma |
| 771 | CGCGGACTGGGGCGGCCA | ovarian serous cystadenocarcinoma |
| 772 | CGCGGCGGCCGTCGGGTGGGGGCGT | ovarian serous cystadenocarcinoma |
| 773 | CGCGGGCGGGCGCGACGGA | ovarian serous cystadenocarcinoma |
| 774 | CGCGGGGATGCGAACTGGAGTCTGAGC | ovarian serous cystadenocarcinoma |
| 775 | CGGAGGGCGGCGGCGGCGGCGGGGGGGTGG | ovarian serous cystadenocarcinoma |
| 776 | CGGAGGTTCGAAGACGATCCG | ovarian serous cystadenocarcinoma |
| 777 | CGGATCGCCGGTCCCCCGCCTGT | ovarian serous cystadenocarcinoma |
| 778 | CGGATCGCGTGGGTAGAAGGTC | ovarian serous cystadenocarcinoma |
| 779 | CGGCCGCGTCGGGGC | ovarian serous cystadenocarcinoma |
| 780 | CGGCGCACCCCCGCGGGGA | ovarian serous cystadenocarcinoma |
| 781 | CGGCGCACTGAGGACTGTGGT | ovarian serous cystadenocarcinoma |
| 782 | CGGCGCCGGGCGAGGCTGTGCG | ovarian serous cystadenocarcinoma |
| 783 | CGGCGCGCGCCGGCGGCGGCGGC | ovarian serous cystadenocarcinoma |
| 784 | CGGCGCGCGGCGGCGGCGGT | ovarian serous cystadenocarcinoma |
| 785 | CGGCGCTGGACTGGAGACC | ovarian serous cystadenocarcinoma |
| 786 | CGGCTGGGGGCCCTGGGTACG | ovarian serous cystadenocarcinoma |
| 787 | CGGCTGTGGTGCTGGCGGCGAC | ovarian serous cystadenocarcinoma |
| 788 | CGGGATCTGGCTGCGCTATGACT | ovarian serous cystadenocarcinoma |
| 789 | CGGGCCGGGCGACTTGAGA | ovarian serous cystadenocarcinoma |
| 790 | CGGGCGGACGAGCGGGCGGG | ovarian serous cystadenocarcinoma |
| 791 | CGGGGACTGTGAGGCTGC | ovarian serous cystadenocarcinoma |
| 792 | CGGGTGACTGGGCGCCGG | ovarian serous cystadenocarcinoma |
| 793 | CGGTAGAGCATCTGACTTT | ovarian serous cystadenocarcinoma |
| 794 | CGGTCTAAGGGGCTGCGTTC | ovarian serous cystadenocarcinoma |
| 795 | CGGTGCCAGACTAGGACG | ovarian serous cystadenocarcinoma |
| 796 | CGTACCAGAGCTTGCGGCTGGAGT | ovarian serous cystadenocarcinoma |
| 797 | CGTGATCCGCCCGCCTCGGC | ovarian serous cystadenocarcinoma |
| 798 | CGTGCCTGAGGTTTCTCCCCGA | ovarian serous cystadenocarcinoma |
| 799 | CGTGGCGGACTCTGGGAC | ovarian serous cystadenocarcinoma |
| 800 | CGTGGGGCTGCTTAGATG | ovarian serous cystadenocarcinoma, thyroid |
| | | carcinoma |
| 801 | CGTTCCTCGGCTTGTAG | ovarian serous cystadenocarcinoma |
| 802 | CTAAGGCTGGGTCGGTCGGGC | ovarian serous cystadenocarcinoma |
| 803 | CTAGACTGCAGCTCCTTGAGGTG | ovarian serous cystadenocarcinoma |
| 804 | CTAGAGCTCTCCGGCGGCGGCG | ovarian serous cystadenocarcinoma |
| 805 | CTAGCGCCGATGGTAGTTGG | ovarian serous cystadenocarcinoma |
| 806 | CTAGGACGTGTCGGGCTGC | ovarian serous cystadenocarcinoma |
| 807 | CTATCATTGTGAAGCAGAATTC | ovarian serous cystadenocarcinoma |
| 808 | CTCAGAACGAACGTTGGC | ovarian serous cystadenocarcinoma |
| 809 | CTCAGCTTTGGGTGGTGGCCG | ovarian serous cystadenocarcinoma |
| 810 | CTCCAGGCCAGGTGGGAC | ovarian serous cystadenocarcinoma |
| 811 | CTCCCACGGCGCGCCCGCT | ovarian serous cystadenocarcinoma |
| 812 | CTCCCTCGCTGCGATCTATTGAA | ovarian serous cystadenocarcinoma |
| 813 | CTCGCCCTGGAGTCTCGG | ovarian serous cystadenocarcinoma |
| 814 | CTCGGCGGAGCTGTAAGATGGC | ovarian serous cystadenocarcinoma |
| 815 | CTCGGTGGGGGCCGAGGGCCG | ovarian serous cystadenocarcinoma |
| 816 | CTCGTCGCGCGCGCGTCCGCAT | ovarian serous cystadenocarcinoma |
| 817 | CTCGTCGGCCTGCGGCGGC | ovarian serous cystadenocarcinoma |
| 818 | CTCGTCTGATCTCGGCAG | ovarian serous cystadenocarcinoma |
| 819 | CTCTCTTGGACTGCCACGGC | ovarian serous cystadenocarcinoma |
| 820 | CTCTGAAATACAAAATGAAA | ovarian serous cystadenocarcinoma |
| 821 | CTCTGAATCCAGTCTGTCCTT | ovarian serous cystadenocarcinoma |
| 822 | CTCTGAATGTCAACGTGAAGA | ovarian serous cystadenocarcinoma |
| 823 | CTCTGAGGCAAGCCAGGACC | ovarian serous cystadenocarcinoma |
| 824 | CTCTGCGTGCGCCGGCGGCTGC | ovarian serous cystadenocarcinoma |
| 825 | CTCTGGACCAGACGCCGCCTG | ovarian serous cystadenocarcinoma |
| 826 | CTCTGTCTCTGTCTCT | ovarian serous cystadenocarcinoma |
| 827 | CTCTGTGTCTCCCACCGGC | ovarian serous cystadenocarcinoma |
| 828 | CTGACCTTCGTGCCCCGCCAGA | ovarian serous cystadenocarcinoma |
| 829 | CTGATATCTCATTCCTGAACACTC | ovarian serous cystadenocarcinoma |
| 830 | CTGATCTCTGAAGCTAAGCAG | ovarian serous cystadenocarcinoma |
| 831 | CTGCAGGTGGGTCGGATGAGGCT | ovarian serous cystadenocarcinoma |
| 832 | CTGCCGATCGCGGGCCCGGC | ovarian serous cystadenocarcinoma |
| 833 | CTGCGCCCCCAGTTGGCTCTG | ovarian serous cystadenocarcinoma |
| 834 | CTGCGGACCGAGCGGCGAGC | ovarian serous cystadenocarcinoma |
| 835 | CTGCGGCTGTGGGTTCTCTGC | ovarian serous cystadenocarcinoma |
| 836 | CTGCTGATCGGGGACTCG | ovarian serous cystadenocarcinoma |
| 837 | CTGCTGGCCCTCTCCTGGTGC | ovarian serous cystadenocarcinoma |
| 838 | CTGCTGGTCCCACTGGAGC | ovarian serous cystadenocarcinoma |
| 839 | CTGGAGCGTCGGGCCATACC | ovarian serous cystadenocarcinoma |
| 840 | CTGGATCGGCGGCGCGGCG | ovarian serous cystadenocarcinoma |
| 841 | CTGGATGATGATACGCAAATGCTG | ovarian serous cystadenocarcinoma |
| 842 | CTGGCATGTTGGACCAATGTAGG | ovarian serous cystadenocarcinoma |
| 843 | CTGGCCCCTGACCCCTCCCTGGC | ovarian serous cystadenocarcinoma |
| 844 | CTGGCTCAGGACTCTGCAGC | ovarian serous cystadenocarcinoma |
| 845 | CTGGCTCTCTGGATGGTAGGC | ovarian serous cystadenocarcinoma |
| 846 | CTGGCTGGGGCTCGTGTGGCAGT | ovarian serous cystadenocarcinoma |
| 847 | CTGGGACACGGGGAACTG | ovarian serous cystadenocarcinoma |
| 848 | CTGGGCTGGGAGCAACGCGAC | ovarian serous cystadenocarcinoma |
| 849 | CTGGGGTTGTAGGGCGT | ovarian serous cystadenocarcinoma |
| 850 | CTGGTAGGTGACTGGAGG | ovarian serous cystadenocarcinoma |
| 851 | CTGTAGCTGGGCAGGGAGAGGG | ovarian serous cystadenocarcinoma |
| 852 | CTGTCCTATGAGCTCTAGCA | ovarian serous cystadenocarcinoma |
| 853 | CTGTCGGTGTAACTTCTTAGA | ovarian serous cystadenocarcinoma |
| 854 | CTGTCTGAATCTTTAACCGAC | ovarian serous cystadenocarcinoma |
| 855 | CTGTGCACAGAGTTGTCTGCCC | ovarian serous cystadenocarcinoma |
| 856 | CTTAACCACCATTATCTTAACTG | ovarian serous cystadenocarcinoma |
| 857 | CTTATTTTGGTAAGTTGATCTTCAAT | ovarian serous cystadenocarcinoma |
| 858 | CTTCGATGAAGAGATGATGCCGAGTCTGAC | ovarian serous cystadenocarcinoma |
| 859 | CTTCGGGTTGTAAAG | ovarian serous cystadenocarcinoma |
| 860 | CTTGTAATTGCCATTCATT | ovarian serous cystadenocarcinoma |
| 861 | GAAAATGAAGAAGGAACG | ovarian serous cystadenocarcinoma |
| 862 | GAAACATCGGATTTGGGGAACGCGT | ovarian serous cystadenocarcinoma |
| 863 | GAACAGTCGGAACGCGGTGG | ovarian serous cystadenocarcinoma |
| 864 | GAACTTAGGTCGCCGGGACG | ovarian serous cystadenocarcinoma |
| 865 | GAAGTGATCTGGGGCTGGAGC | ovarian serous cystadenocarcinoma |
| 866 | GAATCCTGCTCACAGCGCCA | ovarian serous cystadenocarcinoma |
| 867 | GAATGTTTTCATTAATCAAGAACGAAAGTC | ovarian serous cystadenocarcinoma |
| 868 | GACACTCTGCGACCGTG | ovarian serous cystadenocarcinoma |
| 869 | GACCCCCATCTGTGCCTCCAGT | ovarian serous cystadenocarcinoma |
| 870 | GACCTGCTTCTTTGACCCAG | ovarian serous cystadenocarcinoma |
| 871 | GAGAAGCTCTGAATCGAAG | ovarian serous cystadenocarcinoma |
| 872 | GAGACTGACCCGGACTTAGG | ovarian serous cystadenocarcinoma |
| 873 | GAGACTGGCCCTGCTGGAC | ovarian serous cystadenocarcinoma |
| 874 | GAGAGCTGTTGTACTGGGTGG | ovarian serous cystadenocarcinoma |
| 875 | GAGCCGGGCGTGGCA | ovarian serous cystadenocarcinoma |
| 876 | GAGCGGTGGTCTGTGGAGCTCGG | ovarian serous cystadenocarcinoma |
| 877 | GAGCTCGTTGTGGAACCTG | ovarian serous cystadenocarcinoma |
| 878 | GAGCTGCCAAATGAAGGGCTGT | ovarian serous cystadenocarcinoma |
| 879 | GAGGAGGAGCTCTGCGCGGCG | ovarian serous cystadenocarcinoma |
| 880 | GAGGCAGGGGGGCGGGCGA | ovarian serous cystadenocarcinoma |
| 881 | GAGGCTGTAGGGACCGACGG | ovarian serous cystadenocarcinoma |
| 882 | GAGGTAGAGCTACTGATTGG | ovarian serous cystadenocarcinoma |
| 883 | GAGGTCGGACCCGGGGAG | ovarian serous cystadenocarcinoma |
| 884 | GAGGTCGGGGTGGGGAGA | ovarian serous cystadenocarcinoma |
| 885 | GAGTATCTGGGGCTGTTCTGG | ovarian serous cystadenocarcinoma |
| 886 | GAGTCGCCGGAGGAGCCAG | ovarian serous cystadenocarcinoma |
| 887 | GAGTCGGGTTGCTTGGGC | ovarian serous cystadenocarcinoma |
| 888 | GAGTGACTGGGCGGTAGA | ovarian serous cystadenocarcinoma |
| 889 | GAGTGATTTGTCTGG | ovarian serous cystadenocarcinoma |
| 890 | GATAGGCCGGGTGTGGAAGCG | ovarian serous cystadenocarcinoma |
| 891 | GATCATTAACGGAGCCCGGAGG | ovarian serous cystadenocarcinoma |
| 892 | GATTTCTGCCCCGTGCTCTG | ovarian serous cystadenocarcinoma |
| 893 | GCAGACCCGGGGAACTGAACC | ovarian serous cystadenocarcinoma |
| 894 | GCAGCCAGGCTCGGAGCG | ovarian serous cystadenocarcinoma |
| 895 | GCAGCGGCTCGGGGACTGGG | ovarian serous cystadenocarcinoma |
| 896 | GCAGGTCGGAGCTCGGAGCT | ovarian serous cystadenocarcinoma |
| 897 | GCAGTCTTCAGCCTGAGA | ovarian serous cystadenocarcinoma |
| 898 | GCCCCCCCGGTGTCCCCGCA | ovarian serous cystadenocarcinoma |
| 899 | GCCGGCGACTGTGGAGTTAG | ovarian serous cystadenocarcinoma |
| 900 | GCCGTCCGGGGTCTGAAGA | ovarian serous cystadenocarcinoma |
| 901 | GCCGTGCCTGCTGTAGAGA | ovarian serous cystadenocarcinoma |
| 902 | GCCTCCGAGGACTGTGAAG | ovarian serous cystadenocarcinoma |
| 903 | GCCTCGGCCGGCGCCTAGCAGC | ovarian serous cystadenocarcinoma |
| 904 | GCCTGCGGGGTCGTCTGG | ovarian serous cystadenocarcinoma |
| 905 | GCCTTCTCTGAACACCCCGGC | ovarian serous cystadenocarcinoma |
| 906 | GCGAGCCGCTGGGAACTGAAC | ovarian serous cystadenocarcinoma |
| 907 | GCGAGCGCGGACTGGGGCG | ovarian serous cystadenocarcinoma |
| 908 | GCGCGCCGGCCGGGCGCGACCCGC | ovarian serous cystadenocarcinoma |
| 909 | GCGCGCGTGTCGCCCCCGG | ovarian serous cystadenocarcinoma |
| 910 | GCGGACTATCGGGCGGCTAG | ovarian serous cystadenocarcinoma |
| 911 | GCGGCCGGGGGCGAT | ovarian serous cystadenocarcinoma |
| 912 | GCGGGCCGGGCGACTTGAGA | ovarian serous cystadenocarcinoma |
| 913 | GCGGGCGGGCGCGACGGA | ovarian serous cystadenocarcinoma |
| 914 | GCGGGCGGGCGCGACGGAG | ovarian serous cystadenocarcinoma |
| 915 | GCGGGCGTCAGTACAGTAGAG | ovarian serous cystadenocarcinoma |
| 916 | GCGGGTTATGCGACCTGGAGTCTGAGC | ovarian serous cystadenocarcinoma |
| 917 | GCGTCGGGCCCGGGGGAGGT | ovarian serous cystadenocarcinoma |
| 918 | GCGTGTGCCACCCCTGCG | ovarian serous cystadenocarcinoma |
| 919 | GCTAATGATTAGTGGACTCG | ovarian serous cystadenocarcinoma |
| 920 | GCTCGGGCGTCGGATCGGA | ovarian serous cystadenocarcinoma |
| 921 | GCTGGGAGTGGATCTGAGA | ovarian serous cystadenocarcinoma |
| 922 | GCTGGGCTGGAGTCTCTG | ovarian serous cystadenocarcinoma |
| 923 | GCTGGGCTGGAGTCTCTGC | ovarian serous cystadenocarcinoma |
| 924 | GCTGGTCGGCGGCCGCTCTG | ovarian serous cystadenocarcinoma |
| 925 | GCTTGACATTGAACTTTGATC | ovarian serous cystadenocarcinoma |
| 926 | GGAGGTAGAGCACTGATTGG | ovarian serous cystadenocarcinoma |
| 927 | GGAGTCGGGTTCAGAT | ovarian serous cystadenocarcinoma |
| 928 | GGATCCTGCTCGGGCTG | ovarian serous cystadenocarcinoma |
| 929 | GGCGGCGGCGGGGGTGTGGGGTCT | ovarian serous cystadenocarcinoma |
| 930 | GGCTGCGGAGCCAATGGGGCGAAG | ovarian serous cystadenocarcinoma |
| 931 | GGCTGCTCTGGACTGTCCTAG | ovarian serous cystadenocarcinoma |
| 932 | GGGACTGGGAGCGGGCGG | ovarian serous cystadenocarcinoma |
| 933 | GGGAGAGGACGCGGTCTGAGTGGT | ovarian serous cystadenocarcinoma |
| 934 | GGGATATGGGACTGAGACCA | ovarian serous cystadenocarcinoma |
| 935 | GGGCAAAAGCTCGCTTGCTCTT | ovarian serous cystadenocarcinoma |
| 936 | GGGCAGCTTCCGGGAAACCAAAGT | ovarian serous cystadenocarcinoma |
| 937 | GGGCCGACCAGAAAAAGGACG | ovarian serous cystadenocarcinoma |
| 938 | GGGCGCACCACCGGCCCGTCTC | ovarian serous cystadenocarcinoma |
| 939 | GGGCGCGCAGGCAGAGAACG | ovarian serous cystadenocarcinoma |
| 940 | GGGCTGCGGGCGGCCGGGCGCGG | ovarian serous cystadenocarcinoma |
| 941 | GGGCTGCTAAGGGAACTGTGA | ovarian serous cystadenocarcinoma |
| 942 | GGGGCTGCCTCTGGAATG | ovarian serous cystadenocarcinoma |
| 943 | GGGGCTTCGGGCTGTCGGGC | ovarian serous cystadenocarcinoma |
| 944 | GGGGGAAGAGCATTTGACT | ovarian serous cystadenocarcinoma |
| 945 | GGGGGGAGAAGGGTCGGGGA | ovarian serous cystadenocarcinoma |
| 946 | GGGGGGAGCCAAAAGGGTCATC | ovarian serous cystadenocarcinoma |
| 947 | GGGGGGTAGAGCGACTGAATC | ovarian serous cystadenocarcinoma |
| 948 | GGGGGTATAGCTCAGGGTTCAGAGC | ovarian serous cystadenocarcinoma |
| 949 | GGGTCCGTCGGGCTGGGGCGC | ovarian serous cystadenocarcinoma |
| 950 | GGGTCGGGGCGGCGGCA | ovarian serous cystadenocarcinoma |
| 951 | GGTCAGTCGGTCCTAAGAG | ovarian serous cystadenocarcinoma |
| 952 | GGTCGCGCCGTTGGAGGGC | ovarian serous cystadenocarcinoma |
| 953 | GGTCGGCGGGCGGCGGGGGGGGGGGGTT | ovarian serous cystadenocarcinoma |
| 954 | GGTGAGCTCGTCGTCCGGATTGC | ovarian serous cystadenocarcinoma |
| 955 | GGTGCGGACCAGGGGCATCCGACTG | ovarian serous cystadenocarcinoma |
| 956 | GGTGGAGGCGTCGGTGGGA | ovarian serous cystadenocarcinoma |
| 957 | GGTGGGGATCGGGGATTGC | ovarian serous cystadenocarcinoma |
| 958 | GGTTCGAATCCTCCATG | ovarian serous cystadenocarcinoma |
| 959 | GTAGTTTGACTGGGGCGGT | ovarian serous cystadenocarcinoma |
| 960 | GTCGAGTGACTCTGCGCC | ovarian serous cystadenocarcinoma |
| 961 | GTCGCGGCCTGAGGAGACC | ovarian serous cystadenocarcinoma |
| 962 | GTCGGGAAAGAAGGGCTGGG | ovarian serous cystadenocarcinoma |
| 963 | GTCTGATCTCGGAAGCTAAGCAA | ovarian serous cystadenocarcinoma |
| 964 | GTGAGATCTGGGAACTCCGGGC | ovarian serous cystadenocarcinoma |
| 965 | GTGATTTCTGCCCCGTGCTCTGA | ovarian serous cystadenocarcinoma |
| 966 | GTGCGGGACCTGAGGCTGTGTG | ovarian serous cystadenocarcinoma |
| 967 | GTGCGGTGGGGGACCCTGA | ovarian serous cystadenocarcinoma |
| 968 | GTGCGTCAAGGACTACTG | ovarian serous cystadenocarcinoma |
| 969 | GTGGACAGACACAGGCCTGAGG | ovarian serous cystadenocarcinoma |
| 970 | GTGGACTCGGGCCGCTGC | ovarian serous cystadenocarcinoma |
| 971 | GTGGGGCCGGAAGGACTG | ovarian serous cystadenocarcinoma |
| 972 | GTGGGTAGCGCATTTGACTG | ovarian serous cystadenocarcinoma |
| 973 | GTGTATTTTTAGATGGAA | ovarian serous cystadenocarcinoma |
| 974 | GTGTCGCGCCGTCGGGCT | ovarian serous cystadenocarcinoma |
| 975 | GTGTTAGGACCCGCAAGATGGT | ovarian serous cystadenocarcinoma |
| 976 | GTTAGCGTTCGGATAGTTGA | ovarian serous cystadenocarcinoma |
| 977 | GTTCTCAGTTCGGATTGGAG | ovarian serous cystadenocarcinoma |
| 978 | GTTCTTCCAGTTCGCAGTCAAG | ovarian serous cystadenocarcinoma |
| 979 | GTTGGCTGGGGCTGGATG | ovarian serous cystadenocarcinoma |
| 980 | GTTTGATCTCGGAAGCTAAGC | ovarian serous cystadenocarcinoma |
| 981 | GTTTTCGGAACTGAGGCCATGATTAA | ovarian serous cystadenocarcinoma |
| 982 | GTTTTCGGATCGTAAAAC | ovarian serous cystadenocarcinoma |
| 983 | TAAGCTCTGTCGTCGAG | ovarian serous cystadenocarcinoma |
| 984 | TAAGCTTGCGTTGATTAAGTCCCTG | ovarian serous cystadenocarcinoma |
| 985 | TAAGGAACTGTCTGAGGGA | ovarian serous cystadenocarcinoma |
| 986 | TAAGGGTCGGGGCGGCAGGGGC | ovarian serous cystadenocarcinoma |
| 987 | TACGGAGCGGACGGACTGGGG | ovarian serous cystadenocarcinoma |
| 988 | TAGAGCGCCGGGACCTGTGAC | ovarian serous cystadenocarcinoma |
| 989 | TAGATCCATTCATGTTTGCAC | ovarian serous cystadenocarcinoma |
| 990 | TAGCAGCGGGACCAGTTCTGCAG | ovarian serous cystadenocarcinoma |
| 991 | TAGGCCCTGAATCAAGAC | ovarian serous cystadenocarcinoma |
| 992 | TAGTATGTGGTTGTAGAC | ovarian serous cystadenocarcinoma |
| 993 | TATCCATTGCACTCCG | ovarian serous cystadenocarcinoma |
| 994 | TATTGGCCAGTTTTGTCTGATGC | ovarian serous cystadenocarcinoma, uterine |
| | | corpus endometrial carcinoma |
| 995 | TCACTCCTCTCCTCCCGTCTTCAG | ovarian serous cystadenocarcinoma |
| 996 | TCATTGACCTCGTGTTGGACCGA | ovarian serous cystadenocarcinoma |
| 997 | TCCCCGGCACCTCCACTAAA | ovarian serous cystadenocarcinoma |
| 998 | TCCCCGGCCTCTCCACCAAGA | ovarian serous cystadenocarcinoma |
| 999 | TCCCTGAGCCCCTAACTT | ovarian serous cystadenocarcinoma |
| 1000 | TCCGCCGGGCATCGCTCTG | ovarian serous cystadenocarcinoma |
| 1001 | TCCGGGCTCTGGGTGGCGGC | ovarian serous cystadenocarcinoma |
| 1002 | TCGAGCCCAGGTCGAGG | ovarian serous cystadenocarcinoma |
| 1003 | TCGCACCCGGACCGAGACCAG | ovarian serous cystadenocarcinoma |
| 1004 | TCGGAAGCTAAGCAGGGTCGGG | ovarian serous cystadenocarcinoma |
| 1005 | TCGGTCGGGCTGGGGCGAAGC | ovarian serous cystadenocarcinoma |
| 1006 | TCGTCTGAACCTGTCTGCAGC | ovarian serous cystadenocarcinoma |
| 1007 | TCTAACTGGTGTGAGATGGT | ovarian serous cystadenocarcinoma |
| 1008 | TCTCACCCCAACTCTGCCCCAGA | ovarian serous cystadenocarcinoma |
| 1009 | TCTCGTCGCGCGCGCGTCCGT | ovarian serous cystadenocarcinoma |
| 1010 | TCTCGTCTGATCTCGGACGCTAAG | ovarian serous cystadenocarcinoma |
| 1011 | TCTGACTGCCTGTGCTGAG | ovarian serous cystadenocarcinoma |
| 1012 | TCTGTGCGAAGGTCCGTGGA | ovarian serous cystadenocarcinoma |
| 1013 | TCTTATCTCGGAAGC | ovarian serous cystadenocarcinoma |
| 1014 | TGAACGATCGTCAGGGTTTT | ovarian serous cystadenocarcinoma |
| 1015 | TGAAGCAGCCATGATCTG | ovarian serous cystadenocarcinoma |
| 1016 | TGCCCTGCGGCCCCGGCTCTGA | ovarian serous cystadenocarcinoma |
| 1017 | TGCCGGTCGCTCGCCCTCTA | ovarian serous cystadenocarcinoma |
| 1018 | TGGACAGACACAGGCCTGAGG | ovarian serous cystadenocarcinoma |
| 1019 | TGGACTCGAGGGCTGGGCG | ovarian serous cystadenocarcinoma |
| 1020 | TGGAGCGTCGGGCCCCTACCCGGCCGTCGC | ovarian serous cystadenocarcinoma |
| 1021 | TGGAGGTGCTGAACTGTCTGAGCCTG | ovarian serous cystadenocarcinoma |
| 1022 | TGGAGTGATTTGTCTGG | ovarian serous cystadenocarcinoma |
| 1023 | TGGATGTCCGGGGCTGCA | ovarian serous cystadenocarcinoma |
| 1024 | TGGCGTTCGCCGGGCTGGAGC | ovarian serous cystadenocarcinoma |
| 1025 | TGGCTGCTGGGACTCAAG | ovarian serous cystadenocarcinoma |
| 1026 | TGGGTCGGTCGAGCTGGGGCGC | ovarian serous cystadenocarcinoma |
| 1027 | TGGTCTGGAACTGAACCTGCAGT | ovarian serous cystadenocarcinoma |
| 1028 | TGGTCTGTGGAGCTCGGCGGCG | ovarian serous cystadenocarcinoma |
| 1029 | TGGTGGCGGGGAGCGGT | ovarian serous cystadenocarcinoma |
| 1030 | TGTGAGAACGCGGTCTGAGTGGT | ovarian serous cystadenocarcinoma |
| 1031 | TGTGATGCGAACTGGAGTCTGAGCCT | ovarian serous cystadenocarcinoma |
| 1032 | TGTGATTTCTGCCCAGTGC | ovarian serous cystadenocarcinoma |
| 1033 | TGTGTAGGATTCTGACCCAC | ovarian serous cystadenocarcinoma |
| 1034 | TGTTGGTTTTCGGCACTGAG | ovarian serous cystadenocarcinoma |
| 1035 | TGTTTACCCTCTTACTTTC | ovarian serous cystadenocarcinoma |
| 1036 | TTAATAGGAACAGTCGG | ovarian serous cystadenocarcinoma |
| 1037 | TTATGCCTGAACGCCTCTA | ovarian serous cystadenocarcinoma |
| 1038 | TTCAATACGGGACTGATG | ovarian serous cystadenocarcinoma |
| 1039 | TTCAGATTTTTGGATTAAGGACGTTCAACT | ovarian serous cystadenocarcinoma |
| 1040 | TTCCACGCTCTTCCCTGCCT | ovarian serous cystadenocarcinoma |
| 1041 | TTCCGATACCGAACGAGACTCTGGCAT | ovarian serous cystadenocarcinoma |
| 1042 | TTCGAACTTGACTATCT | ovarian serous cystadenocarcinoma |
| 1043 | TTCGGATGGGGCTGTTCTGCG | ovarian serous cystadenocarcinoma |
| 1044 | TTCGGTCGGGCTGGG | ovarian serous cystadenocarcinoma |
| 1045 | TTCTTTCGCTCCTATCTGATG | ovarian serous cystadenocarcinoma |
| 1046 | TTGAGGTCCGGGGCAGAG | ovarian serous cystadenocarcinoma |
| 1047 | TTGATCACTCGGCTCG | ovarian serous cystadenocarcinoma |
| 1048 | TTGCCGGTCGCTCGCCCTCTT | ovarian serous cystadenocarcinoma |
| 1049 | TTGGGGTTGTGGGACAGT | ovarian serous cystadenocarcinoma |
| 1050 | TTGGGTTTTAAGCAGGAGGT | ovarian serous cystadenocarcinoma |
| 1051 | TTGGTCCGCGAGGTCCCGGGT | ovarian serous cystadenocarcinoma |
| 1052 | TTGTCTGGGCCCGGAGTAGG | ovarian serous cystadenocarcinoma |
| 1053 | TTGTTTGGGATTGCAG | ovarian serous cystadenocarcinoma |
| 1054 | TTTCAGAGTAGTTGGGGTTG | ovarian serous cystadenocarcinoma |
| 1055 | TTTGCAGGACCAGGGCCGG | ovarian serous cystadenocarcinoma |
| 1056 | TTTGGCAATGGTAGACCTCCCACT | ovarian serous cystadenocarcinoma |
| 1057 | AACATCGGATTTGGGGAACGC | mesothelioma, pancreatic adenocarcinoma |
| 1058 | CCGCTCCCCGGCGCCGCTCGTGGG | adrenocortical carcinoma, pancreatic |
| | | adenocarcinoma |
| 1059 | GGAGCGCGCCGCGGCTGGACGAG | adrenocortical carcinoma, pancreatic |
| | | adenocarcinoma |
| 1060 | ATGTTTGTACTCTGGCCGCT | brain lower grade glioma, pancreatic |
| | | adenocarcinoma, uveal melanoma |
| 1061 | AGGGGGGGAGTTTGACTGGGGCG | cervical squamous cell carcinoma and |
| | | endocervical adenocarcinoma, pancreatic |
| | | adenocarcinoma |
| 1062 | CACTGTCCCTACCTACTCTC | cervical squamous cell carcinoma and |
| | | endocervical adenocarcinoma, pancreatic |
| | | adenocarcinoma |
| 1063 | CGGACCAGGGGAATCCGCCTGTT | cervical squamous cell carcinoma and |
| | | endocervical adenocarcinoma, pancreatic |
| | | adenocarcinoma |
| 1064 | GTCGGGGTTTCGTACGTCG | cervical squamous cell carcinoma and |
| | | endocervical adenocarcinoma, pancreatic |
| | | adenocarcinoma, uterine corpus endometrial |
| | | carcinoma |
| 1065 | GTCTGGGTTTCGTACGTAGCA | cervical squamous cell carcinoma and |
| | | endocervical adenocarcinoma, pancreatic |
| | | adenocarcinoma |
| 1066 | ACCATGACCGAGACGTGTGGAA | cholangiocarcinoma, pancreatic |
| | | adenocarcinoma |
| 1067 | CGAGCCGTCGGGCCCGGGGGAGGTT | cholangiocarcinoma, pancreatic |
| | | adenocarcinoma |
| 1068 | GATGGCGCTGGAGCGTCGGGCCCCT | cholangiocarcinoma, pancreatic |
| | | adenocarcinoma |
| 1069 | CGAGAGAGGGGCCCGTGCCTTGG | head and neck squamous cell carcinoma, |
| | | pancreatic adenocarcinoma |
| 1070 | AAAACCAGTCGATGGGCTGTCTT | pancreatic adenocarcinoma |
| 1071 | AAAACCTTGCCAGGGATTTCC | pancreatic adenocarcinoma |
| 1072 | AAAATTCAACGCTGTCTGTGA | pancreatic adenocarcinoma |
| 1073 | AAACCTCTGCAGGCAAATGTG | pancreatic adenocarcinoma |
| 1074 | AACACGTGTGGAAAACTAATGACTGAGC | pancreatic adenocarcinoma |
| 1075 | AACATTCAACGCTGTCCGCGAGT | pancreatic adenocarcinoma |
| 1076 | AAGACATTTCCAGGGATTACC | pancreatic adenocarcinoma |
| 1077 | AAGACATTTCCAGGGATTTCC | pancreatic adenocarcinoma |
| 1078 | AAGACCTTGCCAGGGATTACCA | pancreatic adenocarcinoma |
| 1079 | AAGACCTTGCCAGGGATTTC | pancreatic adenocarcinoma |
| 1080 | AAGACCTTGCCAGGGATTTCCAA | pancreatic adenocarcinoma |
| 1081 | AAGCCGTAAATCCGATCTTGT | pancreatic adenocarcinoma |
| 1082 | AAGCTGCCAGTTGAAGCCTTGA | pancreatic adenocarcinoma |
| 1083 | AAGCTGCCAGTTTAAGCCGTGT | pancreatic adenocarcinoma |
| 1084 | AAGGTGCCAGCTGAAGCACTGT | pancreatic adenocarcinoma |
| 1085 | AAGGTGCCAGTTTAAGAAATGT | pancreatic adenocarcinoma |
| 1086 | AATCTATCAGACTGATGTTGA | pancreatic adenocarcinoma |
| 1087 | ACACTGTATACCCGAATTTGT | pancreatic adenocarcinoma |
| 1088 | ACAGCAGTCTGCCCATTGGTT | pancreatic adenocarcinoma |
| 1089 | ACAGTGTATATCCGAATTTGTGT | pancreatic adenocarcinoma |
| 1090 | ACCATGACCGAGACGTGTGGAAA | pancreatic adenocarcinoma |
| 1091 | ACCGTAGTCAGCACATTGGTT | pancreatic adenocarcinoma |
| 1092 | ACCGTAGTCTGCACATTCGTT | pancreatic adenocarcinoma |
| 1093 | ACCGTATTCTGCACATTGGTA | pancreatic adenocarcinoma |
| 1094 | ACCGTATTCTGCACATTGTTT | pancreatic adenocarcinoma |
| 1095 | ACCTTATTCTGCACATTGCT | pancreatic adenocarcinoma |
| 1096 | ACCTTTGTCTGCACATTGGTTA | pancreatic adenocarcinoma |
| 1097 | ACGCTGTAAATCCGAATTTG | pancreatic adenocarcinoma |
| 1098 | ACGCTGTACATCCGAATTTGTG | pancreatic adenocarcinoma |
| 1099 | ACGCTGTATATCCGAATTTG | pancreatic adenocarcinoma |
| 1100 | ACTACTGACCGTTGACTGTTCC | pancreatic adenocarcinoma |
| 1101 | ACTAGATTGTGAGCTCATCGAG | pancreatic adenocarcinoma |
| 1102 | ACTCTGTATATCCGAATTTGTTT | pancreatic adenocarcinoma |
| 1103 | ACTGCACTTGACCGCTCTGA | pancreatic adenocarcinoma |
| 1104 | ACTTTCGTCTGCACATTGGT | pancreatic adenocarcinoma |
| 1105 | AGAGCCTTGCCAGGGATTTCCAG | pancreatic adenocarcinoma |
| 1106 | AGAGTATTCTGCACATTGGT | pancreatic adenocarcinoma |
| 1107 | AGAGTGGGAGTTGAAGAACTGT | pancreatic adenocarcinoma |
| 1108 | AGATTGGACCAGACCCTGA | pancreatic adenocarcinoma |
| 1109 | AGCAGCATTGCACAGGGCTCTGA | pancreatic adenocarcinoma |
| 1110 | AGCGTCTCAGACTGATGTTGA | pancreatic adenocarcinoma |
| 1111 | AGGGCACTGGTAGAATTCGCT | pancreatic adenocarcinoma |
| 1112 | AGGGCACTTGTAGAATTCACT | pancreatic adenocarcinoma |
| 1113 | AGTGCTGGGCTGTAGTGCGCT | pancreatic adenocarcinoma |
| 1114 | ATAACATGGCCAGGGATTTCCA | pancreatic adenocarcinoma |
| 1115 | ATAGCCATTGTCTGCTGGGTTT | pancreatic adenocarcinoma |
| 1116 | ATCAGAATTGTACAGGTCTCTGA | pancreatic adenocarcinoma |
| 1117 | ATCAGCATTGTCCAGGTCTATGA | pancreatic adenocarcinoma |
| 1118 | ATCATATCAGACTGATGTTGA | pancreatic adenocarcinoma |
| 1119 | ATCTGCCATTTGAAGACCTGT | pancreatic adenocarcinoma |
| 1120 | ATGACATTTCCAGGGATTTCC | pancreatic adenocarcinoma |
| 1121 | ATGCTGCCAGTTGAAGTAGTGT | pancreatic adenocarcinoma |
| 1122 | ATGGACATTGTCTGCTGGGTT | pancreatic adenocarcinoma |
| 1123 | ATGGCACTTGTAGAATTCAATG | pancreatic adenocarcinoma |
| 1124 | ATGTCTTTTTGGAAATAGGA | pancreatic adenocarcinoma |
| 1125 | ATTCTGCATCAGGAACTGATTGT | pancreatic adenocarcinoma |
| 1126 | ATTGGGTCCGAGTGTTGTGGGTTATTGTT | pancreatic adenocarcinoma |
| 1127 | CAACATGATGGAACTGAGGCTCTGAGG | pancreatic adenocarcinoma |
| 1128 | CAAGACCAGTCGATGGGCTGA | pancreatic adenocarcinoma |
| 1129 | CACAGTTCTGCTCGTGCAGGTAG | pancreatic adenocarcinoma |
| 1130 | CACCACCAGTCGATGGGCTATT | pancreatic adenocarcinoma |
| 1131 | CACCCCCGGTCGATGGGCTGT | pancreatic adenocarcinoma |
| 1132 | CACGTCACTAGTGGTTCCGTTTAGT | pancreatic adenocarcinoma |
| 1133 | CAGACCTATGAATTGACAGTCA | pancreatic adenocarcinoma |
| 1134 | CAGAGTGGTCTCTGGGATTATG | pancreatic adenocarcinoma |
| 1135 | CAGCGCCTGTGACAGCGGCTGA | pancreatic adenocarcinoma |
| 1136 | CAGCGCGTTTGACAGCGGCTGA | pancreatic adenocarcinoma |
| 1137 | CAGGAGTGTGCACATTGGTT | pancreatic adenocarcinoma |
| 1138 | CAGTTCGGAGTTAGCTCAAGCGG | pancreatic adenocarcinoma |
| 1139 | CATGGTACTTGTCTCGGTCTG | pancreatic adenocarcinoma |
| 1140 | CCAAGTGTTTAGACTACCTGTTC | pancreatic adenocarcinoma |
| 1141 | CCCACCCTCAGATCAGACGT | pancreatic adenocarcinoma |
| 1142 | CCCAGTTTTCAGACTAGCTGTT | pancreatic adenocarcinoma |
| 1143 | CCCATCTGACTCCTTTTCTTCTAGA | pancreatic adenocarcinoma |
| 1144 | CCCCGTCTCGTCGCGCGCGCGTC | pancreatic adenocarcinoma |
| 1145 | CCCTGGTCGGAGTTAGCTCAAGC | pancreatic adenocarcinoma, skin cutaneous |
| | | melanoma |
| 1146 | CCGAGTGTTCAGACTATCTGTTC | pancreatic adenocarcinoma |
| 1147 | CCGCGGGGCCCCGGCGGCGGGGGCACG | pancreatic adenocarcinoma |
| 1148 | CCTAGTTTTCAGACTAGCTGTTC | pancreatic adenocarcinoma |
| 1149 | CCTCGGACTACCGGGTGCTGTAGGCTT | pancreatic adenocarcinoma |
| 1150 | CCTGAGCCAGCAGATCGAGT | pancreatic adenocarcinoma |
| 1151 | CGAGCACCAGCTGAAATCGGTT | pancreatic adenocarcinoma |
| 1152 | CGAGCCCCATCTGAAATCGG | pancreatic adenocarcinoma |
| 1153 | CGGGACGCGAGCCGGGCCCTT | pancreatic adenocarcinoma |
| 1154 | CGTGCTGTCGGATGTTTACAG | pancreatic adenocarcinoma |
| 1155 | CTATCTCCCCCGCTCCCCGTC | pancreatic adenocarcinoma |
| 1156 | CTATCTCTCTCCCCCGCTCC | pancreatic adenocarcinoma |
| 1157 | CTCTGCGGGTGACAGCGGCTGA | pancreatic adenocarcinoma |
| 1158 | CTCTGCGTGTGACAGCGGCTGAG | pancreatic adenocarcinoma |
| 1159 | CTGCCCTGAAGCTCCTTGAGGT | pancreatic adenocarcinoma |
| 1160 | CTGGCTTAGCGTCGCT | pancreatic adenocarcinoma |
| 1161 | CTGGGTCGGTCGGGCTGGGGCGG | pancreatic adenocarcinoma |
| 1162 | CTTATCATATTGTATTGTGATT | pancreatic adenocarcinoma |
| 1163 | CTTTCATGCGGATGTTTAAAG | pancreatic adenocarcinoma |
| 1164 | GCAACCATCCTTGACTGGCAGCT | pancreatic adenocarcinoma |
| 1165 | GCATCAGTGGCCTAATGGA | pancreatic adenocarcinoma |
| 1166 | GCGCGCTCCGCGGCTGGACGAG | pancreatic adenocarcinoma |
| 1167 | GCGCGCTCGCCGGCCGAGGTG | pancreatic adenocarcinoma |
| 1168 | GCGGGTGGTGTGCGTCGG | pancreatic adenocarcinoma |
| 1169 | GGACGCCGGTGAAATACCACTAC | pancreatic adenocarcinoma |
| 1170 | GGACGCCGGTGAAATACCACTACTCTGA | pancreatic adenocarcinoma |
| 1171 | GGAGATCAGACTGATGTTGA | pancreatic adenocarcinoma |
| 1172 | GGAGCCGGTGAAATACCACTACTCTGA | pancreatic adenocarcinoma |
| 1173 | GGAGCTTATCAGACTGATCTTGA | pancreatic adenocarcinoma |
| 1174 | GGAGGAAGGAGGTTGTGTGG | pancreatic adenocarcinoma |
| 1175 | GGAGGAAGTAGGTTGTGTGGTT | pancreatic adenocarcinoma |
| 1176 | GGCCGCGCCGTCGGGCCCGGGGGAG | pancreatic adenocarcinoma |
| 1177 | GGCCTCAGGTACCATGACCGAG | pancreatic adenocarcinoma |
| 1178 | GGCGTTCTGGGCTGTAGTGCGCT | pancreatic adenocarcinoma |
| 1179 | GGGCGCTTTGCCTAATGGA | pancreatic adenocarcinoma |
| 1180 | GGGGGATTATGACTGAACGCCT | pancreatic adenocarcinoma |
| 1181 | GTAGCTTATCAGACTGATCTTG | pancreatic adenocarcinoma |
| 1182 | GTAGCTTATCATACTGCTGTTGA | pancreatic adenocarcinoma, uveal melanoma |
| 1183 | GTATCTTATCCGACTGATGTTGA | pancreatic adenocarcinoma |
| 1184 | GTCCCGTCCTGTGATAGCTGA | pancreatic adenocarcinoma |
| 1185 | GTCGTCTTGGCCGAGTGGTTAAGG | pancreatic adenocarcinoma |
| 1186 | GTGACATTTTTAGGACCATTAGA | pancreatic adenocarcinoma |
| 1187 | GTGCCATTGGCGCAATGGC | pancreatic adenocarcinoma |
| 1188 | GTGCGCTCGCCGCGGCTGGACG | pancreatic adenocarcinoma |
| 1189 | GTGTGCGCGCCGCGGCTGGACG | pancreatic adenocarcinoma |
| 1190 | GTTACCATCCTTGACTGGCAGC | pancreatic adenocarcinoma |
| 1191 | GTTTTCGGAACTGCGGCCATG | pancreatic adenocarcinoma, rectum |
| | | adenocarcinoma |
| 1192 | TAAAGCAGGCACAGACAGGCAGA | pancreatic adenocarcinoma |
| 1193 | TAAAGTACTGTGATAACTGGAC | pancreatic adenocarcinoma |
| 1194 | TAAAGTACTGTTATAACTTC | pancreatic adenocarcinoma |
| 1195 | TAAAGTAGTATGCACATTGGTT | pancreatic adenocarcinoma |
| 1196 | TAACACAGTGTAGAACCACGGAC | pancreatic adenocarcinoma |
| 1197 | TAACTTATCACACTGATGTTG | pancreatic adenocarcinoma |
| 1198 | TAAGATTAAGCACTGTCGTT | pancreatic adenocarcinoma |
| 1199 | TAAGCTCAGCTGGCAACTGTGAG | pancreatic adenocarcinoma |
| 1200 | TAAGCTTAAGCACTGTCGCA | pancreatic adenocarcinoma |
| 1201 | TAAGGTATTAGGTTGTCTTGTT | pancreatic adenocarcinoma |
| 1202 | TAAGGTGGTAGGTTGTCTAGTT | pancreatic adenocarcinoma |
| 1203 | TAAGTTGTCAGACTGATGTTGAA | pancreatic adenocarcinoma |
| 1204 | TAAGTTGTCAGACTGTTGTTG | pancreatic adenocarcinoma |
| 1205 | TACAATACTGTGATAAATGAAC | pancreatic adenocarcinoma |
| 1206 | TACACCGTTGCTAAGTTCTGC | pancreatic adenocarcinoma |
| 1207 | TACAGTATTCTGCACATTTGT | pancreatic adenocarcinoma |
| 1208 | TACCCTATAGATCCGATTTTG | pancreatic adenocarcinoma |
| 1209 | TACCCTGTAGCTCAGACTTTGT | pancreatic adenocarcinoma |
| 1210 | TACCCTTAAGAACTGTAGCTC | pancreatic adenocarcinoma |
| 1211 | TACCCTTTAGCTCAGAATTTGT | pancreatic adenocarcinoma |
| 1212 | TACCTTGTCAGACTGAAGTTG | pancreatic adenocarcinoma |
| 1213 | TACGATGAATCACTGTAGCT | pancreatic adenocarcinoma |
| 1214 | TACTTTATCTGACTGATGTTGA | pancreatic adenocarcinoma |
| 1215 | TACTTTGTCAGACTGAAGTTGA | pancreatic adenocarcinoma |
| 1216 | TAGACCGTGGCTAAGTTCTG | pancreatic adenocarcinoma |
| 1217 | TAGCATCATCTTAAATCGTTT | pancreatic adenocarcinoma |
| 1218 | TAGCCTAACACACTGATGTTGA | pancreatic adenocarcinoma |
| 1219 | TAGCCTATAGATCCGATTTTGA | pancreatic adenocarcinoma |
| 1220 | TAGCGTATTAGGTTGTCTTGTT | pancreatic adenocarcinoma |
| 1221 | TAGCGTGGTAGGTTGTATCGTT | pancreatic adenocarcinoma |
| 1222 | TAGCTCAGTTCAGCAGGAAGAG | pancreatic adenocarcinoma |
| 1223 | TAGCTTAGAAGACTGATATTGA | pancreatic adenocarcinoma |
| 1224 | TAGCTTAGCACACTGATGTTG | pancreatic adenocarcinoma |
| 1225 | TAGCTTAGCAGACTGTAGATGAC | pancreatic adenocarcinoma |
| 1226 | TAGCTTAGCAGACTTATGTTG | pancreatic adenocarcinoma |
| 1227 | TAGCTTAGCAGTCTGATGTTGA | pancreatic adenocarcinoma |
| 1228 | TAGCTTATCAGCCTAATGTTGC | pancreatic adenocarcinoma |
| 1229 | TAGCTTATCAGCCTTCTGTTGA | pancreatic adenocarcinoma |
| 1230 | TAGCTTATCAGGGTTATGTTGA | pancreatic adenocarcinoma |
| 1231 | TAGCTTATCAGTCTGACGTTGA | pancreatic adenocarcinoma |
| 1232 | TAGCTTATCTGACTGAGGTTGAC | pancreatic adenocarcinoma |
| 1233 | TAGCTTATGAGACTGATGGTGAC | pancreatic adenocarcinoma |
| 1234 | TAGCTTGTCAGACTGAAGTT | pancreatic adenocarcinoma |
| 1235 | TAGCTTGTCAGACTGATATTGA | pancreatic adenocarcinoma |
| 1236 | TAGCTTGTCAGCCTGATGGTGA | pancreatic adenocarcinoma |
| 1237 | TAGCTTGTCAGGCTGAAGCTGA | pancreatic adenocarcinoma |
| 1238 | TAGGGTAGTAGTTTGTATAGT | pancreatic adenocarcinoma |
| 1239 | TAGGGTAGTAGTTTGTCCAGTT | pancreatic adenocarcinoma |
| 1240 | TAGGTTATCCGACTGATGTTGC | pancreatic adenocarcinoma |
| 1241 | TAGGTTATCCGCCTGATGTTGA | pancreatic adenocarcinoma |
| 1242 | TAGTGTAGTAGGTTGTGTTG | pancreatic adenocarcinoma |
| 1243 | TAGTGTATTAGGTTGTGTGG | pancreatic adenocarcinoma |
| 1244 | TAGTTTAGCAGACTGAAGATGA | pancreatic adenocarcinoma |
| 1245 | TAGTTTATCAGATTGATGTTG | pancreatic adenocarcinoma |
| 1246 | TATACTTAAGCACTGTAGATCT | pancreatic adenocarcinoma |
| 1247 | TATAGTAATCTGCACATTGGTT | pancreatic adenocarcinoma |
| 1248 | TATAGTAGTAGGTTGTGGGG | pancreatic adenocarcinoma |
| 1249 | TATAGTATTAGTTTGTATAGTT | pancreatic adenocarcinoma |
| 1250 | TATATACCTCTTCGACTGGAAG | pancreatic adenocarcinoma |
| 1251 | TATCCTGTAGATCCGAGTTTG | pancreatic adenocarcinoma |
| 1252 | TATCCTTTAGAACAGACTTTGT | pancreatic adenocarcinoma |
| 1253 | TATCCTTTAGATCAGACTTTGT | pancreatic adenocarcinoma |
| 1254 | TATCCTTTAGATCCGAATTTGTT | pancreatic adenocarcinoma |
| 1255 | TATGGTATTAGGTTGTCTCGTT | pancreatic adenocarcinoma |
| 1256 | TCAAAGTTTCCGGGTTCGTGTCCCGGCGG | pancreatic adenocarcinoma |
| 1257 | TCAGTGCGCTAGAGAACTCTGT | pancreatic adenocarcinoma |
| 1258 | TCCCTGATACCCTAACCTGTGA | pancreatic adenocarcinoma |
| 1259 | TCCTGAAGTAGGTTGTATAGTT | pancreatic adenocarcinoma |
| 1260 | TCGAATTAAGCACTGTAGCTCA | pancreatic adenocarcinoma |
| 1261 | TCGTTGCACGACAGAACTTTG | pancreatic adenocarcinoma |
| 1262 | TCTATGCACCACAGAACTTTGT | pancreatic adenocarcinoma |
| 1263 | TCTGTGCACGACAGAACTTTG | pancreatic adenocarcinoma |
| 1264 | TCTGTGCACTCCAGAAATTTGT | pancreatic adenocarcinoma |
| 1265 | TGAACAGTTGCTAAGTTCTG | pancreatic adenocarcinoma |
| 1266 | TGAGATGAAGCACTGTGTGG | pancreatic adenocarcinoma |
| 1267 | TGAGATGACACACTGTTGTTCT | pancreatic adenocarcinoma |
| 1268 | TGAGATGGAGCACTTTCGCTCT | pancreatic adenocarcinoma |
| 1269 | TGAGATTAAGAACTGTCGTTC | pancreatic adenocarcinoma |
| 1270 | TGAGCAGTTGCTAAGTTCCG | pancreatic adenocarcinoma |
| 1271 | TGAGCAGTTGCTAAGTTCTG | pancreatic adenocarcinoma |
| 1272 | TGAGCCGAATCTCCAGGGGTAA | pancreatic adenocarcinoma |
| 1273 | TGAGCCGTGGCTAAGTTCTG | pancreatic adenocarcinoma |
| 1274 | TGAGCTTAAGCCCTGTAGGT | pancreatic adenocarcinoma |
| 1275 | TGAGGTAATAGGTTGTCTTGTT | pancreatic adenocarcinoma |
| 1276 | TGAGGTAGTAGGTTGTGCGGCT | pancreatic adenocarcinoma |
| 1277 | TGAGGTATTAGATTGTCTCG | pancreatic adenocarcinoma |
| 1278 | TGAGGTATTAGGTTGTCTTGTTT | pancreatic adenocarcinoma |
| 1279 | TGAGGTATTAGGTTGTTTTGTTA | pancreatic adenocarcinoma |
| 1280 | TGAGGTCGTTCGTCTTATAGTT | pancreatic adenocarcinoma |
| 1281 | TGAGTTAGCAGACTTATGTTGA | pancreatic adenocarcinoma |
| 1282 | TGAGTTATAAGACTGATGGTGA | pancreatic adenocarcinoma |
| 1283 | TGAGTTATCAGACTTTTGTTGA | pancreatic adenocarcinoma |
| 1284 | TGAGTTGTCAGAATGATGTTGA | pancreatic adenocarcinoma |
| 1285 | TGAGTTGTCAGACTGACGTTG | pancreatic adenocarcinoma |
| 1286 | TGATATTAAGAACTGTCGCT | pancreatic adenocarcinoma |
| 1287 | TGCACAGTTGCTAAGTTCTG | pancreatic adenocarcinoma |
| 1288 | TGCCCTGTGGACTCAGTTCTGGG | pancreatic adenocarcinoma |
| 1289 | TGCCTTATCAGACGGATGTTGA | pancreatic adenocarcinoma |
| 1290 | TGCGATATTAGGTTGTGTGG | pancreatic adenocarcinoma |
| 1291 | TGCGGTAGTCGGTTGTGTGGTTT | pancreatic adenocarcinoma |
| 1292 | TGCGGTATTAGATTGTCTGGTT | pancreatic adenocarcinoma |
| 1293 | TGCTATGCCAACATATTGCCCTC | pancreatic adenocarcinoma |
| 1294 | TGCTATTAAGCACTGTGGGTCT | pancreatic adenocarcinoma |
| 1295 | TGCTCTTCAGCACTGTAGCTA | pancreatic adenocarcinoma |
| 1296 | TGCTGTAATAGGTTGTCTCGTT | pancreatic adenocarcinoma |
| 1297 | TGCTGTAGTAGTTTGTCCAGT | pancreatic adenocarcinoma |
| 1298 | TGGCTTATCAGACGGATGGTGA | pancreatic adenocarcinoma |
| 1299 | TGGCTTATCAGCCTGATGCTGA | pancreatic adenocarcinoma |
| 1300 | TGTAACATCAACCCCATGTGGA | pancreatic adenocarcinoma |
| 1301 | TGTAGCACTGGTAGAACTCA | pancreatic adenocarcinoma |
| 1302 | TTAACAGTTGCTAAGTTCCG | pancreatic adenocarcinoma |
| 1303 | TTAGGTAGTAGGTCGTGTGG | pancreatic adenocarcinoma |
| 1304 | TTAGGTAGTTGGTTGTATAG | pancreatic adenocarcinoma |
| 1305 | TTATCTTCAGCACTGTCGCT | pancreatic adenocarcinoma |
| 1306 | TTCATAGTATTTACCAACCAGT | pancreatic adenocarcinoma |
| 1307 | TTCATGCTAATCGTGATACGGGT | pancreatic adenocarcinoma |
| 1308 | TTCCATAACAGACTGATGTTGA | pancreatic adenocarcinoma |
| 1309 | TTCCCTATGTATTGACAGCCAG | pancreatic adenocarcinoma |
| 1310 | TTCCGTATTAGGTTGTATAG | pancreatic adenocarcinoma |
| 1311 | TTCCTAATCAGACTGATGTTGA | pancreatic adenocarcinoma |
| 1312 | TTCGGTATTAGATTGTATCGTT | pancreatic adenocarcinoma |
| 1313 | TTCTACCCACGTCTGCTCTGA | pancreatic adenocarcinoma |
| 1314 | TTCTATAAAGCACTGTCGTTCT | pancreatic adenocarcinoma |
| 1315 | TTCTATATTAGGTTGTCTCGTT | pancreatic adenocarcinoma |
| 1316 | TTCTCTATGAATTGACACCCAG | pancreatic adenocarcinoma |
| 1317 | TTCTGGGGTAGGTTGTGTGGTT | pancreatic adenocarcinoma |
| 1318 | TTCTGTAATAGGTTGTCTTGTT | pancreatic adenocarcinoma |
| 1319 | TTCTGTAATAGTTTGTATAGT | pancreatic adenocarcinoma |
| 1320 | TTCTGTAGTAGTTTGTATCGTT | pancreatic adenocarcinoma |
| 1321 | TTCTGTAGTAGTTTGTCTAGT | pancreatic adenocarcinoma |
| 1322 | TTCTGTAGTTGGTTGTATGGTT | pancreatic adenocarcinoma |
| 1323 | TTCTGTATTAGATTGTATAGA | pancreatic adenocarcinoma |
| 1324 | TTCTGTATTAGATTGTCTGGTT | pancreatic adenocarcinoma |
| 1325 | TTCTGTATTAGGTTGTCTCG | pancreatic adenocarcinoma |
| 1326 | TTCTGTATTAGGTTGTCTCGTTT | pancreatic adenocarcinoma |
| 1327 | TTCTGTATTAGGTTGTGTCGTT | pancreatic adenocarcinoma |
| 1328 | TTCTGTATTAGGTTGTGTTGTTT | pancreatic adenocarcinoma |
| 1329 | TTCTGTATTAGGTTGTTTTGTT | pancreatic adenocarcinoma |
| 1330 | TTCTGTATTAGTTTGTCTTGTT | pancreatic adenocarcinoma |
| 1331 | TTCTGTGTTAGGTTGTCTCGTT | pancreatic adenocarcinoma |
| 1332 | TTCTTTAGCAGACTGAAGATGA | pancreatic adenocarcinoma |
| 1333 | TTCTTTAGCAGACTGAAGTTGA | pancreatic adenocarcinoma |
| 1334 | TTCTTTATCAAACTGATGTTG | pancreatic adenocarcinoma |
| 1335 | TTCTTTATCACACTGTTGTTGA | pancreatic adenocarcinoma |
| 1336 | TTCTTTATTACACTGATGTTGA | pancreatic adenocarcinoma |
| 1337 | TTCTTTATTAGTTTGTGTGGTT | pancreatic adenocarcinoma |
| 1338 | TTCTTTGTCACACTGATGTTGA | pancreatic adenocarcinoma |
| 1339 | TTGCATGTCAGACTGAAGCTGA | pancreatic adenocarcinoma |
| 1340 | TTGCTCATTTCAGCAGGAGCAG | pancreatic adenocarcinoma |
| 1341 | TTGCTTATCAGACGGATGTTG | pancreatic adenocarcinoma |
| 1342 | TTGGAGACTATGGCACGTAG | pancreatic adenocarcinoma |
| 1343 | TTGGCTTAAGCACTGTAGA | pancreatic adenocarcinoma |
| 1344 | TTGGCTTAAGCACTGTAGGTCT | pancreatic adenocarcinoma |
| 1345 | TTGGCTTAAGCACTGTGGGTCT | pancreatic adenocarcinoma |
| 1346 | TTGGGTAGGAGGTTGTATAGA | pancreatic adenocarcinoma |
| 1347 | TTGGGTAGTACGTTGTATAGT | pancreatic adenocarcinoma |
| 1348 | TTGGGTAGTAGATTGTCTGGTT | pancreatic adenocarcinoma |
| 1349 | TTGGTAATCAGACTGATGTTGA | pancreatic adenocarcinoma |
| 1350 | TTGGTAATCAGACTGATGTTGA | pancreatic adenocarcinoma |
| 1351 | TTGGTCAGTTCAGCAGGCACAG | pancreatic adenocarcinoma |
| 1352 | TTGGTCATCAGACTGATGTTGA | pancreatic adenocarcinoma |
| 1353 | TTGGTTAGCAGACTTATGTTGA | pancreatic adenocarcinoma |
| 1354 | TTGGTTATCAGACTGATGTTGG | pancreatic adenocarcinoma |
| 1355 | TTGGTTATTAGGTTGTGTGGTT | pancreatic adenocarcinoma |
| 1356 | TTGGTTGTCAGACTGATGTTG | pancreatic adenocarcinoma |
| 1357 | TTGTGTAGTAGGTTGTCTGGT | pancreatic adenocarcinoma |
| 1358 | TTGTGTATTAGGTTGTATAGA | pancreatic adenocarcinoma |
| 1359 | TTGTGTATTAGGTTGTGTGGTTA | pancreatic adenocarcinoma |
| 1360 | TTGTTCATTTCAGCAGGAACAG | pancreatic adenocarcinoma |
| 1361 | TTGTTTATCAGGCTGATGTTG | pancreatic adenocarcinoma |
| 1362 | TTTAACCATCCTCGACTGGGAGCT | pancreatic adenocarcinoma |
| 1363 | TTTACACCTCCTACACTCTCAGCT | pancreatic adenocarcinoma |
| 1364 | TTTGCTGAAGCACTGTAGTTCT | pancreatic adenocarcinoma |
| 1365 | TTTGCTGGAGCACTGTAGCT | pancreatic adenocarcinoma |
| 1366 | TTTGGTAGTCTGCACATTGGT | pancreatic adenocarcinoma |
| 1367 | AAAAGTGCTTACCGTGCAGGTAGT | prostate adenocarcinoma |
| 1368 | AAGCTGCCAGCTCCATAACTGT | prostate adenocarcinoma |
| 1369 | AAGCTTCCAGCTCCATAACTGT | prostate adenocarcinoma |
| 1370 | AATTGCACGGTGTCCATCTGTA | prostate adenocarcinoma |
| 1371 | AATTTTCCAGTACCGTGTTGG | prostate adenocarcinoma |
| 1372 | ACACCATGATGGCACTGAGGATCTGCGG | prostate adenocarcinoma |
| 1373 | AGGAGACTCTGGACGCGAGCCG | prostate adenocarcinoma |
| 1374 | ATGGAACTGAGGCTCTGAGGAA | prostate adenocarcinoma |
| 1375 | CAAAGTGCTCATCGTTCAGGTAG | prostate adenocarcinoma |
| 1376 | CAGAATGCTGACTAGTAGACTA | prostate adenocarcinoma |
| 1377 | CAGCTGCCAGGTGCATAACTGT | prostate adenocarcinoma |
| 1378 | CAGCTTCCAGCTGCATAGCTGT | prostate adenocarcinoma |
| 1379 | CCACCATGATGGAACTGAG | prostate adenocarcinoma |
| 1380 | CGTAGGGACCTGTATGAATGGC | prostate adenocarcinoma |
| 1381 | CTCGTACGACCCTTATCGGTGG | prostate adenocarcinoma |
| 1382 | CTGGATGATGCTCAGCAAATGCTGACTGA | prostate adenocarcinoma |
| 1383 | GAGGGTGATGCGAACTGGAGTCTGNGC | prostate adenocarcinoma |
| 1384 | GCGGTCGGCGGGCGGCGGGGGC | prostate adenocarcinoma |
| 1385 | GCTTGTGATGACTTACATGTA | prostate adenocarcinoma |
| 1386 | GGATTCCTGGCACTACTGTTCT | prostate adenocarcinoma |
| 1387 | GTACAGTACTGTTATAACTTAA | prostate adenocarcinoma |
| 1388 | TACCCTGCAGAACCGCATCTGT | prostate adenocarcinoma |
| 1389 | TACCTGCTCTACACAACTTTGT | prostate adenocarcinoma |
| 1390 | TAGCTGCCAGTTTCATAACTGT | prostate adenocarcinoma |
| 1391 | TAGGTGATCAGACTCATGTTGA | prostate adenocarcinoma |
| 1392 | TATGTGTGACTGACAGGTATTTTCTGAGC | prostate adenocarcinoma |
| 1393 | TATTTTATCAGAGTGATCTTGA | prostate adenocarcinoma |
| 1394 | TCAATGCACTCCCGAACTTTGT | prostate adenocarcinoma |
| 1395 | TCAGTTATCAGACTGACGTITA | prostate adenocarcinoma |
| 1396 | TCCCTAAGACCCTCACTTGTGA | prostate adenocarcinoma |
| 1397 | TCCTTGGTGGTCTAGTGGTTAGTATTCGGC | prostate adenocarcinoma |
| 1398 | TCGGTTCACTACAGAACTGTGT | prostate adenocarcinoma |
| 1399 | TCGTGTTTAGTACTCTGCGTT | prostate adenocarcinoma |
| 1400 | TCTCCCAACCCTTGTACAATT | prostate adenocarcinoma |
| 1401 | TCTCTTATCAGATTGATGTTG | prostate adenocarcinoma |
| 1402 | TCTGAGATTTCAACTTAACTTGACCG | prostate adenocarcinoma |
| 1403 | TCTGGCACTGGTAGAAGTCACT | prostate adenocarcinoma |
| 1404 | TGAGATGAAGCACCCTACCTCT | prostate adenocarcinoma |
| 1405 | TGAGATGAAGTAGTGTACCT | prostate adenocarcinoma |
| 1406 | TGAGATGTAACACTGTTGCTCT | prostate adenocarcinoma |
| 1407 | TGTAAACATCCTGGACTCGAA | prostate adenocarcinoma |
| 1408 | TTACATGAAGCAGTGTACCTCT | prostate adenocarcinoma |
| 1409 | TTAGCACTGGTATAATTCACTG | prostate adenocarcinoma |
| 1410 | TTAGGACTGAGGCCTTCTTATT | prostate adenocarcinoma |
| 1411 | TTAGTGCACTTCAAAACTTTGT | prostate adenocarcinoma |
| 1412 | TTGATCGTTCGGCTAGCGTGA | prostate adenocarcinoma |
| 1413 | TTGCTTATTAGAGTGATGTTGA | prostate adenocarcinoma |
| 1414 | TTTCGCACTTGTCCAGGCCTGT | prostate adenocarcinoma |
| 1415 | TTTGCACTGGTATAATTCACTGT | prostate adenocarcinoma |
| 1416 | TTTGGCAATGGTAGAATTCACT | prostate adenocarcinoma |
| 1417 | TTTGGCAATGGTCGAACTCTCA | prostate adenocarcinoma |
| 1418 | TTTGGCACTAGCCCATTTTTG | prostate adenocarcinoma, thyroid carcinoma |
| 1419 | TTTGTTAGTACGGCTCGCGTGA | prostate adenocarcinoma |
| 1420 | TTTGTTATCAGAGTGATGTTGAC | prostate adenocarcinoma |
| 1421 | TTTGTTCGTACGGCTCGTGTGA | prostate adenocarcinoma |
| 1422 | TTTGTTCGTTCGTCTCTGGTG | prostate adenocarcinoma |
| 1423 | TTTGTTCGTTCGTCTCTGGTGT | prostate adenocarcinoma |
| 1424 | CATAAGGAAAGGTTAAAAAAAGTAAAAGG | adrenocortical carcinoma, rectum |
| | | adenocarcinoma |
| 1425 | ATGGCACTGGTAGAATTCACTGAAT | adrenocortical carcinoma, rectum |
| | | adenocarcinoma |
| 1426 | AGAGAAGGGTCGGGGCGGCAGG | cervical squamous cell carcinoma and |
| | | endocervical adenocarcinoma, rectum |
| | | adenocarcinoma |
| 1427 | GATCCCGAGGCCTCTCC | cervical squamous cell carcinoma and |
| | | endocervical adenocarcinoma, rectum |
| | | adenocarcinoma |
| 1428 | GGCCGAAGTGGAGAAGGGTTCCATGTGAAC | cervical squamous cell carcinoma and |
| | | endocervical adenocarcinoma, rectum |
| | | adenocarcinoma |
| 1429 | GGGAAGGCCCGGCGGGGAAGGG | cervical squamous cell carcinoma and |
| | | endocervical adenocarcinoma, rectum |
| | | adenocarcinoma |
| 1430 | GTTCCTCCCGGGGCTACGCCTGTCT | cervical squamous cell carcinoma and |
| | | endocervical adenocarcinoma, rectum |
| | | adenocarcinoma |
| 1431 | CGCAATGAAGGTGAAGGCCG | head and neck squamous cell carcinoma, rectum |
| | | adenocarcinoma |
| 1432 | CTCCACGCGCCCCGCG | head and neck squamous cell carcinoma, rectum |
| | | adenocarcinoma |
| 1433 | GGGTCCGGTGCGGAGTG | head and neck squamous cell carcinoma, rectum |
| | | adenocarcinoma |
| 1434 | GGTTCCGGCGGCGTCCGGT | head and neck squamous cell carcinoma, rectum |
| | | adenocarcinoma |
| 1435 | TAGCGACGTCGCTTTTT | head and neck squamous cell carcinoma, rectum |
| | | adenocarcinoma |
| 1436 | AAAGAACTTTTGACTGGAGAG | rectum adenocarcinoma |
| 1437 | AAAGCAGAATCAATGTCTTTTCC | rectum adenocarcinoma |
| 1438 | AACAGATCGTCACTCGGTG | rectum adenocarcinoma |
| 1439 | AAGACCCTCTGGCTGTGGACAA | rectum adenocarcinoma |
| 1440 | AAGCTGGGTTGAGAG | rectum adenocarcinoma |
| 1441 | AATAATAGGACAGTAG | rectum adenocarcinoma |
| 1442 | ACACAGTATGGGTGCTGCCTCTG | rectum adenocarcinoma |
| 1443 | ACCGTCGTAGTTCCGAC | rectum adenocarcinoma |
| 1444 | ACGCATGGGTTTGGATTTATGATGGGCTGG | rectum adenocarcinoma |
| 1445 | ACGCGATGTGATTTCTGCCCAGTGC | rectum adenocarcinoma |
| 1446 | ACGTGGGCACATTACCCCTCTGACC | rectum adenocarcinoma |
| 1447 | AGAAAAGACTCTGACCAG | rectum adenocarcinoma |
| 1448 | AGATCGTCACTCGGTG | rectum adenocarcinoma |
| 1449 | AGGATGCTGTAGCCTTAACC | rectum adenocarcinoma |
| 1450 | AGGGAACGTGAGCTGGGTTTAGACCGTCGT | rectum adenocarcinoma |
| 1451 | AGGGCAAAAGCTCGCTTGATCTTGATCGT | rectum adenocarcinoma |
| 1452 | AGGTGCAGATCTTGGTGGTCGT | rectum adenocarcinoma |
| 1453 | AGTTGTGTGGGCTGTAGAG | rectum adenocarcinoma |
| 1454 | AGTTTGATCTCAGACTG | rectum adenocarcinoma |
| 1455 | ATACTGCCTGGTCATGATGA | rectum adenocarcinoma |
| 1456 | ATGGCACTGCTAGAATTCACTGT | rectum adenocarcinoma |
| 1457 | ATGGTCAGTAGGACAGAAGGTA | rectum adenocarcinoma |
| 1458 | ATTAACATGCTGAGGATTGTAGAGC | rectum adenocarcinoma |
| 1459 | ATTGGTCGTGGTTGTAGTGG | rectum adenocarcinoma |
| 1460 | CAGGATTGACAGCTTGATAGCTCT | rectum adenocarcinoma |
| 1461 | CAGTGGTAGAGCCCA | rectum adenocarcinoma |
| 1462 | CCAGAGGTCGATGGATCGTAACC | rectum adenocarcinoma |
| 1463 | CCCACTGCTTCACTTGACTCGA | rectum adenocarcinoma |
| 1464 | CCCCCGAGACAGAGTTTCA | rectum adenocarcinoma |
| 1465 | CCCCTCCTCCTCGGC | rectum adenocarcinoma |
| 1466 | CCCCTCTCCGGAGTCCG | rectum adenocarcinoma |
| 1467 | CCCTGAGTGACAGAACCG | rectum adenocarcinoma |
| 1468 | CCGCGGAGCCTCGGTTGGCCTCGGATAG | rectum adenocarcinoma |
| 1469 | CCGGCTGTGGAATCTGAAGACA | rectum adenocarcinoma |
| 1470 | CGCCTGTCACGCGGGAGACCG | rectum adenocarcinoma |
| 1471 | CGCTACGCCGCGACGAGGAGG | rectum adenocarcinoma |
| 1472 | CGGAAAAAAGGACTTTT | rectum adenocarcinoma |
| 1473 | CGGTTCCGGCGGCGTCCGGTGAGCT | rectum adenocarcinoma |
| 1474 | CGTCGTCGGCGGTGGGGGCGTGTT | rectum adenocarcinoma |
| 1475 | CGTGGGGAACCTGCCGCTAAACCATTCGT | rectum adenocarcinoma |
| 1476 | CTCCATTATGAGCACTTAAAGT | rectum adenocarcinoma |
| 1477 | CTCGGGAGGGCGCGC | rectum adenocarcinoma |
| 1478 | CTCTACCTTACCTACC | rectum adenocarcinoma |
| 1479 | CTCTGTGTCCCCACCCAA | rectum adenocarcinoma |
| 1480 | CTGCCCCCTCTGCTGATGCC | rectum adenocarcinoma |
| 1481 | CTGTAGTGTAGTGGTCATC | rectum adenocarcinoma |
| 1482 | CTGTCGGGGCACCTGGAG | rectum adenocarcinoma |
| 1483 | CTGTGAACCTGAGACTCAGGACGCA | rectum adenocarcinoma |
| 1484 | CTGTGCCTGGCCTGAGGGGC | rectum adenocarcinoma |
| 1485 | CTGTGCTCTCAGGAAGG | rectum adenocarcinoma |
| 1486 | CTTAAAGGAATTGACGGAAGGGCACC | rectum adenocarcinoma |
| 1487 | CTTCCACAGCTACTGGTCTGCAG | rectum adenocarcinoma |
| 1488 | GAACGTGAGCTGGGTTAGACCGT | rectum adenocarcinoma |
| 1489 | GAAGAGGGTTACACAGTG | rectum adenocarcinoma |
| 1490 | GAATCCCGCCCAGGCGGAACGATACGGC | rectum adenocarcinoma |
| 1491 | GACGAGGTGGCCGGGTGGTTAAGG | rectum adenocarcinoma |
| 1492 | GAGATCAGGGACATGTTGCT | rectum adenocarcinoma |
| 1493 | GAGGAATTGCTTTGACTTCTGAC | rectum adenocarcinoma |
| 1494 | GAGGGTCCAGGGTTCAGGTCCCT | rectum adenocarcinoma |
| 1495 | GAGTTGGTGGTTCAGTGGTAGAA | rectum adenocarcinoma |
| 1496 | GAGTTTAAGTCTTGCCTG | rectum adenocarcinoma |
| 1497 | GATGTTGTAGCTTATCAGACT | rectum adenocarcinoma |
| 1498 | GATTCTGAGCAGATTCGTCTAGG | rectum adenocarcinoma |
| 1499 | GATTGTGGGTTCGGGTCCCCTC | rectum adenocarcinoma |
| 1500 | GCACCACCAGGAGTGGAGCC | rectum adenocarcinoma |
| 1501 | GCAGGTGTCCTAAGGCGAGCTCAGGGAGG | rectum adenocarcinoma |
| 1502 | GCATTGGTGGTTCAGTGGTCGGA | rectum adenocarcinoma |
| 1503 | GCCGAATAGGAACAGCTCCGG | rectum adenocarcinoma |
| 1504 | GCGGCGGCCGGCGGGCGGTGG | rectum adenocarcinoma |
| 1505 | GCGGCGGCGGCGAATCTGGACGCGAGCC | rectum adenocarcinoma |
| 1506 | GCGTGTGGTGTGCGTC | rectum adenocarcinoma |
| 1507 | GCTCCCCGTCCTCCCCCCCCC | rectum adenocarcinoma |
| 1508 | GCTGACCCCCTTCGCG | rectum adenocarcinoma |
| 1509 | GCTTACAGTGCAGGTAGA | rectum adenocarcinoma |
| 1510 | GCTTGGCTTGCATGAGGTCCCGG | rectum adenocarcinoma |
| 1511 | GGAGAGAAGGGTCGGGGCGGCA | rectum adenocarcinoma |
| 1512 | GGCCCCCCCCGCGGGGA | rectum adenocarcinoma |
| 1513 | GGCCGGTTAGCTCAGTTGGTGAGA | rectum adenocarcinoma |
| 1514 | GGCGCCCTGGAATGG | rectum adenocarcinoma |
| 1515 | GGTCGCAGTCTCCCTTG | rectum adenocarcinoma |
| 1516 | GGTCGTCCCGCTCCGGC | rectum adenocarcinoma |
| 1517 | GGTTCGGACCCCGTC | rectum adenocarcinoma |
| 1518 | GTCAGCCCCTCTCCG | rectum adenocarcinoma |
| 1519 | GTGATCGTATAGTGGTTAGTACTCCG | rectum adenocarcinoma |
| 1520 | GTGATCGTATAGTGGTTAGTACTCTGTCTC | rectum adenocarcinoma |
| 1521 | GTGATCGTATAGTGTTAGTA | rectum adenocarcinoma |
| 1522 | GTGGACTCGACTGTAAGGAC | rectum adenocarcinoma |
| 1523 | GTTCGTATCCCACCTTCGTCG | rectum adenocarcinoma |
| 1524 | GTTTCCCAGATTTCAGGA | rectum adenocarcinoma |
| 1525 | TAATACTGCCTGGTAATGATAACT | rectum adenocarcinoma |
| 1526 | TAGAATTTGTCTAGTAGGCTTTCTGG | rectum adenocarcinoma |
| 1527 | TATAACTGAACTCCTCACACCCAAT | rectum adenocarcinoma |
| 1528 | TCACCTTGTATAGCTGATAAA | rectum adenocarcinoma |
| 1529 | TCAGAAGGCTGCGTG | rectum adenocarcinoma |
| 1530 | TGAAATGNTTAGGACCACTAGA | rectum adenocarcinoma |
| 1531 | TGACATTTTAAACCACCAAGATCGCTGATG | rectum adenocarcinoma |
| 1532 | TGAGATCAGGGACATGTTGCT | rectum adenocarcinoma |
| 1533 | TGCACTACAGAACTT | rectum adenocarcinoma |
| 1534 | TGCATCACAGAACTTTG | rectum adenocarcinoma |
| 1535 | TGCATGCATTTATCAGAT | rectum adenocarcinoma |
| 1536 | TGGATTGGAAATCCATTGGGG | rectum adenocarcinoma |
| 1537 | TGGATTTTTGGAACTAGGAG | rectum adenocarcinoma |
| 1538 | TGGCTCTAAGGGCTGGGTCGGTCGC | rectum adenocarcinoma |
| 1539 | TGTAAACATCCCCGACTGGCAGCTA | rectum adenocarcinoma |
| 1540 | TGTAATAGGAACTCAACAAGCT | rectum adenocarcinoma |
| 1541 | TGTCATGGACTCTGGAGAC | rectum adenocarcinoma |
| 1542 | TTGGAGAACGTGGACACC | rectum adenocarcinoma |
| 1543 | TTGTAGTGTGCTGATGTGCA | rectum adenocarcinoma |

TABLE X
Table containing the number of unique oncRNA species
(under column head “oncRNA counts”) found significantly
present within cancer samples (under column head “Cancer”) and
not in normal tissue samples for each of the 32 cancer
types from The Cancer Genome Atlas (TCGA).

| | oncRNA | Log10 | | Log10 |
|---|---|---|---|---|
| Cancer | Counts | Counts | Prefilter | Prefilter |
| SKCM | 106232 | 5.026255 | 109219 | 5.038298 |
| TGCT | 100731 | 5.003163 | 103619 | 5.015439 |
| THYM | 98941 | 4.995376 | 101437 | 5.006196 |
| HNSC | 87619 | 4.942598 | 89945 | 4.953977 |
| UCEC | 79838 | 4.90221 | 82340 | 4.915611 |
| OV | 79657 | 4.901224 | 81810 | 4.912806 |
| LUAD | 69668 | 4.843033 | 71280 | 4.852968 |
| CESC | 68965 | 4.838629 | 70867 | 4.850444 |
| DLBC | 65908 | 4.818938 | 68011 | 4.832579 |
| BLCA | 64899 | 4.812238 | 66475 | 4.822658 |
| UVM | 59760 | 4.776411 | 61300 | 4.78746 |
| ACC | 56884 | 4.75499 | 58515 | 4.767267 |
| LUSC | 56157 | 4.749404 | 57659 | 4.760867 |
| COAD | 50835 | 4.706163 | 52449 | 4.719737 |
| READ | 41690 | 4.620032 | 43080 | 4.634276 |
| THCA | 39391 | 4.595397 | 40276 | 4.605046 |
| LIHC | 38214 | 4.582222 | 39232 | 4.59364 |
| ESCA | 37529 | 4.574367 | 38492 | 4.58537 |
| STAD | 36341 | 4.560397 | 37234 | 4.57094 |
| PAAD | 33362 | 4.523252 | 33780 | 4.52866 |
| LGG | 31804 | 4.502482 | 32275 | 4.508866 |
| PCPG | 29850 | 4.474944 | 30468 | 4.483844 |
| CHOL | 27028 | 4.431814 | 27477 | 4.438969 |
| MESO | 26201 | 4.418318 | 26754 | 4.427389 |
| UCS | 25002 | 4.397975 | 25917 | 4.413585 |
| KIRP | 24351 | 4.386517 | 24810 | 4.394627 |
| KICH | 22285 | 4.348013 | 22772 | 4.357401 |
| SARC | 21744 | 4.337339 | 22095 | 4.344294 |
| BRCA | 16515 | 4.217879 | 17045 | 4.231597 |
| LAML | 9598 | 3.982181 | 10098 | 4.004235 |
| PRAD | 8706 | 3.939819 | 8812 | 3.945074 |
| KIRC | 3067 | 3.486714 | 3153 | 3.498724 |

[0210] The procedure above was preformed again using a bigger sample set. All of the annotated oncRNAs found across all the cancer types in TCGA database. Annotated oncRNAs found significantly in the following TCGA cancer types: Rectum adenocarcinoma (READ), Colon adenocarcinoma (COAD), Esophageal carcinoma (ESCA), Head and Neck squamous cell carcinoma (HNSC), Lymphoid Neoplasm Diffuse Large B-cell Lymphoma (DLBC), Liver hepatocellular carcinoma (LIHC), Lung adenocarcinoma (LUAD), Lung squamous cell carcinoma (LUSC), Ovarian serous cystadenocarcinoma (OV), Pancreatic adenocarcinoma (PAAD), Stomach adenocarcinoma (STAD), and Breast invasive carcinoma (BRCA).

[0211] Bar plots of the log 10 number of oncRNAs found to be significantly present in each of 32 TCGA cancer types in comparison to TCGA normal samples were produce. Fisher exact test was used to statistically test for significance and an FDR cutoff of 0.1 was used to correct for multiple hypothesis testing as described above.

[0212] Plots of pan-cancer classifier performance accuracy on 32 TCGA cancer types across 5 folds of cross-validation on the training dataset (80/20 split) versus number of features used to train. Experiment was run for recursive feature elimination purposes to select most informative features to train our final model. Features used were the binary encoding of presence/absence of oncRNAs within samples. An Extreme Gradient Boosting (XGB) model with 500 estimators and max depth of 3 was used as our selection model for this feature selection step.

[0213] Plost of pan-cancer classifier performance accuracy on 32 TCGA cancer types across 5 folds of cross-validation on the training dataset (from a 80/20 train/test split) versus number of features used to train. Experiments were run for recursive feature elimination purposes to select most informative features to train our final model. Features used were the counts per million (c.p.m) of oncRNAs within samples. An Extreme Gradient Boosting (XGB) model with 500 estimators and max depth of 3 was used as our selection model for this feature selection step. Heatmaps of feature selected oncRNAs via recursive feature elimination used to train our final XGB classifier to classify cancer types across 32 cancer types in TCGA. Features used were the binary encoding of presence/absence of oncRNAs within samples.

[0214] Additional heatmaps of feature selected oncRNAs were created via recursive feature elimination used to train our final XGB classifier to classify cancer types across 32 cancer types in TCGA. Features used were the counts per million (c.p.m) of oncRNAs within samples. Confusion matrices were created of our final pan-cancer XGB performance and cancer subtypes on held out test data from an 80/20 train/test, class-balanced split of 10403 cancer samples. Confusion matrix was normalized by columns. Classifier was trained on binary representations (presence/absence) of feature selected oncRNAs. Final XGB classifier consisted of 500 estimators, max depth of 3, and a lambda regularization parameter of 8.

[0215] ROC curves of Gradient Boosting Classifiers (GBC) trained to make cancer-specific binary predictions using a one-vs-the-rest multiclass strategy was employed. GBCs were trained on training data from an 80/20 train/test, class-balanced split and evaluated on the held-out test set. Features used were the binary encodings from previously selected oncRNAs. ROC curves of the following cancer classifiers were plotted for: BRCA, COAD, ESCA, LIHC, LUAD, LUSC, OV, PAAD, and STAD.

[0216] Classification results of classifiers trained for cancer-normal predictions for each of 32 TCGA cancer types. For each cancer, a linear support vector classification model with Li regularization was trained on samples specific to the cancer and normal samples. 80/20 train/test split was done to separate the dataset of cancer-specific samples and all TCGA normal samples into training and testing datasets.

[0217] ROC curves of linear support vector classification models used to make cancer-normal predictions. Overall accuracy on the test dataset (80/20 train/test split) is also generated for the following cancer types: BRCA, COAD, ESCA, LIHC<LUAD, LUSC, OV, PAAD, and STAD.

### BRCA Tumors

[0218] Violin plots and box plots of oncRNA expression across normal, stage I, and stage II and III samples in the TCGA-BRCA dataset. P values were calculated and FDR corrected using a one-way ANOVA test for associations. Normal, n=104, T1: n=277, T2: n=628, T3: n=137.

[0219] Violin plots and box plots of oncRNA expression across samples grouped by BRCA subtypes in the TCGA-BRCA dataset. P values were calculated and FDR corrected using a one-way ANOVA test for associations. BRCA-Basal, n=172, BRCA-Her2: n=77, BRCA-LumA: n=505, BRCA-LumB: n=192.

[0220] A confusion matrix was created showing the test performance of an XGB classifier trained on BRCA oncRNAs to predict BRCA subtypes. 946 BRCA patient samples with annotated subtypes were split into train/test sets using an 80/20 ratio. A one-way ANOVA test was first used to feature select a final list of 682 BRCA oncRNAs on the training dataset. An XGB classifier with 100 estimators and a max depth of 3 was then trained the selected features and evaluated on the held-out test dataset.

[0221] Heatmaps of the presence/absence of 1062 BRCA oncRNAs demonstrate significant differences in expression across BRCA subtype groups: Basal, Her2, LumA, and LumB. BRCA oncRNAs were tested using a one-way ANOVA test. FDR correction with a cutoff of 0.1 was set to correct for multiple hypothesis testing.

[0222] Heatmap of the c.p.m expression of 1062 BRCA oncRNAs demonstrate significant differences in expression across BRCA subtype groups: Basal, Her2, LumA, and LumB. BRCA oncRNAs were tested using a one-way ANOVA test. FDR correction with a cutoff of 0.1 was set to correct for multiple hypothesis testing.

[0223] Survival analysis for TCGA-BRCA patients was stratified into groups of high and low risk based on presence and absence of oncRNAs. Risk scores was calculated using a regularized cox model (Cox Elastic Net) fit on the training dataset with cross-validation and evaluated on a held-out dataset (80/20 train/test split of 1068 patients). Survival curves of patients in the held-out dataset are shown. P value was calculated from a log-rank test.

[0224] Heatmaps were constructed of the signs of the regression coefficients from a regularized cox model across BRCA patients in the held-out dataset. A positive coefficient for an oncRNA was plotted with a value of 1 (−1 for negative). Positive coefficients indicate contribution towards higher risk and negative towards lower risk.

[0225] Additional heatmap were constructed of reconstructed gene expression in held-out BRCA patient dataset. An autoencoder was first trained to generate a reduced embedding of gene expression profiles (of 589 genes with highest variance) across all BRCA patients. BRCA patient oncRNA binary profiles were then used to train a fully connected neural network to predict gene expression profile embeddings. The decoder from previously trained autoencoder were then used to reconstruct gene expression profiles from predicted gene expression embeddings. oncRNA neural network was trained the training data generated via 80/20 split from 1085 BRCA patient data.

Lengthy table referenced here
US20240150829A1-20240509-T00001
Please refer to the end of the specification for access instructions.

### REFERENCES

[0226] 1. S. F. Tavazoie et al., Endogenous human microRNAs that suppress breast cancer metastasis. Nature. 451, 147-U3 (2008).
[0227] 2. C. J. David, M. Chen, M. Assanah, P. Canoll, J. L. Manley, HnRNP proteins controlled by c-Myc deregulate pyruvate kinase mRNA splicing in cancer. Nature. 463, 364-368 (2010).
[0228] 3. S. Vanharanta et al., Loss of the multifunctional RNA-binding protein RBM47 as a source of selectable metastatic traits in breast cancer. eLife. 3 (2014), doi:10.7554/eLife.02734.
[0229] 4. L. Fish et al., Muscleblind-like 1 suppresses breast cancer metastatic colonization and stabilizes metastasis suppressor transcripts. Genes Dev. 30, 386-398 (2016).
[0230] 5. L.-Y. Chen, J. Lingner, AUF1/HnRNP D RNA binding protein functions in telomere maintenance. Mol. Cell. 47, 1-2 (2012).
[0231] 6. H. Goodarzi et al., Modulated expression of specific tRNAs drives gene expression and cancer progression. Cell. 165, 1416-1427 (2016).
[0232] 7. H. Goodarzi et al., Endogenous tRNA-Derived Fragments Suppress Breast Cancer Progression via YBX1 Displacement. Cell. 161, 790-802 (2015).
[0233] 8. D. K. Simanshu, D. V. Nissley, F. McCormick, RAS Proteins and Their Regulators in Human Disease. Cell. 170, 17-33 (2017).
[0234] 9. R. Ren, Mechanisms of BCR-ABL in the pathogenesis of chronic myelogenous leukaemia. Nat. Rev. Cancer. 5, 172-183 (2005).
[0235] 10. R.-K. Lin, Y.-C. Wang, Dysregulated transcriptional and post-translational control of DNA methyltransferases in cancer. Cell Biosci. 4, 46 (2014).
[0236] 11. A. A. Alizadeh et al., Toward understanding and exploiting tumor heterogeneity. Nat. Med. 21, 846-853 (2015).
[0237] 12. A. Nguyen, M. Yoshida, H. Goodarzi, S. F. Tavazoie, Highly variable cancer subpopulations that exhibit enhanced transcriptome variability and metastatic fitness. Nat. Commun. 7, 11246 (2016).
[0238] 13. R. J. Taft, K. C. Pang, T. R. Mercer, M. Dinger, J. S. Mattick, Non-coding RNAs: Regulators of disease. J. Pathol. 220 (2010), pp. 126-139.
[0239] 14. M. Esteller, Non-coding RNAs in human disease. Nat. Rev. Genet. 12, 861-874 (2011).
[0240] 15. A. J. Minn et al., Distinct organ-specific metastatic potential of individual breast cancer cells and primary tumors. J. Clin. Invest. 115, 44-55 (2005).
[0241] 16. J. M. Loo et al., Extracellular Metabolic Energetics Can Promote Cancer Progression. Cell. 160, 393-406 (2015).
[0242] 17. D. N. Cooper, L. P. Berg, V. V Kakkar, J. Reiss, Ectopic (illegitimate) transcription: new possibilities for the analysis and diagnosis of human genetic disease. Ann. Med. 26, 9-14 (1994).
[0243] 18. A. A. Margolin et al., ARACNE: An Algorithm for the Reconstruction of Gene Regulatory Networks in a Mammalian Cellular Context. BMC Bioinformatics. 7, S7 (2006).
[0244] 19. H. Goodarzi et al., Metastasis-suppressor transcript destabilization through TARBP2 binding of mRNA hairpins. Nature (2014), doi:10.1038/nature13466.
[0245] 20. B. Kim, K. Jeong, V. N. Kim, Genome-wide Mapping of DROSHA Cleavage Sites on Primary MicroRNAs and Noncanonical Substrates. Mol. Cell. 66, 258-269.e5 (2017).
[0246] 21. D. Ray et al., A compendium of RNA-binding motifs for decoding gene regulation. Nature. 499, 172-177 (2013).
[0247] 22. Y.-C. T. Yang et al., CLIPdb: a CLIP-seq database for protein-RNA interactions. BMC Genomics. 16, 51 (2015).
[0248] 23. E. L. Van Nostrand et al., Robust transcriptome-wide discovery of RNA-binding protein binding sites with enhanced CLIP (eCLIP). Nat. Methods. 13, 508-514 (2016).
[0249] 24. H. Goodarzi et al., Systematic discovery of structural elements governing stability of mammalian messenger RNAs. Nature. 485, 264-268 (2012).
[0250] 25. S. Memczak et al., Circular RNAs are a large class of animal RNAs with regulatory potency. Nature. 495, 333-8 (2013).
[0251] 26. P. Sumazin et al., An extensive microRNA-mediated network of RNA-RNA interactions regulates established oncogenic pathways in glioblastoma. Cell. 147, 370-381 (2011).
[0252] 27. A. Helwak, G. Kudla, T. Dudnakova, D. Tollervey, Mapping the human small non-coding RNA interactome by CLASH reveals frequent noncanonical binding. Cell. 153, 654-65 (2013).
[0253] 28. T. Fiskaa et al., Distinct Small RNA Signatures in Extracellular Vesicles Derived from Breast Cancer Cell Lines. PLoS ONE. 11 (2016), doi:10.1371/journal.pone.0161824.
[0254] 29. W. Zhou et al., Cancer-secreted miR-105 destroys vascular endothelial barriers to promote metastasis. Cancer Cell. 25, 501-515 (2014).
[0255] 30. S. K. Chakrabortty, A. Prakash, G. Nechooshtan, S. Hearn, T. R. Gingeras, Extracellular vesicle-mediated transfer of processed and functional RNY5 RNA. RNA N. Y. N. 21, 1966-1979 (2015).
[0256] 31. X. Wu et al., De novo sequencing of circulating small non-coding RNAs identifies novel markers predicting clinical outcome of locally advanced breast cancer. J. Transl. Med. 10, 42-42 (2012).
[0257] 32. M. D. Giraldez et al., Accuracy, Reproducibility And Bias Of Next Generation Sequencing For Quantitative Small RNA Profiling: A Multiple Protocol Study Across Multiple Laboratories. bioRxiv, 113050 (2017).
[0258] 33. O. Elemento, N. Slonim, S. Tavazoie, A universal framework for regulatory element discovery across all Genomes and data types. Mol. Cell. 28, 337-350 (2007).

LENGTHY TABLES
The patent application contains a lengthy table section. A copy of the table is available in electronic form from the USPTO web site (https://seqdata.uspto.gov/?pageRequest=docDetail&DocID=US20240150829A1). An electronic copy of the table will also be available from the USPTO upon request and payment of the fee set forth in 37 CFR 1.19(b)(3).

1.-69. (canceled)

70. A method for sequencing a ribonucleic acid, comprising:
(a) providing the ribonucleic acid sequence or a functional fragment thereof;
(b) subjecting the ribonucleic acid or the functional fragment thereof to reverse transcription using a reverse transcriptase and a primer to generate a complementary deoxyribonucleic acid (cDNA) molecule, wherein the cDNA molecule comprises a sequence corresponding to a target sequence of the ribonucleic acid or the functional fragment thereof;
(c) amplifying the ribonucleic acid or the functional fragment thereof using one or more probes having different single stranded versus double stranded character; and
(d) sequencing the cDNA molecule or a derivative thereof.

71. The method of claim 70, wherein the ribonucleic acid sequence or the functional fragment thereof has a length of less than about 200 nucleotides.

72. The method of claim 70, wherein the ribonucleic acid sequence or the functional fragment thereof has a length of less between 50 and 100 nucleotides.

73. The method of claim 70, further comprising, after (b), amplifying the cDNA molecule.

74. The method of claim 70, wherein (c) comprises a Polymerase Chain Reaction (PCR).

75. The method of claim 70, wherein (c) occurs subsequent to (b).

76. The method of claim 70, wherein (c) comprises rolling circle amplification.

77. The method of claim 70, wherein (c) comprises a ligase chain reaction, multiplex ligatable probe amplification, in vitro transcription (IVT), strand displacement amplification, transcription-mediated amplification, or RNA (Eberwine) amplification.

78. A reaction mixture, comprising:
a ribonucleic acid sequence or a functional fragment thereof;
one or more proves having different single stranded versus double stranded character for amplification of the ribonucleic acid or the functional fragment thereof;
a reverse transcriptase;
one or more primers; and
a complementary deoxyribonucleic acid molecule wherein the cDNA molecule comprises a sequence corresponding to a target sequence of the ribonucleic acid or the functional fragment thereof.

79. The reaction mixture of claim 78, wherein the ribonucleic acid sequence or the functional fragment thereof has a length of less than about 200 nucleotides.

80. The reaction mixture of claim 78, wherein the ribonucleic acid sequence or the functional fragment thereof has a length of less between 50 and 100 nucleotides.

81. The reaction mixture of claim 78, further comprising a single stranded oligonucleotide containing one or more universal primer sequences.

82. The reaction mixture of claim 78, further comprising one or more polyadenylated sequences.

83. The reaction mixture of claim 78, further comprising one or more adapter sequences.

84. The reaction mixture of claim 78, wherein the one or more primers comprises a primer complementary to a universal primer sequence.

85. The reaction mixture of claim 78, wherein the one or more primers comprises a poly(T) primer.

86. The reaction mixture of claim 83, wherein the one or more primers comprises a primer complementary to an adapter sequence of the one or more adapter sequences.

87. The reaction mixture of claim 78, wherein the one or more primers comprises an amplification primer that specifically binds to the ribonucleic acid or the functional fragment thereof.

88. The reaction mixture of claim 78, wherein the one or more primers comprises a reverse transcription primer.

The application's sequence listing, which the Patent Office published only in electronic form, follows.

SEQUENCE LISTING (19246 sequences)

SEQ ID NO: 1 - DNA, 22 bp, Homo sapiens
  source 1..22: mol_type = unassigned DNA
cagcttccatgactcctgatgg

SEQ ID NO: 2 - DNA, 28 bp, Homo sapiens
  source 1..28: mol_type = unassigned DNA
catagtgtaatggttagcactctggact

SEQ ID NO: 3 - DNA, 19 bp, Homo sapiens
  source 1..19: mol_type = unassigned DNA
aactgatactggacaagga

SEQ ID NO: 4 - DNA, 28 bp, Homo sapiens
  source 1..28: mol_type = unassigned DNA
atgccatgatgctagactcctgagcaga

SEQ ID NO: 5 - DNA, 30 bp, Homo sapiens
  source 1..30: mol_type = unassigned DNA
gcatgggtggttcagtggtagaagtctcgc

SEQ ID NO: 6 - DNA, 24 bp, Homo sapiens
  source 1..24: mol_type = unassigned DNA
gtagtcgtggccgagtgttaaggc

SEQ ID NO: 7 - DNA, 24 bp, Homo sapiens
  source 1..24: mol_type = unassigned DNA
gttataagctaattttttgtaagc

SEQ ID NO: 8 - DNA, 22 bp, Homo sapiens
  source 1..22: mol_type = unassigned DNA
tataagctaattttttgtaagc

SEQ ID NO: 9 - DNA, 23 bp, Homo sapiens
  source 1..23: mol_type = unassigned DNA
tgggtcggaaaaaaggacttttt

SEQ ID NO: 10 - DNA, 15 bp, Homo sapiens
  source 1..15: mol_type = unassigned DNA
tggtagaattcactg

SEQ ID NO: 11 - DNA, 27 bp, Homo sapiens
  source 1..27: mol_type = unassigned DNA
tttggcaatggtagaactcacactatt

SEQ ID NO: 12 - DNA, 20 bp, Homo sapiens
  source 1..20: mol_type = unassigned DNA
cacatgggtcggaaaaaagg

SEQ ID NO: 13 - DNA, 20 bp, Homo sapiens
  source 1..20: mol_type = unassigned DNA
acatgggtcggaaaaaagga

SEQ ID NO: 14 - DNA, 23 bp, Homo sapiens
  source 1..23: mol_type = unassigned DNA
agcctggtccacatgggtcggaa

SEQ ID NO: 15 - DNA, 18 bp, Homo sapiens
  source 1..18: mol_type = unassigned DNA
catgggtcggaaaaaagg

SEQ ID NO: 16 - DNA, 21 bp, Homo sapiens
  source 1..21: mol_type = unassigned DNA
gggtcggaaaaaaggactttt

SEQ ID NO: 17 - DNA, 27 bp, Homo sapiens
  source 1..27: mol_type = unassigned DNA
tgctgtgatgactatcttaggacacct

SEQ ID NO: 18 - DNA, 20 bp, Homo sapiens
  source 1..20: mol_type = unassigned DNA
tgggtcggaaaaaaggactt

SEQ ID NO: 19 - DNA, 24 bp, Homo sapiens
  source 1..24: mol_type = unassigned DNA
tgggtcggaaaaaaggactttttt

SEQ ID NO: 20 - DNA, 22 bp, Homo sapiens
  source 1..22: mol_type = unassigned DNA
aaactgtaattacttttggaca

SEQ ID NO: 21 - DNA, 22 bp, Homo sapiens
  source 1..22: mol_type = unassigned DNA
aaaggtccctggttcgttcccg

SEQ ID NO: 22 - DNA, 22 bp, Homo sapiens
  source 1..22: mol_type = unassigned DNA
aacactgtctggtaaagatgga

SEQ ID NO: 23 - DNA, 22 bp, Homo sapiens
  source 1..22: mol_type = unassigned DNA
aacgcctcggggacctgtttga

SEQ ID NO: 24 - DNA, 27 bp, Homo sapiens
  source 1..27: mol_type = unassigned DNA
aaggtcctgagttcgtacctcagaggg

SEQ ID NO: 25 - DNA, 19 bp, Homo sapiens
  source 1..19: mol_type = unassigned DNA
acacgtgtcggtaccggag

SEQ ID NO: 26 - DNA, 22 bp, Homo sapiens
  source 1..22: mol_type = unassigned DNA
acagaatcgccggacaggtggc

SEQ ID NO: 27 - DNA, 21 bp, Homo sapiens
  source 1..21: mol_type = unassigned DNA
acagaccaaggagaactggag

SEQ ID NO: 28 - DNA, 18 bp, Homo sapiens
  source 1..18: mol_type = unassigned DNA
accgcgccgggctgcggg

SEQ ID NO: 29 - DNA, 21 bp, Homo sapiens
  source 1..21: mol_type = unassigned DNA
acctacagagctcatggtcgg

SEQ ID NO: 30 - DNA, 23 bp, Homo sapiens
  source 1..23: mol_type = unassigned DNA
acctcgtggcgcaatggtagcgc

SEQ ID NO: 31 - DNA, 20 bp, Homo sapiens
  source 1..20: mol_type = unassigned DNA
actaacggaacgtcaggaag

SEQ ID NO: 32 - DNA, 18 bp, Homo sapiens
  source 1..18: mol_type = unassigned DNA
actatggaactttccccc

SEQ ID NO: 33 - DNA, 19 bp, Homo sapiens
  source 1..19: mol_type = unassigned DNA
actcgggctgtagaaactg

SEQ ID NO: 34 - DNA, 18 bp, Homo sapiens
  source 1..18: mol_type = unassigned DNA
acttgccagatacggggg

SEQ ID NO: 35 - DNA, 28 bp, Homo sapiens
  source 1..28: mol_type = unassigned DNA
agacgcgacctcagatcagacgtggcga

SEQ ID NO: 36 - DNA, 18 bp, Homo sapiens
  source 1..18: mol_type = unassigned DNA
agagctactgaaccagag

SEQ ID NO: 37 - DNA, 24 bp, Homo sapiens
  source 1..24: mol_type = unassigned DNA
agcaccccgtgctgctgaccgagg

SEQ ID NO: 38 - DNA, 21 bp, Homo sapiens
  source 1..21: mol_type = unassigned DNA
agcttatcagactcatgttga

SEQ ID NO: 39 - DNA, 21 bp, Homo sapiens
  source 1..21: mol_type = unassigned DNA
aggaggtggttaggaatgtgg

SEQ ID NO: 40 - DNA, 17 bp, Homo sapiens
  source 1..17: mol_type = unassigned DNA
aggtacaggcctggaga

SEQ ID NO: 41 - DNA, 21 bp, Homo sapiens
  source 1..21: mol_type = unassigned DNA
agtccgccgagggcgcaccac

SEQ ID NO: 42 - DNA, 16 bp, Homo sapiens
  source 1..16: mol_type = unassigned DNA
agtggctaagttctga

SEQ ID NO: 43 - DNA, 16 bp, Homo sapiens
  source 1..16: mol_type = unassigned DNA
agtggttgatcgttgg

SEQ ID NO: 44 - DNA, 30 bp, Homo sapiens
  source 1..30: mol_type = unassigned DNA
atagctcagtggtagagcatttgactatcg

SEQ ID NO: 45 - DNA, 19 bp, Homo sapiens
  source 1..19: mol_type = unassigned DNA
atcattatttgctgctcta

SEQ ID NO: 46 - DNA, 17 bp, Homo sapiens
  source 1..17: mol_type = unassigned DNA
atcgtaggacagtgaag

SEQ ID NO: 47 - DNA, 18 bp, Homo sapiens
  source 1..18: mol_type = unassigned DNA
atgaacgagattcccact

SEQ ID NO: 48 - DNA, 21 bp, Homo sapiens
  source 1..21: mol_type = unassigned DNA
atgatgaaatcacccaaaata

SEQ ID NO: 49 - DNA, 17 bp, Homo sapiens
  source 1..17: mol_type = unassigned DNA
atgggtcggaaaaaagg

SEQ ID NO: 50 - DNA, 28 bp, Homo sapiens
  source 1..28: mol_type = unassigned DNA
atggttagcactctggactctgaatcgt

SEQ ID NO: 51 - DNA, 19 bp, Homo sapiens
  source 1..19: mol_type = unassigned DNA
attggtcgtggttgtagga

SEQ ID NO: 52 - DNA, 19 bp, Homo sapiens
  source 1..19: mol_type = unassigned DNA
attgtccaggctctagaac

SEQ ID NO: 53 - DNA, 22 bp, Homo sapiens
  source 1..22: mol_type = unassigned DNA
cactgtctggtaaagatggcat

SEQ ID NO: 54 - DNA, 18 bp, Homo sapiens
  source 1..18: mol_type = unassigned DNA
caggactgctcactactg

SEQ ID NO: 55 - DNA, 22 bp, Homo sapiens
  source 1..22: mol_type = unassigned DNA
cagtgcatcacagaactttgta

SEQ ID NO: 56 - DNA, 28 bp, Homo sapiens
  source 1..28: mol_type = unassigned DNA
catgggtcagtcggtcctgagagatcgt

SEQ ID NO: 57 - DNA, 18 bp, Homo sapiens
  source 1..18: mol_type = unassigned DNA
cccagggtcgtgggttcg

SEQ ID NO: 58 - DNA, 18 bp, Homo sapiens
  source 1..18: mol_type = unassigned DNA
ccgcgcgccggccgggcg

SEQ ID NO: 59 - DNA, 18 bp, Homo sapiens
  source 1..18: mol_type = unassigned DNA
cctccccggagggggcgg

SEQ ID NO: 60 - DNA, 18 bp, Homo sapiens
  source 1..18: mol_type = unassigned DNA
cgaggtggccgagtggtt

SEQ ID NO: 61 - DNA, 17 bp, Homo sapiens
  source 1..17: mol_type = unassigned DNA
cgatcactcccgttgag

SEQ ID NO: 62 - DNA, 20 bp, Homo sapiens
  source 1..20: mol_type = unassigned DNA
cgatgtgatttctgccccgt

SEQ ID NO: 63 - DNA, 25 bp, Homo sapiens
  source 1..25: mol_type = unassigned DNA
cgcaagacggaccagagcgaaagca

SEQ ID NO: 64 - DNA, 17 bp, Homo sapiens
  source 1..17: mol_type = unassigned DNA
cgctgtcggtgagtttt

SEQ ID NO: 65 - DNA, 23 bp, Homo sapiens
  source 1..23: mol_type = unassigned DNA
cggtttgggtccgagaggtcccg

SEQ ID NO: 66 - DNA, 16 bp, Homo sapiens
  source 1..16: mol_type = unassigned DNA
cgtggataccctggga

SEQ ID NO: 67 - DNA, 21 bp, Homo sapiens
  source 1..21: mol_type = unassigned DNA
ctaaatgatgcaactctgact

SEQ ID NO: 68 - DNA, 17 bp, Homo sapiens
  source 1..17: mol_type = unassigned DNA
ctcgaccggaccggtgc

SEQ ID NO: 69 - DNA, 19 bp, Homo sapiens
  source 1..19: mol_type = unassigned DNA
ctctgagtaaggggaggac

SEQ ID NO: 70 - DNA, 19 bp, Homo sapiens
  source 1..19: mol_type = unassigned DNA
ctctgcgtatgtggacggc

SEQ ID NO: 71 - DNA, 21 bp, Homo sapiens
  source 1..21: mol_type = unassigned DNA
ctctgtacggcttcggcggtt

SEQ ID NO: 72 - DNA, 18 bp, Homo sapiens
  source 1..18: mol_type = unassigned DNA
ctgaagaagaggaaactg

SEQ ID NO: 73 - DNA, 21 bp, Homo sapiens
  source 1..21: mol_type = unassigned DNA
ctgaaggagctgatccagaag

SEQ ID NO: 74 - DNA, 20 bp, Homo sapiens
  source 1..20: mol_type = unassigned DNA
ctgacttctgaggaagaggc

SEQ ID NO: 75 - DNA, 18 bp, Homo sapiens
  source 1..18: mol_type = unassigned DNA
ctgagagaaccagacgga

SEQ ID NO: 76 - DNA, 17 bp, Homo sapiens
  source 1..17: mol_type = unassigned DNA
ctgcgggatgaaccgaa

SEQ ID NO: 77 - DNA, 26 bp, Homo sapiens
  source 1..26: mol_type = unassigned DNA
ctgcgggatgaaccgaacgccgggtt

SEQ ID NO: 78 - DNA, 29 bp, Homo sapiens
  source 1..29: mol_type = unassigned DNA
ctgggaataccgggtgctgtaggcttcgt

SEQ ID NO: 79 - DNA, 30 bp, Homo sapiens
  source 1..30: mol_type = unassigned DNA
ctgtgggattatgactgaacgcctcgtatg

SEQ ID NO: 80 - DNA, 19 bp, Homo sapiens
  source 1..19: mol_type = unassigned DNA
cttaatgatgactgtttta

SEQ ID NO: 81 - DNA, 29 bp, Homo sapiens
  source 1..29: mol_type = unassigned DNA
cttctcactactgcacttgactagttcgt

SEQ ID NO: 82 - DNA, 20 bp, Homo sapiens
  source 1..20: mol_type = unassigned DNA
cttctgacacatacttttct

SEQ ID NO: 83 - DNA, 21 bp, Homo sapiens
  source 1..21: mol_type = unassigned DNA
cttctgcgtcccgcccgccgc

SEQ ID NO: 84 - DNA, 22 bp, Homo sapiens
  source 1..22: mol_type = unassigned DNA
cttgcagtttgatctcagactg

SEQ ID NO: 85 - DNA, 19 bp, Homo sapiens
  source 1..19: mol_type = unassigned DNA
ctttccctagggctggatg

SEQ ID NO: 86 - DNA, 21 bp, Homo sapiens
  source 1..21: mol_type = unassigned DNA
cttttaatggataacagctat

SEQ ID NO: 87 - DNA, 22 bp, Homo sapiens
  source 1..22: mol_type = unassigned DNA
gaaacctctgcgccatgagagc

SEQ ID NO: 88 - DNA, 18 bp, Homo sapiens
  source 1..18: mol_type = unassigned DNA
gaaggactgtggaagttg

SEQ ID NO: 89 - DNA, 21 bp, Homo sapiens
  source 1..21: mol_type = unassigned DNA
gaaggtcgtgagttcgttcct

SEQ ID NO: 90 - DNA, 30 bp, Homo sapiens
  source 1..30: mol_type = unassigned DNA
gacccagtggcctaatggataaggcatcgt

SEQ ID NO: 91 - DNA, 29 bp, Homo sapiens
  source 1..29: mol_type = unassigned DNA
gacccttagcggtggatcactcggctcgt

SEQ ID NO: 92 - DNA, 16 bp, Homo sapiens
  source 1..16: mol_type = unassigned DNA
gacgacctgcttctgg

SEQ ID NO: 93 - DNA, 29 bp, Homo sapiens
  source 1..29: mol_type = unassigned DNA
gactcttagcggtggatcactcggctagt

SEQ ID NO: 94 - DNA, 19 bp, Homo sapiens
  source 1..19: mol_type = unassigned DNA
gagagttcaagagggcgtg

SEQ ID NO: 95 - DNA, 19 bp, Homo sapiens
  source 1..19: mol_type = unassigned DNA
gaggcgtgggttcgtatcc

SEQ ID NO: 96 - DNA, 21 bp, Homo sapiens
  source 1..21: mol_type = unassigned DNA
gaggtcccgggttcagatccc

SEQ ID NO: 97 - DNA, 23 bp, Homo sapiens
  source 1..23: mol_type = unassigned DNA
gagttctgggctgtagtgcgcca

SEQ ID NO: 98 - DNA, 21 bp, Homo sapiens
  source 1..21: mol_type = unassigned DNA
gatattcctggactgactgat

SEQ ID NO: 99 - DNA, 20 bp, Homo sapiens
  source 1..20: mol_type = unassigned DNA
gatcccgaggcctctccagt

SEQ ID NO: 100 - DNA, 23 bp, Homo sapiens
  source 1..23: mol_type = unassigned DNA
gatcgaggagctcacagtctagt

SEQ ID NO: 101 - DNA, 20 bp, Homo sapiens
  source 1..20: mol_type = unassigned DNA
gatctggctgcgacatctgt

SEQ ID NO: 102 - DNA, 19 bp, Homo sapiens
  source 1..19: mol_type = unassigned DNA
gatgaccgtgggacctgcc

SEQ ID NO: 103 - DNA, 20 bp, Homo sapiens
  source 1..20: mol_type = unassigned DNA
gatggacgagaatcacgagc

SEQ ID NO: 104 - DNA, 19 bp, Homo sapiens
  source 1..19: mol_type = unassigned DNA
gccccccccccctcgcggc

SEQ ID NO: 105 - DNA, 30 bp, Homo sapiens
  source 1..30: mol_type = unassigned DNA
gcccggatagctcagtcggtagagcatcgt

SEQ ID NO: 106 - DNA, 30 bp, Homo sapiens
  source 1..30: mol_type = unassigned DNA
gcccggctagctcagtcggtagagcatcgt

SEQ ID NO: 107 - DNA, 19 bp, Homo sapiens
  source 1..19: mol_type = unassigned DNA
gcgcgttcggctgttaacc

SEQ ID NO: 108 - DNA, 22 bp, Homo sapiens
  source 1..22: mol_type = unassigned DNA
gcggagcgagcgcacggggtcg

SEQ ID NO: 109 - DNA, 30 bp, Homo sapiens
  source 1..30: mol_type = unassigned DNA
gcggcggcggcgactctggacgcgagccac

SEQ ID NO: 110 - DNA, 18 bp, Homo sapiens
  source 1..18: mol_type = unassigned DNA
gctgatagacttgaactg

SEQ ID NO: 111 - DNA, 18 bp, Homo sapiens
  source 1..18: mol_type = unassigned DNA
gctgcatgtggcagtctg

SEQ ID NO: 112 - DNA, 20 bp, Homo sapiens
  source 1..20: mol_type = unassigned DNA
gcttatcagcctgatgttga

SEQ ID NO: 113 - DNA, 19 bp, Homo sapiens
  source 1..19: mol_type = unassigned DNA
ggaagagcccagcgccgaa

SEQ ID NO: 114 - DNA, 18 bp, Homo sapiens
  source 1..18: mol_type = unassigned DNA
ggaattacaagacagttg

SEQ ID NO: 115 - DNA, 17 bp, Homo sapiens
  source 1..17: mol_type = unassigned DNA
ggaccgaaacccccccc

SEQ ID NO: 116 - DNA, 24 bp, Homo sapiens
  source 1..24: mol_type = unassigned DNA
ggagatttcaacttaacttgacag

SEQ ID NO: 117 - DNA, 23 bp, Homo sapiens
  source 1..23: mol_type = unassigned DNA
ggagccattgtggctcaggccgg

SEQ ID NO: 118 - DNA, 20 bp, Homo sapiens
  source 1..20: mol_type = unassigned DNA
ggagttgttcctttggccac

SEQ ID NO: 119 - DNA, 16 bp, Homo sapiens
  source 1..16: mol_type = unassigned DNA
ggatgagaactctaat

SEQ ID NO: 120 - DNA, 21 bp, Homo sapiens
  source 1..21: mol_type = unassigned DNA
ggatggccgagtggttaaggc

SEQ ID NO: 121 - DNA, 21 bp, Homo sapiens
  source 1..21: mol_type = unassigned DNA
ggcactggtagaattcactga

SEQ ID NO: 122 - DNA, 30 bp, Homo sapiens
  source 1..30: mol_type = unassigned DNA
ggccgcgtggcctaatggataagtcgtatg

SEQ ID NO: 123 - DNA, 28 bp, Homo sapiens
  source 1..28: mol_type = unassigned DNA
ggctcgttggtctaggggtatgattcgt

SEQ ID NO: 124 - DNA, 30 bp, Homo sapiens
  source 1..30: mol_type = unassigned DNA
ggctcgttggtctaggggtatgattttcgt

SEQ ID NO: 125 - DNA, 30 bp, Homo sapiens
  source 1..30: mol_type = unassigned DNA
ggctcgttggtctagtggtatgattatcgt

SEQ ID NO: 126 - DNA, 20 bp, Homo sapiens
  source 1..20: mol_type = unassigned DNA
gggcaagtctggtgccagca

SEQ ID NO: 127 - DNA, 20 bp, Homo sapiens
  source 1..20: mol_type = unassigned DNA
gggtcggaaaaaaggacttt

SEQ ID NO: 128 - DNA, 21 bp, Homo sapiens
  source 1..21: mol_type = unassigned DNA
gggtcggaaaaaaggattttt

SEQ ID NO: 129 - DNA, 20 bp, Homo sapiens
  source 1..20: mol_type = unassigned DNA
gggttcaggtccctgttcag

SEQ ID NO: 130 - DNA, 20 bp, Homo sapiens
  source 1..20: mol_type = unassigned DNA
gggttcatgtccctgtccag

SEQ ID NO: 131 - DNA, 16 bp, Homo sapiens
  source 1..16: mol_type = unassigned DNA
ggtagaactcacactg

SEQ ID NO: 132 - DNA, 18 bp, Homo sapiens
  source 1..18: mol_type = unassigned DNA
ggtcggaaaaaaggattt

SEQ ID NO: 133 - DNA, 20 bp, Homo sapiens
  source 1..20: mol_type = unassigned DNA
ggttcggatcccactcctga

SEQ ID NO: 134 - DNA, 15 bp, Homo sapiens
  source 1..15: mol_type = unassigned DNA
ggttcgggtcccttc

SEQ ID NO: 135 - DNA, 22 bp, Homo sapiens
  source 1..22: mol_type = unassigned DNA
ggtttggttccgagaggtcccg

SEQ ID NO: 136 - DNA, 23 bp, Homo sapiens
  source 1..23: mol_type = unassigned DNA
gtagcaaagtgcttacagtgcag

SEQ ID NO: 137 - DNA, 18 bp, Homo sapiens
  source 1..18: mol_type = unassigned DNA
gtcactagtggttccgtt

SEQ ID NO: 138 - DNA, 18 bp, Homo sapiens
  source 1..18: mol_type = unassigned DNA
gtcatttcgatggcgtgg

SEQ ID NO: 139 - DNA, 19 bp, Homo sapiens
  source 1..19: mol_type = unassigned DNA
gtcggaaaaaaggactttt

SEQ ID NO: 140 - DNA, 18 bp, Homo sapiens
  source 1..18: mol_type = unassigned DNA
gtgactggaagggcctga

SEQ ID NO: 141 - DNA, 22 bp, Homo sapiens
  source 1..22: mol_type = unassigned DNA
gtgcaaatctatgcaaaactga

SEQ ID NO: 142 - DNA, 23 bp, Homo sapiens
  source 1..23: mol_type = unassigned DNA
gtgctgataacgccaaggtcgcg

SEQ ID NO: 143 - DNA, 19 bp, Homo sapiens
  source 1..19: mol_type = unassigned DNA
gttgacccgggttcgtttc

SEQ ID NO: 144 - DNA, 20 bp, Homo sapiens
  source 1..20: mol_type = unassigned DNA
gttgtgggctgtagtgcgct

SEQ ID NO: 145 - DNA, 22 bp, Homo sapiens
  source 1..22: mol_type = unassigned DNA
tccccaaattaatacttttata

SEQ ID NO: 146 - DNA, 22 bp, Homo sapiens
  source 1..22: mol_type = unassigned DNA
tcgttgtaagttgaaaatatag

SEQ ID NO: 147 - DNA, 29 bp, Homo sapiens
  source 1..29: mol_type = unassigned DNA
tctgggctgtagtgcgctatgccgatcgt

SEQ ID NO: 148 - DNA, 18 bp, Homo sapiens
  source 1..18: mol_type = unassigned DNA
tctgtgagaactaggagc

SEQ ID NO: 149 - DNA, 21 bp, Homo sapiens
  source 1..21: mol_type = unassigned DNA
tgaaaagaactttgaagagac

SEQ ID NO: 150 - DNA, 18 bp, Homo sapiens
  source 1..18: mol_type = unassigned DNA
tgatcagaaagctgtgga

SEQ ID NO: 151 - DNA, 17 bp, Homo sapiens
  source 1..17: mol_type = unassigned DNA
tgatgtaatgattctgc

SEQ ID NO: 152 - DNA, 29 bp, Homo sapiens
  source 1..29: mol_type = unassigned DNA
tgcagatcttggtggtagtagcaaatcgt

SEQ ID NO: 153 - DNA, 19 bp, Homo sapiens
  source 1..19: mol_type = unassigned DNA
tgcatcacagaactttgtt

SEQ ID NO: 154 - DNA, 17 bp, Homo sapiens
  source 1..17: mol_type = unassigned DNA
tgctgatcggctgtatg

SEQ ID NO: 155 - DNA, 18 bp, Homo sapiens
  source 1..18: mol_type = unassigned DNA
tggaagatcgaaagactg

SEQ ID NO: 156 - DNA, 20 bp, Homo sapiens
  source 1..20: mol_type = unassigned DNA
tggaatggaaatccattggg

SEQ ID NO: 157 - DNA, 18 bp, Homo sapiens
  source 1..18: mol_type = unassigned DNA
tggattggaaatccattg

SEQ ID NO: 158 - DNA, 20 bp, Homo sapiens
  source 1..20: mol_type = unassigned DNA
tggatttgaaatccattggg

SEQ ID NO: 159 - DNA, 21 bp, Homo sapiens
  source 1..21: mol_type = unassigned DNA
tggcactggcagaattcactg

SEQ ID NO: 160 - DNA, 20 bp, Homo sapiens
  source 1..20: mol_type = unassigned DNA
tggcgcaatgaaggtgaagg

SEQ ID NO: 161 - DNA, 30 bp, Homo sapiens
  source 1..30: mol_type = unassigned DNA
tgggctgtagtgcgctatgccgatcgtatg

SEQ ID NO: 162 - DNA, 16 bp, Homo sapiens
  source 1..16: mol_type = unassigned DNA
tgggtcggaaaaaagg

SEQ ID NO: 163 - DNA, 17 bp, Homo sapiens
  source 1..17: mol_type = unassigned DNA
tgggtcggaaaaaagga

SEQ ID NO: 164 - DNA, 19 bp, Homo sapiens
  source 1..19: mol_type = unassigned DNA
tgtagtttcctgttgttgg

SEQ ID NO: 165 - DNA, 30 bp, Homo sapiens
  source 1..30: mol_type = unassigned DNA
tgtcatcttcctcatcggtatcatcgtatg

SEQ ID NO: 166 - DNA, 20 bp, Homo sapiens
  source 1..20: mol_type = unassigned DNA
tgttagtgatgattttaaaa

SEQ ID NO: 167 - DNA, 18 bp, Homo sapiens
  source 1..18: mol_type = unassigned DNA
ttagatcgctgtgaagga

SEQ ID NO: 168 - DNA, 18 bp, Homo sapiens
  source 1..18: mol_type = unassigned DNA
ttccaggttcgtctcctg

SEQ ID NO: 169 - DNA, 20 bp, Homo sapiens
  source 1..20: mol_type = unassigned DNA
ttctgtggagctgtgaagga

SEQ ID NO: 170 - DNA, 21 bp, Homo sapiens
  source 1..21: mol_type = unassigned DNA
ttgacctctgaattgacagcc

SEQ ID NO: 171 - DNA, 17 bp, Homo sapiens
  source 1..17: mol_type = unassigned DNA
ttgctgctgtgcagaag

SEQ ID NO: 172 - DNA, 22 bp, Homo sapiens
  source 1..22: mol_type = unassigned DNA
ttggcaatggtagaactcccac

SEQ ID NO: 173 - DNA, 19 bp, Homo sapiens
  source 1..19: mol_type = unassigned DNA
agatcggaactggtagact

SEQ ID NO: 174 - DNA, 23 bp, Homo sapiens
  source 1..23: mol_type = unassigned DNA
aactggccctcaaagtcccgatt

SEQ ID NO: 175 - DNA, 22 bp, Homo sapiens
  source 1..22: mol_type = unassigned DNA
aatgatgttgatcaaatgtctg

SEQ ID NO: 176 - DNA, 24 bp, Homo sapiens
  source 1..24: mol_type = unassigned DNA
aatggtgagcactttggactctgt

SEQ ID NO: 177 - DNA, 20 bp, Homo sapiens
  source 1..20: mol_type = unassigned DNA
actgtgatgaacttctgagg

SEQ ID NO: 178 - DNA, 21 bp, Homo sapiens
  source 1..21: mol_type = unassigned DNA
agccatgatgataccactgag

SEQ ID NO: 179 - DNA, 21 bp, Homo sapiens
  source 1..21: mol_type = unassigned DNA
aggaggactgggacccatgaa

SEQ ID NO: 180 - DNA, 22 bp, Homo sapiens
  source 1..22: mol_type = unassigned DNA
aggtgactggttaatagaacta

SEQ ID NO: 181 - DNA, 20 bp, Homo sapiens
  source 1..20: mol_type = unassigned DNA
atggactgagccatgctact

SEQ ID NO: 182 - DNA, 29 bp, Homo sapiens
  source 1..29: mol_type = unassigned DNA
atgtctgacctgaaatgagcatgtagaca

SEQ ID NO: 183 - DNA, 30 bp, Homo sapiens
  source 1..30: mol_type = unassigned DNA
attaatgatgagatataaccgtgactgaag

SEQ ID NO: 184 - DNA, 26 bp, Homo sapiens
  source 1..26: mol_type = unassigned DNA
atttctgacgagatcttggatgatgc

SEQ ID NO: 185 - DNA, 20 bp, Homo sapiens
  source 1..20: mol_type = unassigned DNA
caaaagtaactgtggttttg

SEQ ID NO: 186 - DNA, 22 bp, Homo sapiens
  source 1..22: mol_type = unassigned DNA
caacaccagtcgatgggctaac

SEQ ID NO: 187 - DNA, 23 bp, Homo sapiens
  source 1..23: mol_type = unassigned DNA
caacacctgtcgatgggctgtca

SEQ ID NO: 188 - DNA, 24 bp, Homo sapiens
  source 1..24: mol_type = unassigned DNA
caagtcactagtggttccgtgtag

SEQ ID NO: 189 - DNA, 28 bp, Homo sapiens
  source 1..28: mol_type = unassigned DNA
cacagtgatgaacaagacagacctgatg

SEQ ID NO: 190 - DNA, 22 bp, Homo sapiens
  source 1..22: mol_type = unassigned DNA
ccagatcgtctgtgaactcagg

SEQ ID NO: 191 - DNA, 23 bp, Homo sapiens
  source 1..23: mol_type = unassigned DNA
cccccactgctaaatttgacggg

SEQ ID NO: 192 - DNA, 28 bp, Homo sapiens
  source 1..28: mol_type = unassigned DNA
cctgggtgatgataagcaaatgctgact

SEQ ID NO: 193 - DNA, 19 bp, Homo sapiens
  source 1..19: mol_type = unassigned DNA
cgggactgagccatgctac

SEQ ID NO: 194 - DNA, 21 bp, Homo sapiens
  source 1..21: mol_type = unassigned DNA
cgtgatgatgacttgctgaac

SEQ ID NO: 195 - DNA, 20 bp, Homo sapiens
  source 1..20: mol_type = unassigned DNA
ctaaccgatgaattgacagc

SEQ ID NO: 196 - DNA, 22 bp, Homo sapiens
  source 1..22: mol_type = unassigned DNA
ctagaggagcctgttctgtaca

SEQ ID NO: 197 - DNA, 17 bp, Homo sapiens
  source 1..17: mol_type = unassigned DNA
ctcacctatgaattgac

SEQ ID NO: 198 - DNA, 20 bp, Homo sapiens
  source 1..20: mol_type = unassigned DNA
ctgcaaagggaagccctttc

SEQ ID NO: 199 - DNA, 20 bp, Homo sapiens
  source 1..20: mol_type = unassigned DNA
ctgcactgagccatgctact

SEQ ID NO: 200 - DNA, 21 bp, Homo sapiens
  source 1..21: mol_type = unassigned DNA
ctggactgagccatgctaaga

SEQ ID NO: 201 - DNA, 23 bp, Homo sapiens
  source 1..23: mol_type = unassigned DNA
ctggactgagccatgctactgac

SEQ ID NO: 202 - DNA, 23 bp, Homo sapiens
  source 1..23: mol_type = unassigned DNA
ctggactgagccatgctactgag

SEQ ID NO: 203 - DNA, 24 bp, Homo sapiens
  source 1..24: mol_type = unassigned DNA
ctggactgagccatgctactggac

SEQ ID NO: 204 - DNA, 24 bp, Homo sapiens
  source 1..24: mol_type = unassigned DNA
ctggactgagccatgctactggag

SEQ ID NO: 205 - DNA, 25 bp, Homo sapiens
  source 1..25: mol_type = unassigned DNA
ctggactgagccatgctactggaga

SEQ ID NO: 206 - DNA, 25 bp, Homo sapiens
  source 1..25: mol_type = unassigned DNA
ctggactgagccatgctactggttt

SEQ ID NO: 207 - DNA, 19 bp, Homo sapiens
  source 1..19: mol_type = unassigned DNA
ctggactgagccatgcttt

SEQ ID NO: 208 - DNA, 22 bp, Homo sapiens
  source 1..22: mol_type = unassigned DNA
ctggactgagtcatgctactgg

SEQ ID NO: 209 - DNA, 29 bp, Homo sapiens
  source 1..29: mol_type = unassigned DNA
ctggatgaggataagcaaatgctgactga

SEQ ID NO: 210 - DNA, 29 bp, Homo sapiens
  source 1..29: mol_type = unassigned DNA
ctggatgatgataagcaaatgccgactga

SEQ ID NO: 211 - DNA, 29 bp, Homo sapiens
  source 1..29: mol_type = unassigned DNA
ctggatgatgataagcaaatgctgacgga

SEQ ID NO: 212 - DNA, 20 bp, Homo sapiens
  source 1..20: mol_type = unassigned DNA
ctggatgatgtagcctgaca

SEQ ID NO: 213 - DNA, 26 bp, Homo sapiens
  source 1..26: mol_type = unassigned DNA
cttcgtgatcgatgtggtgacgtcga

SEQ ID NO: 214 - DNA, 22 bp, Homo sapiens
  source 1..22: mol_type = unassigned DNA
ctttagctctagaattactctg

SEQ ID NO: 215 - DNA, 17 bp, Homo sapiens
  source 1..17: mol_type = unassigned DNA
ctttgtgacctctgatg

SEQ ID NO: 216 - DNA, 20 bp, Homo sapiens
  source 1..20: mol_type = unassigned DNA
gaatatgatggttgctgaga

SEQ ID NO: 217 - DNA, 19 bp, Homo sapiens
  source 1..19: mol_type = unassigned DNA
gacaatgatgaactgctga

SEQ ID NO: 218 - DNA, 20 bp, Homo sapiens
  source 1..20: mol_type = unassigned DNA
gattatgatgaattctgaaa

SEQ ID NO: 219 - DNA, 18 bp, Homo sapiens
  source 1..18: mol_type = unassigned DNA
gcgaaggttgtcgggatc

SEQ ID NO: 220 - DNA, 24 bp, Homo sapiens
  source 1..24: mol_type = unassigned DNA
ggagggccggcggcggcggcgact

SEQ ID NO: 221 - DNA, 23 bp, Homo sapiens
  source 1..23: mol_type = unassigned DNA
gtagcttatcagactgttgttga

SEQ ID NO: 222 - DNA, 22 bp, Homo sapiens
  source 1..22: mol_type = unassigned DNA
gtcactagtggttccgtttagt

SEQ ID NO: 223 - DNA, 23 bp, Homo sapiens
  source 1..23: mol_type = unassigned DNA
gtcccgggttcagatcccggacg

SEQ ID NO: 224 - DNA, 25 bp, Homo sapiens
  source 1..25: mol_type = unassigned DNA
gtgcgcgcgggtcggggcggcggcg

SEQ ID NO: 225 - DNA, 22 bp, Homo sapiens
  source 1..22: mol_type = unassigned DNA
gtggactgagccgtgctactga

SEQ ID NO: 226 - DNA, 22 bp, Homo sapiens
  misc_difference 1: note = modified_base - a, c, t, g, unknown or other
  source 1..22: mol_type = unassigned DNA
ntggactgagccatgctactgg

SEQ ID NO: 227 - DNA, 22 bp, Homo sapiens
  source 1..22: mol_type = unassigned DNA
taattgaagttcttgccatcac

SEQ ID NO: 228 - DNA, 20 bp, Homo sapiens
  source 1..20: mol_type = unassigned DNA
tcccactcctgacaccattt

SEQ ID NO: 229 - DNA, 20 bp, Homo sapiens
  source 1..20: mol_type = unassigned DNA
tccggctcggaggaccatag

SEQ ID NO: 230 - DNA, 18 bp, Homo sapiens
  source 1..18: mol_type = unassigned DNA
tctttgtgacctctgatg

SEQ ID NO: 231 - DNA, 23 bp, Homo sapiens
  source 1..23: mol_type = unassigned DNA
tgacctattaattgacagccaat

SEQ ID NO: 232 - DNA, 22 bp, Homo sapiens
  source 1..22: mol_type = unassigned DNA
tgccggtgatgctgatctgagg

SEQ ID NO: 233 - DNA, 20 bp, Homo sapiens
  source 1..20: mol_type = unassigned DNA
ttacggctcgaaggaccaag

SEQ ID NO: 234 - DNA, 24 bp, Homo sapiens
  source 1..24: mol_type = unassigned DNA
ttctgacgagatcttggatgatgc

SEQ ID NO: 235 - DNA, 25 bp, Homo sapiens
  source 1..25: mol_type = unassigned DNA
ttctgacgagatcttggatgatgct

SEQ ID NO: 236 - DNA, 22 bp, Homo sapiens
  source 1..22: mol_type = unassigned DNA
ttggactgagccatgctactgg

SEQ ID NO: 237 - DNA, 26 bp, Homo sapiens
  source 1..26: mol_type = unassigned DNA
tttctgacgagatcttggatgatgct

SEQ ID NO: 238 - DNA, 26 bp, Homo sapiens
  source 1..26: mol_type = unassigned DNA
tttggcgatggtagaactcacactgt

SEQ ID NO: 239 - DNA, 28 bp, Homo sapiens
  source 1..28: mol_type = unassigned DNA
ttttctgacatgctctaaaggatgatga

SEQ ID NO: 240 - DNA, 20 bp, Homo sapiens
  source 1..20: mol_type = unassigned DNA
ttttgttatctagctgtatg

SEQ ID NO: 241 - DNA, 20 bp, Homo sapiens
  source 1..20: mol_type = unassigned DNA
aactggatttttggagcagg

SEQ ID NO: 242 - DNA, 25 bp, Homo sapiens
  source 1..25: mol_type = unassigned DNA
aagagcccagcgccgaatccccgcc

SEQ ID NO: 243 - DNA, 24 bp, Homo sapiens
  source 1..24: mol_type = unassigned DNA
aattgatttttggagcagggagat

SEQ ID NO: 244 - DNA, 19 bp, Homo sapiens
  source 1..19: mol_type = unassigned DNA
agtggatttttggagcagg

SEQ ID NO: 245 - DNA, 22 bp, Homo sapiens
  source 1..22: mol_type = unassigned DNA
atgtatttttggagcagggaga

SEQ ID NO: 246 - DNA, 23 bp, Homo sapiens
  source 1..23: mol_type = unassigned DNA
atgtatttttggagcagggagat

SEQ ID NO: 247 - DNA, 21 bp, Homo sapiens
  source 1..21: mol_type = unassigned DNA
attggatttttggagcaggga

SEQ ID NO: 248 - DNA, 22 bp, Homo sapiens
  source 1..22: mol_type = unassigned DNA
cattttggaacaatgtaggtaa

SEQ ID NO: 249 - DNA, 20 bp, Homo sapiens
  source 1..20: mol_type = unassigned DNA
gattttggcctagttctgtg

SEQ ID NO: 250 - DNA, 29 bp, Homo sapiens
  source 1..29: mol_type = unassigned DNA
gccgcgaggcgtccagtgcggtaacgcga

SEQ ID NO: 251 - DNA, 21 bp, Homo sapiens
  source 1..21: mol_type = unassigned DNA
gtctctggagcgtcgggccca

SEQ ID NO: 252 - DNA, 19 bp, Homo sapiens
  source 1..19: mol_type = unassigned DNA
tgtgcggaccaggggaatc

SEQ ID NO: 253 - DNA, 25 bp, Homo sapiens
  source 1..25: mol_type = unassigned DNA
aattccgataacgaacgcgactctg

SEQ ID NO: 254 - DNA, 21 bp, Homo sapiens
  source 1..21: mol_type = unassigned DNA
acgcgcatgaatggatgcacg

SEQ ID NO: 255 - DNA, 21 bp, Homo sapiens
  source 1..21: mol_type = unassigned DNA
agactgtgatgactgggagag

SEQ ID NO: 256 - DNA, 21 bp, Homo sapiens
  source 1..21: mol_type = unassigned DNA
ctctaactttgaaggccgaag

SEQ ID NO: 257 - DNA, 21 bp, Homo sapiens
  source 1..21: mol_type = unassigned DNA
gacagggagtcgggttcagat

SEQ ID NO: 258 - DNA, 17 bp, Homo sapiens
  source 1..17: mol_type = unassigned DNA
atgtgaatccgactgtt

SEQ ID NO: 259 - DNA, 20 bp, Homo sapiens
  source 1..20: mol_type = unassigned DNA
catggtgaccacgggtgccg

SEQ ID NO: 260 - DNA, 22 bp, Homo sapiens
  source 1..22: mol_type = unassigned DNA
cgcctgtcacgcgggagcccgg

SEQ ID NO: 261 - DNA, 20 bp, Homo sapiens
  source 1..20: mol_type = unassigned DNA
gcgccgccgccccccccccg

SEQ ID NO: 262 - DNA, 19 bp, Homo sapiens
  source 1..19: mol_type = unassigned DNA
gcgcggaccaggggaatcc

SEQ ID NO: 263 - DNA, 20 bp, Homo sapiens
  source 1..20: mol_type = unassigned DNA
gctaccacatccaaggacgg

SEQ ID NO: 264 - DNA, 22 bp, Homo sapiens
  source 1..22: mol_type = unassigned DNA
ggaccagcccgtggacggtgtg

SEQ ID NO: 265 - DNA, 17 bp, Homo sapiens
  source 1..17: mol_type = unassigned DNA
ggccgccgccgggcgca

SEQ ID NO: 266 - DNA, 19 bp, Homo sapiens
  source 1..19: mol_type = unassigned DNA
gtcggggtttcgtacgtcg

SEQ ID NO: 267 - DNA, 22 bp, Homo sapiens
  source 1..22: mol_type = unassigned DNA
tgggatcccgaggcctctccag

SEQ ID NO: 268 - DNA, 23 bp, Homo sapiens
  source 1..23: mol_type = unassigned DNA
cccgtgccgagtcgtgaccggtg

SEQ ID NO: 269 - DNA, 16 bp, Homo sapiens
  source 1..16: mol_type = unassigned DNA
aacagggtttgttagg

SEQ ID NO: 270 - DNA, 19 bp, Homo sapiens
  source 1..19: mol_type = unassigned DNA
aagcggagtcgggttcaga

SEQ ID NO: 271 - DNA, 18 bp, Homo sapiens
  source 1..18: mol_type = unassigned DNA
acgaaagccgccgtggcg

SEQ ID NO: 272 - DNA, 20 bp, Homo sapiens
  source 1..20: mol_type = unassigned DNA
agaggcaactctggtggagg

SEQ ID NO: 273 - DNA, 24 bp, Homo sapiens
  source 1..24: mol_type = unassigned DNA
agctgttgaacatgggtcagtcgg

SEQ ID NO: 274 - DNA, 22 bp, Homo sapiens
  source 1..22: mol_type = unassigned DNA
atggccagagctcacacagagg

SEQ ID NO: 275 - DNA, 19 bp, Homo sapiens
  source 1..19: mol_type = unassigned DNA
caacacccgtcgatgggct

SEQ ID NO: 276 - DNA, 22 bp, Homo sapiens
  source 1..22: mol_type = unassigned DNA
caggtgtcctaaggcgagctca

SEQ ID NO: 277 - DNA, 20 bp, Homo sapiens
  source 1..20: mol_type = unassigned DNA
cagtccgccgagggcgcacc

SEQ ID NO: 278 - DNA, 17 bp, Homo sapiens
  source 1..17: mol_type = unassigned DNA
ccgggtgatgtaggctt

SEQ ID NO: 279 - DNA, 20 bp, Homo sapiens
  source 1..20: mol_type = unassigned DNA
gagccagtcggtcctgagag

SEQ ID NO: 280 - DNA, 20 bp, Homo sapiens
  source 1..20: mol_type = unassigned DNA
gccaaagctcgcttgatctt

SEQ ID NO: 281 - DNA, 21 bp, Homo sapiens
  source 1..21: mol_type = unassigned DNA
gtgctgtgatgagctctgagc

SEQ ID NO: 282 - DNA, 26 bp, Homo sapiens
  source 1..26: mol_type = unassigned DNA
tgtaggtaagggaagtcggcaagccg

SEQ ID NO: 283 - DNA, 22 bp, Homo sapiens
  source 1..22: mol_type = unassigned DNA
gtgctgtgatgagctctgagcc

SEQ ID NO: 284 - DNA, 22 bp, Homo sapiens
  source 1..22: mol_type = unassigned DNA
aaaattcaacgctgtcggttag

SEQ ID NO: 285 - DNA, 20 bp, Homo sapiens
  source 1..20: mol_type = unassigned DNA
aaacggatttttggagcagg

SEQ ID NO: 286 - DNA, 23 bp, Homo sapiens
  source 1..23: mol_type = unassigned DNA
aacaccagtcgatgggctgtaag

SEQ ID NO: 287 - DNA, 23 bp, Homo sapiens
  source 1..23: mol_type = unassigned DNA
aacgatgccgaccggcgctgcgg

SEQ ID NO: 288 - DNA, 15 bp, Homo sapiens
  source 1..15: mol_type = unassigned DNA
aactagactctggca

SEQ ID NO: 289 - DNA, 22 bp, Homo sapiens
  source 1..22: mol_type = unassigned DNA
aagcatttttggaaataggaga

SEQ ID NO: 290 - DNA, 19 bp, Homo sapiens
  source 1..19: mol_type = unassigned DNA
aatagctcagaatgtcagt

SEQ ID NO: 291 - DNA, 29 bp, Homo sapiens
  source 1..29: mol_type = unassigned DNA
acagcactagattgtaaagactggggtgg

SEQ ID NO: 292 - DNA, 17 bp, Homo sapiens
  source 1..17: mol_type = unassigned DNA
acccggtcagcccctct

SEQ ID NO: 293 - DNA, 19 bp, Homo sapiens
  source 1..19: mol_type = unassigned DNA
accgggtgctgtcggcttg

SEQ ID NO: 294 - DNA, 19 bp, Homo sapiens
  source 1..19: mol_type = unassigned DNA
agatctgggctgtagtgcg

SEQ ID NO: 295 - DNA, 26 bp, Homo sapiens
  source 1..26: mol_type = unassigned DNA
agcactagattgtaaagactggggtg

SEQ ID NO: 296 - DNA, 23 bp, Homo sapiens
  source 1..23: mol_type = unassigned DNA
agtaggagggccgctgcggtgag

SEQ ID NO: 297 - DNA, 19 bp, Homo sapiens
  source 1..19: mol_type = unassigned DNA
atcccaccttcgtcgccat

SEQ ID NO: 298 - DNA, 19 bp, Homo sapiens
  source 1..19: mol_type = unassigned DNA
atcgatttttggagcaggg

SEQ ID NO: 299 - DNA, 20 bp, Homo sapiens
  source 1..20: mol_type = unassigned DNA
atgcatttttggagcaggga

SEQ ID NO: 300 - DNA, 22 bp, Homo sapiens
  source 1..22: mol_type = unassigned DNA
atgctgactgaacatgaaggtc

SEQ ID NO: 301 - DNA, 20 bp, Homo sapiens
  source 1..20: mol_type = unassigned DNA
atggatttttggaaatcgga

SEQ ID NO: 302 - DNA, 20 bp, Homo sapiens
  source 1..20: mol_type = unassigned DNA
atggatttttggcgcaggga

SEQ ID NO: 303 - DNA, 21 bp, Homo sapiens
  source 1..21: mol_type = unassigned DNA
attagcaatggtagaactcac

SEQ ID NO: 304 - DNA, 20 bp, Homo sapiens
  source 1..20: mol_type = unassigned DNA
caaaccgggtgctgtaggct

SEQ ID NO: 305 - DNA, 16 bp, Homo sapiens
  source 1..16: mol_type = unassigned DNA
caacaccagtagatgg

SEQ ID NO: 306 - DNA, 17 bp, Homo sapiens
  source 1..17: mol_type = unassigned DNA
caagacggaccagagcg

SEQ ID NO: 307 - DNA, 22 bp, Homo sapiens
  source 1..22: mol_type = unassigned DNA
cacagctgggttgagagggcgt

SEQ ID NO: 308 - DNA, 25 bp, Homo sapiens
  source 1..25: mol_type = unassigned DNA
cacgacggtggccatggaagtcgga

SEQ ID NO: 309 - DNA, 18 bp, Homo sapiens
  source 1..18: mol_type = unassigned DNA
cagccagtagtggacagg

SEQ ID NO: 310 - DNA, 29 bp, Homo sapiens
  source 1..29: mol_type = unassigned DNA
cagcgcggtaacgcgaccgatcccggaga

SEQ ID NO: 311 - DNA, 21 bp, Homo sapiens
  source 1..21: mol_type = unassigned DNA
caggatcgcgtgagctcggag

SEQ ID NO: 312 - DNA, 22 bp, Homo sapiens
  source 1..22: mol_type = unassigned DNA
catctcgctgtagcatcgaacc

SEQ ID NO: 313 - DNA, 20 bp, Homo sapiens
  source 1..20: mol_type = unassigned DNA
catggtgctgtcggagctag

SEQ ID NO: 314 - DNA, 16 bp, Homo sapiens
  source 1..16: mol_type = unassigned DNA
ccaccgcccgtccccg

SEQ ID NO: 315 - DNA, 24 bp, Homo sapiens
  source 1..24: mol_type = unassigned DNA
ccccccacaaccgcgcttgactgg

SEQ ID NO: 316 - DNA, 25 bp, Homo sapiens
  source 1..25: mol_type = unassigned DNA
ccccgaggggctctcgcttctggcg

SEQ ID NO: 317 - DNA, 16 bp, Homo sapiens
  source 1..16: mol_type = unassigned DNA
cctaccagagtcgcca

SEQ ID NO: 318 - DNA, 24 bp, Homo sapiens
  source 1..24: mol_type = unassigned DNA
cctattggccagttttgtctgatg

SEQ ID NO: 319 - DNA, 17 bp, Homo sapiens
  source 1..17: mol_type = unassigned DNA
cctcgggccgctcgcac

SEQ ID NO: 320 - DNA, 20 bp, Homo sapiens
  source 1..20: mol_type = unassigned DNA
cctgagggagctcgtcggtg

SEQ ID NO: 321 - DNA, 24 bp, Homo sapiens
  source 1..24: mol_type = unassigned DNA
cgagcttatcagactgatgttgac

SEQ ID NO: 322 - DNA, 26 bp, Homo sapiens
  source 1..26: mol_type = unassigned DNA
cgaggcccagcccgtggccggtgtga

SEQ ID NO: 323 - DNA, 22 bp, Homo sapiens
  source 1..22: mol_type = unassigned DNA
cggcgacggggggggtgccgcg

SEQ ID NO: 324 - DNA, 18 bp, Homo sapiens
  source 1..18: mol_type = unassigned DNA
cggcgccgctcgtggggg

SEQ ID NO: 325 - DNA, 20 bp, Homo sapiens
  source 1..20: mol_type = unassigned DNA
cgtacattgccagggatttc

SEQ ID NO: 326 - DNA, 22 bp, Homo sapiens
  source 1..22: mol_type = unassigned DNA
cgtgtggtgtgcgtcggcgggc

SEQ ID NO: 327 - DNA, 19 bp, Homo sapiens
  source 1..19: mol_type = unassigned DNA
ctagcactggtagaattca

SEQ ID NO: 328 - DNA, 22 bp, Homo sapiens
  source 1..22: mol_type = unassigned DNA
ctcccgtgctgatcagtcgtgg

SEQ ID NO: 329 - DNA, 16 bp, Homo sapiens
  source 1..16: mol_type = unassigned DNA
ctctctctctctgcct

SEQ ID NO: 330 - DNA, 18 bp, Homo sapiens
  source 1..18: mol_type = unassigned DNA
ctggaattctggacccgg

SEQ ID NO: 331 - DNA, 21 bp, Homo sapiens
  source 1..21: mol_type = unassigned DNA
ctgtgcgtgcgacagcggctg

SEQ ID NO: 332 - DNA, 22 bp, Homo sapiens
  source 1..22: mol_type = unassigned DNA
ctgtgcgtgtgacagcggcttc

SEQ ID NO: 333 - DNA, 21 bp, Homo sapiens
  source 1..21: mol_type = unassigned DNA
cttgtggtgtgcgtcggaggg

SEQ ID NO: 334 - DNA, 21 bp, Homo sapiens
  source 1..21: mol_type = unassigned DNA
gaatgtttagacgggctctgg

SEQ ID NO: 335 - DNA, 19 bp, Homo sapiens
  source 1..19: mol_type = unassigned DNA
gacaccaggccggccccgg

SEQ ID NO: 336 - DNA, 20 bp, Homo sapiens
  source 1..20: mol_type = unassigned DNA
gacgaatttttgagcgggta

SEQ ID NO: 337 - DNA, 18 bp, Homo sapiens
  source 1..18: mol_type = unassigned DNA
gagcacagcatcgtcggg

SEQ ID NO: 338 - DNA, 22 bp, Homo sapiens
  source 1..22: mol_type = unassigned DNA
gagcccaggaactggaggctgt

SEQ ID NO: 339 - DNA, 22 bp, Homo sapiens
  source 1..22: mol_type = unassigned DNA
gagccgaagctggactgtactg

SEQ ID NO: 340 - DNA, 21 bp, Homo sapiens
  source 1..21: mol_type = unassigned DNA
gaggccagcgccgaatccccg

SEQ ID NO: 341 - DNA, 25 bp, Homo sapiens
  source 1..25: mol_type = unassigned DNA
gccccccgtggcggcgacgacccat

SEQ ID NO: 342 - DNA, 21 bp, Homo sapiens
  source 1..21: mol_type = unassigned DNA
gccccgaggcgtccagtgcgg

SEQ ID NO: 343 - DNA, 26 bp, Homo sapiens
  source 1..26: mol_type = unassigned DNA
gccgccggtgcaataccactactctg

SEQ ID NO: 344 - DNA, 22 bp, Homo sapiens
  source 1..22: mol_type = unassigned DNA
gcgacgagtaggagggccgctg

SEQ ID NO: 345 - DNA, 23 bp, Homo sapiens
  source 1..23: mol_type = unassigned DNA
gcgctcgccggccgaggtgggat

SEQ ID NO: 346 - DNA, 20 bp, Homo sapiens
  source 1..20: mol_type = unassigned DNA
ggcggcggcggcaggcggcg

SEQ ID NO: 347 - DNA, 19 bp, Homo sapiens
  source 1..19: mol_type = unassigned DNA
gggatgaaccgaccgccgg

SEQ ID NO: 348 - DNA, 21 bp, Homo sapiens
  source 1..21: mol_type = unassigned DNA
gggctgtgatgaagctgagca

SEQ ID NO: 349 - DNA, 21 bp, Homo sapiens
  source 1..21: mol_type = unassigned DNA
ggtcccgtgcccgtcgtcgtc

SEQ ID NO: 350 - DNA, 21 bp, Homo sapiens
  source 1..21: mol_type = unassigned DNA
gtagcttatcagcctgatgtt

SEQ ID NO: 351 - DNA, 18 bp, Homo sapiens
  source 1..18: mol_type = unassigned DNA
gtgcggaacgctggccgg

SEQ ID NO: 352 - DNA, 24 bp, Homo sapiens
  source 1..24: mol_type = unassigned DNA
gtgcggtaacgcgaccgctcccgg

SEQ ID NO: 353 - DNA, 21 bp, Homo sapiens
  source 1..21: mol_type = unassigned DNA
taatgtgatgaacttctgagg

SEQ ID NO: 354 - DNA, 22 bp, Homo sapiens
  source 1..22: mol_type = unassigned DNA
tactttctcagactgatgttga

SEQ ID NO: 355 - DNA, 20 bp, Homo sapiens
  source 1..20: mol_type = unassigned DNA
tagatgtccggggctgcccg

SEQ ID NO: 356 - DNA, 22 bp, Homo sapiens
  source 1..22: mol_type = unassigned DNA
tatcgcactggtagaattcaat

SEQ ID NO: 357 - DNA, 22 bp, Homo sapiens
  source 1..22: mol_type = unassigned DNA
tatcgcacttgtagaattcact

SEQ ID NO: 358 - DNA, 23 bp, Homo sapiens
  source 1..23: mol_type = unassigned DNA
tatcgcgctggtagaattcactg

SEQ ID NO: 359 - DNA, 21 bp, Homo sapiens
  source 1..21: mol_type = unassigned DNA
tatgattctcgcttcggtgtg

SEQ ID NO: 360 - DNA, 24 bp, Homo sapiens
  source 1..24: mol_type = unassigned DNA
tatgttcgttcggctcgcgtgaag

SEQ ID NO: 361 - DNA, 17 bp, Homo sapiens
  source 1..17: mol_type = unassigned DNA
tattgcactcgtcccga

SEQ ID NO: 362 - DNA, 23 bp, Homo sapiens
  source 1..23: mol_type = unassigned DNA
tattgtactggtagaattcactg

SEQ ID NO: 363 - DNA, 17 bp, Homo sapiens
  source 1..17: mol_type = unassigned DNA
tcacaccagagtcgcca

SEQ ID NO: 364 - DNA, 20 bp, Homo sapiens
  source 1..20: mol_type = unassigned DNA
tcaggtctcggtggaacctc

SEQ ID NO: 365 - DNA, 25 bp, Homo sapiens
  source 1..25: mol_type = unassigned DNA
tcatcatcggactggacgggagctt

SEQ ID NO: 366 - DNA, 19 bp, Homo sapiens
  source 1..19: mol_type = unassigned DNA
tctcactgtagcatcgacc

SEQ ID NO: 367 - DNA, 20 bp, Homo sapiens
  source 1..20: mol_type = unassigned DNA
tctggactctgaatccggta

SEQ ID NO: 368 - DNA, 22 bp, Homo sapiens
  source 1..22: mol_type = unassigned DNA
tgaggcaatgctagaactcaca

SEQ ID NO: 369 - DNA, 23 bp, Homo sapiens
  source 1..23: mol_type = unassigned DNA
tgctatgatgaactgtcctgaga

SEQ ID NO: 370 - DNA, 21 bp, Homo sapiens
  source 1..21: mol_type = unassigned DNA
tggtcgtggttgtagtcccca

SEQ ID NO: 371 - DNA, 19 bp, Homo sapiens
  source 1..19: mol_type = unassigned DNA
tgttgcactcgtcccggcc

SEQ ID NO: 372 - DNA, 17 bp, Homo sapiens
  source 1..17: mol_type = unassigned DNA
ttacagcccccccggca

SEQ ID NO: 373 - DNA, 17 bp, Homo sapiens
  source 1..17: mol_type = unassigned DNA
ttcatcttaaactgaac

SEQ ID NO: 374 - DNA, 23 bp, Homo sapiens
  source 1..23: mol_type = unassigned DNA
ttccttatcacactgatgttgac

SEQ ID NO: 375 - DNA, 23 bp, Homo sapiens
  source 1..23: mol_type = unassigned DNA
ttctttataagactgatgttgac

SEQ ID NO: 376 - DNA, 20 bp, Homo sapiens
  source 1..20: mol_type = unassigned DNA
ttgaaggctccgcggaccgg

SEQ ID NO: 377 - DNA, 23 bp, Homo sapiens
  source 1..23: mol_type = unassigned DNA
ttgcttatcagactgaagttgac

SEQ ID NO: 378 - DNA, 19 bp, Homo sapiens
  source 1..19: mol_type = unassigned DNA
ttggatttttggaaatagg

SEQ ID NO: 379 - DNA, 21 bp, Homo sapiens
  source 1..21: mol_type = unassigned DNA
ttggtgatcagactgatgttg

SEQ ID NO: 380 - DNA, 23 bp, Homo sapiens
  source 1..23: mol_type = unassigned DNA
ttggttatcagactgaagttgac

SEQ ID NO: 381 - DNA, 22 bp, Homo sapiens
  source 1..22: mol_type = unassigned DNA
ttggttatcagactgatgatga

SEQ ID NO: 382 - DNA, 21 bp, Homo sapiens
  source 1..21: mol_type = unassigned DNA
ttggttatcagactgatgctg

SEQ ID NO: 383 - DNA, 23 bp, Homo sapiens
  source 1..23: mol_type = unassigned DNA
tttagcaatggtagaactcaaac

SEQ ID NO: 384 - DNA, 21 bp, Homo sapiens
  source 1..21: mol_type = unassigned DNA
tttggcaatggtagaattaac

SEQ ID NO: 385 - DNA, 24 bp, Homo sapiens
  source 1..24: mol_type = unassigned DNA
ttttgcaatggtagaaataacact

SEQ ID NO: 386 - DNA, 22 bp, Homo sapiens
  source 1..22: mol_type = unassigned DNA
aaatcactggtagaattcactg

SEQ ID NO: 387 - DNA, 22 bp, Homo sapiens
  source 1..22: mol_type = unassigned DNA
aaatgaggccatgattaagagg

SEQ ID NO: 388 - DNA, 17 bp, Homo sapiens
  source 1..17: mol_type = unassigned DNA
aaccccattcgtgatgg

SEQ ID NO: 389 - DNA, 18 bp, Homo sapiens
  source 1..18: mol_type = unassigned DNA
aacgtcgggccgatcgca

SEQ ID NO: 390 - DNA, 20 bp, Homo sapiens
  source 1..20: mol_type = unassigned DNA
aactcggaggttcgaagacg

SEQ ID NO: 391 - DNA, 20 bp, Homo sapiens
  source 1..20: mol_type = unassigned DNA
aagacactggtagaattcac

SEQ ID NO: 392 - DNA, 17 bp, Homo sapiens
  source 1..17: mol_type = unassigned DNA
aatcagcggggaaagaa

SEQ ID NO: 393 - DNA, 21 bp, Homo sapiens
  source 1..21: mol_type = unassigned DNA
aatggatttttggaaataggg

SEQ ID NO: 394 - DNA, 22 bp, Homo sapiens
  source 1..22: mol_type = unassigned DNA
aatgtattgtacatcggatgag

SEQ ID NO: 395 - DNA, 23 bp, Homo sapiens
  source 1..23: mol_type = unassigned DNA
acagcagatcagacgtggcgacc

SEQ ID NO: 396 - DNA, 18 bp, Homo sapiens
  source 1..18: mol_type = unassigned DNA
acagggtgctgtaggatt

SEQ ID NO: 397 - DNA, 19 bp, Homo sapiens
  source 1..19: mol_type = unassigned DNA
acccgacctcagatcagac

SEQ ID NO: 398 - DNA, 21 bp, Homo sapiens
  source 1..21: mol_type = unassigned DNA
accgaagtctttgggttccgg

SEQ ID NO: 399 - DNA, 18 bp, Homo sapiens
  source 1..18: mol_type = unassigned DNA
acgcgttaggacccgaaa

SEQ ID NO: 400 - DNA, 21 bp, Homo sapiens
  source 1..21: mol_type = unassigned DNA
acgtggcgacccgctgaattt

SEQ ID NO: 401 - DNA, 16 bp, Homo sapiens
  source 1..16: mol_type = unassigned DNA
acgttcgtggggaacc

SEQ ID NO: 402 - DNA, 15 bp, Homo sapiens
  source 1..15: mol_type = unassigned DNA
actccctgatgaaca

SEQ ID NO: 403 - DNA, 24 bp, Homo sapiens
  source 1..24: mol_type = unassigned DNA
actgcgggataaggattggctcta

SEQ ID NO: 404 - DNA, 19 bp, Homo sapiens
  source 1..19: mol_type = unassigned DNA
agacgacttagaactggtg

SEQ ID NO: 405 - DNA, 20 bp, Homo sapiens
  source 1..20: mol_type = unassigned DNA
agagatgtggtgacgtcgtg

SEQ ID NO: 406 - DNA, 20 bp, Homo sapiens
  source 1..20: mol_type = unassigned DNA
agcgcactggtagaattcac

SEQ ID NO: 407 - DNA, 17 bp, Homo sapiens
  source 1..17: mol_type = unassigned DNA
agctggtgctgtaggct

SEQ ID NO: 408 - DNA, 19 bp, Homo sapiens
  source 1..19: mol_type = unassigned DNA
agctgtccggggctgcacg

SEQ ID NO: 409 - DNA, 20 bp, Homo sapiens
  source 1..20: mol_type = unassigned DNA
aggaaccgcaggttcagaca

SEQ ID NO: 410 - DNA, 24 bp, Homo sapiens
  source 1..24: mol_type = unassigned DNA
aggacagaaacctcccgtggagca

SEQ ID NO: 411 - DNA, 22 bp, Homo sapiens
  source 1..22: mol_type = unassigned DNA
aggccgcggagccagcgacgac

SEQ ID NO: 412 - DNA, 22 bp, Homo sapiens
  source 1..22: mol_type = unassigned DNA
aggtatttttggagcagggaga

SEQ ID NO: 413 - DNA, 15 bp, Homo sapiens
  source 1..15: mol_type = unassigned DNA
agtcgggggctcgca

SEQ ID NO: 414 - DNA, 19 bp, Homo sapiens
  source 1..19: mol_type = unassigned DNA
atcccactactctgatcgt

SEQ ID NO: 415 - DNA, 19 bp, Homo sapiens
  source 1..19: mol_type = unassigned DNA
atcccagcgccgaatcccc

SEQ ID NO: 416 - DNA, 19 bp, Homo sapiens
  source 1..19: mol_type = unassigned DNA
atccccggccgtcgccggc

SEQ ID NO: 417 - DNA, 22 bp, Homo sapiens
  source 1..22: mol_type = unassigned DNA
atctcaaaagctcgcttgatct

SEQ ID NO: 418 - DNA, 21 bp, Homo sapiens
  source 1..21: mol_type = unassigned DNA
atgccaaaagctcgcttgatc

SEQ ID NO: 419 - DNA, 21 bp, Homo sapiens
  source 1..21: mol_type = unassigned DNA
atgtcagtggtagaattcact

SEQ ID NO: 420 - DNA, 20 bp, Homo sapiens
  source 1..20: mol_type = unassigned DNA
atgtgtggttcagtggtaga

SEQ ID NO: 421 - DNA, 20 bp, Homo sapiens
  source 1..20: mol_type = unassigned DNA
caacaccagtcgatggcctg

SEQ ID NO: 422 - DNA, 21 bp, Homo sapiens
  source 1..21: mol_type = unassigned DNA
caacatgatgaaaccctgact

SEQ ID NO: 423 - DNA, 22 bp, Homo sapiens
  source 1..22: mol_type = unassigned DNA
cacatgctcagactcctgtggt

SEQ ID NO: 424 - DNA, 15 bp, Homo sapiens
  source 1..15: mol_type = unassigned DNA
caccgcggcggtgcg

SEQ ID NO: 425 - DNA, 19 bp, Homo sapiens
  source 1..19: mol_type = unassigned DNA
cacgcaccgcacgttcgtg

SEQ ID NO: 426 - DNA, 20 bp, Homo sapiens
  source 1..20: mol_type = unassigned DNA
cactgaccaaggagtctaac

SEQ ID NO: 427 - DNA, 21 bp, Homo sapiens
  source 1..21: mol_type = unassigned DNA
cagaccaggggaatccgactg

SEQ ID NO: 428 - DNA, 20 bp, Homo sapiens
  source 1..20: mol_type = unassigned DNA
cagagcacagcatcgtcggg

SEQ ID NO: 429 - DNA, 20 bp, Homo sapiens
  source 1..20: mol_type = unassigned DNA
cagcccagggaacgggcttg

SEQ ID NO: 430 - DNA, 21 bp, Homo sapiens
  source 1..21: mol_type = unassigned DNA
cagccggtcctgagagatggg

SEQ ID NO: 431 - DNA, 20 bp, Homo sapiens
  source 1..20: mol_type = unassigned DNA
catgtgttaggacccgaaag

SEQ ID NO: 432 - DNA, 18 bp, Homo sapiens
  source 1..18: mol_type = unassigned DNA
ccacgcccggggcacccc

SEQ ID NO: 433 - DNA, 21 bp, Homo sapiens
  source 1..21: mol_type = unassigned DNA
ccagccactgctaaatttgac

SEQ ID NO: 434 - DNA, 20 bp, Homo sapiens
  source 1..20: mol_type = unassigned DNA
ccaggacacggacaggattg

SEQ ID NO: 435 - DNA, 20 bp, Homo sapiens
  source 1..20: mol_type = unassigned DNA
ccaggacacggacaggattg

SEQ ID NO: 436 - DNA, 22 bp, Homo sapiens
  source 1..22: mol_type = unassigned DNA
ccagggagcgggggaccaccag

SEQ ID NO: 437 - DNA, 20 bp, Homo sapiens
  source 1..20: mol_type = unassigned DNA
ccagtccgccgagggcgcac

SEQ ID NO: 438 - DNA, 21 bp, Homo sapiens
  source 1..21: mol_type = unassigned DNA
ccatacccccccggccccgtc

SEQ ID NO: 439 - DNA, 21 bp, Homo sapiens
  source 1..21: mol_type = unassigned DNA
cccactgctaaatttgcctgg

SEQ ID NO: 440 - DNA, 21 bp, Homo sapiens
  source 1..21: mol_type = unassigned DNA
cccccaggagtggagcctgcg

SEQ ID NO: 441 - DNA, 21 bp, Homo sapiens
  source 1..21: mol_type = unassigned DNA
cccctactctgatcgtttttt

SEQ ID NO: 442 - DNA, 22 bp, Homo sapiens
  source 1..22: mol_type = unassigned DNA
cccgacccggggaggtagtgac

SEQ ID NO: 443 - DNA, 20 bp, Homo sapiens
  source 1..20: mol_type = unassigned DNA
cccgcactgctaaatttgac

SEQ ID NO: 444 - DNA, 15 bp, Homo sapiens
  source 1..15: mol_type = unassigned DNA
ccctacctactatcc

SEQ ID NO: 445 - DNA, 20 bp, Homo sapiens
  source 1..20: mol_type = unassigned DNA
ccgaagtctttgggttccgg

SEQ ID NO: 446 - DNA, 21 bp, Homo sapiens
  source 1..21: mol_type = unassigned DNA
ccgcaggtgcagatcttggtg

SEQ ID NO: 447 - DNA, 30 bp, Homo sapiens
  source 1..30: mol_type = unassigned DNA
ccgcgcggcgcctcgcctcggccggcgcct

SEQ ID NO: 448 - DNA, 16 bp, Homo sapiens
  source 1..16: mol_type = unassigned DNA
ccgcggagcctcggtt

SEQ ID NO: 449 - DNA, 19 bp, Homo sapiens
  source 1..19: mol_type = unassigned DNA
ccggccccaccggtcccgg

SEQ ID NO: 450 - DNA, 19 bp, Homo sapiens
  source 1..19: mol_type = unassigned DNA
ccggcgggcccgggggagg

SEQ ID NO: 451 - DNA, 19 bp, Homo sapiens
  source 1..19: mol_type = unassigned DNA
ccgtagagggagcctgaga

SEQ ID NO: 452 - DNA, 22 bp, Homo sapiens
  source 1..22: mol_type = unassigned DNA
ccgtccccctaagcgcagaccc

SEQ ID NO: 453 - DNA, 21 bp, Homo sapiens
  source 1..21: mol_type = unassigned DNA
cctttacgactcttagcggtg

SEQ ID NO: 454 - DNA, 20 bp, Homo sapiens
  source 1..20: mol_type = unassigned DNA
cgaggcgtgtgacagcggct

SEQ ID NO: 455 - DNA, 17 bp, Homo sapiens
  source 1..17: mol_type = unassigned DNA
cgagggagcgagacccg

SEQ ID NO: 456 - DNA, 23 bp, Homo sapiens
  source 1..23: mol_type = unassigned DNA
cgcgcaaattacccactcccgac

SEQ ID NO: 457 - DNA, 15 bp, Homo sapiens
  source 1..15: mol_type = unassigned DNA
cgcgcgtgtggtgtg

SEQ ID NO: 458 - DNA, 16 bp, Homo sapiens
  source 1..16: mol_type = unassigned DNA
cgctctgagcgtcgct

SEQ ID NO: 459 - DNA, 29 bp, Homo sapiens
  source 1..29: mol_type = unassigned DNA
cggcggtgcgccgcgaccggctccgggac

SEQ ID NO: 460 - DNA, 18 bp, Homo sapiens
  source 1..18: mol_type = unassigned DNA
cgggtgctgtaggctctg

SEQ ID NO: 461 - DNA, 21 bp, Homo sapiens
  source 1..21: mol_type = unassigned DNA
cgtgggttatctagctgtatg

SEQ ID NO: 462 - DNA, 20 bp, Homo sapiens
  source 1..20: mol_type = unassigned DNA
cgttcccgggtttcggcaga

SEQ ID NO: 463 - DNA, 22 bp, Homo sapiens
  source 1..22: mol_type = unassigned DNA
ctaagggctgggtcgggcgggc

SEQ ID NO: 464 - DNA, 28 bp, Homo sapiens
  source 1..28: mol_type = unassigned DNA
ctagacctcagatcagacgtggcgaccc

SEQ ID NO: 465 - DNA, 20 bp, Homo sapiens
  source 1..20: mol_type = unassigned DNA
ctcaagggagtcgggttcag

SEQ ID NO: 466 - DNA, 21 bp, Homo sapiens
  source 1..21: mol_type = unassigned DNA
ctcaagtcggaggttcgaaga

SEQ ID NO: 467 - DNA, 21 bp, Homo sapiens
  source 1..21: mol_type = unassigned DNA
ctcagttggatcttgggagcg

SEQ ID NO: 468 - DNA, 20 bp, Homo sapiens
  source 1..20: mol_type = unassigned DNA
ctccaccagtcgatgggctg

SEQ ID NO: 469 - DNA, 17 bp, Homo sapiens
  source 1..17: mol_type = unassigned DNA
ctcccatggtgaccacg

SEQ ID NO: 470 - DNA, 18 bp, Homo sapiens
  source 1..18: mol_type = unassigned DNA
ctcctaccgattggatgg

SEQ ID NO: 471 - DNA, 18 bp, Homo sapiens
  source 1..18: mol_type = unassigned DNA
ctccttagaactggtgcg

SEQ ID NO: 472 - DNA, 19 bp, Homo sapiens
  source 1..19: mol_type = unassigned DNA
ctcgataacctcgggccga

SEQ ID NO: 473 - DNA, 22 bp, Homo sapiens
  source 1..22: mol_type = unassigned DNA
ctcgataacctcgggccgatcg

SEQ ID NO: 474 - DNA, 19 bp, Homo sapiens
  source 1..19: mol_type = unassigned DNA
ctcgctggcccttgaaaat

SEQ ID NO: 475 - DNA, 22 bp, Homo sapiens
  source 1..22: mol_type = unassigned DNA
ctcggtttctatctctccatcc

SEQ ID NO: 476 - DNA, 19 bp, Homo sapiens
  source 1..19: mol_type = unassigned DNA
ctctcccccgctccccgcc

SEQ ID NO: 477 - DNA, 20 bp, Homo sapiens
  source 1..20: mol_type = unassigned DNA
ctctctgcctgtttctcttt

SEQ ID NO: 478 - DNA, 16 bp, Homo sapiens
  source 1..16: mol_type = unassigned DNA
ctgcgggatgaaccga

SEQ ID NO: 479 - DNA, 21 bp, Homo sapiens
  source 1..21: mol_type = unassigned DNA
ctgggaaagaagaccctgttg

SEQ ID NO: 480 - DNA, 19 bp, Homo sapiens
  source 1..19: mol_type = unassigned DNA
ctgggattatgactgaacg

SEQ ID NO: 481 - DNA, 18 bp, Homo sapiens
  source 1..18: mol_type = unassigned DNA
ctgtacacaagggtttgt

SEQ ID NO: 482 - DNA, 18 bp, Homo sapiens
  source 1..18: mol_type = unassigned DNA
ctgtagcgtcgggcccat

SEQ ID NO: 483 - DNA, 19 bp, Homo sapiens
  source 1..19: mol_type = unassigned DNA
ctgtgcgtgtgacagcgcc

SEQ ID NO: 484 - DNA, 23 bp, Homo sapiens
  source 1..23: mol_type = unassigned DNA
ctgtgctgtagtgcgctatgccg

SEQ ID NO: 485 - DNA, 22 bp, Homo sapiens
  source 1..22: mol_type = unassigned DNA
ctgtgcttgtgacagcggctgt

SEQ ID NO: 486 - DNA, 21 bp, Homo sapiens
  source 1..21: mol_type = unassigned DNA
ctgtgtgtgtgacagcggctg

SEQ ID NO: 487 - DNA, 16 bp, Homo sapiens
  source 1..16: mol_type = unassigned DNA
ctgttgctgtcggctt

SEQ ID NO: 488 - DNA, 19 bp, Homo sapiens
  source 1..19: mol_type = unassigned DNA
cttctggcgccaagcgccc

SEQ ID NO: 489 - DNA, 22 bp, Homo sapiens
  source 1..22: mol_type = unassigned DNA
ctttggagcgggcgggcggtcc

SEQ ID NO: 490 - DNA, 16 bp, Homo sapiens
  source 1..16: mol_type = unassigned DNA
gaaccatctagtagct

SEQ ID NO: 491 - DNA, 18 bp, Homo sapiens
  source 1..18: mol_type = unassigned DNA
gacaagaactttgaagag

SEQ ID NO: 492 - DNA, 19 bp, Homo sapiens
  source 1..19: mol_type = unassigned DNA
gaccgcacttgcggccccg

SEQ ID NO: 493 - DNA, 28 bp, Homo sapiens
  source 1..28: mol_type = unassigned DNA
gaccgccggtgaaataccactactctga

SEQ ID NO: 494 - DNA, 22 bp, Homo sapiens
  source 1..22: mol_type = unassigned DNA
gacctggtgcggaccaggggaa

SEQ ID NO: 495 - DNA, 17 bp, Homo sapiens
  source 1..17: mol_type = unassigned DNA
gacgcttagcggtggat

SEQ ID NO: 496 - DNA, 17 bp, Homo sapiens
  source 1..17: mol_type = unassigned DNA
gacggaagggcaccacc

SEQ ID NO: 497 - DNA, 21 bp, Homo sapiens
  source 1..21: mol_type = unassigned DNA
gagagttcaagagggcgtgaa

SEQ ID NO: 498 - DNA, 19 bp, Homo sapiens
  source 1..19: mol_type = unassigned DNA
gagcgaaagcatttgccaa

SEQ ID NO: 499 - DNA, 20 bp, Homo sapiens
  source 1..20: mol_type = unassigned DNA
gatgccgacgctcatcagac

SEQ ID NO: 500 - DNA, 19 bp, Homo sapiens
  source 1..19: mol_type = unassigned DNA
gatgggctctaagggctgg

SEQ ID NO: 501 - DNA, 19 bp, Homo sapiens
  source 1..19: mol_type = unassigned DNA
gatttccggggctgcacgc

SEQ ID NO: 502 - DNA, 18 bp, Homo sapiens
  source 1..18: mol_type = unassigned DNA
gatttgttgttgccatgg

SEQ ID NO: 503 - DNA, 18 bp, Homo sapiens
  source 1..18: mol_type = unassigned DNA
gcactggagcgtcgggcc

SEQ ID NO: 504 - DNA, 18 bp, Homo sapiens
  source 1..18: mol_type = unassigned DNA
gcagacttagaactggtg

SEQ ID NO: 505 - DNA, 24 bp, Homo sapiens
  source 1..24: mol_type = unassigned DNA
gcatacttagaactggtgcggacc

SEQ ID NO: 506 - DNA, 21 bp, Homo sapiens
  source 1..21: mol_type = unassigned DNA
gcatcgaggcgtccagtgcgg

SEQ ID NO: 507 - DNA, 23 bp, Homo sapiens
  source 1..23: mol_type = unassigned DNA
gcatgatgatgagcactctgaag

SEQ ID NO: 508 - DNA, 17 bp, Homo sapiens
  source 1..17: mol_type = unassigned DNA
gccatggtaatcctgct

SEQ ID NO: 509 - DNA, 19 bp, Homo sapiens
  source 1..19: mol_type = unassigned DNA
gccccccgtcctcccccct

SEQ ID NO: 510 - DNA, 18 bp, Homo sapiens
  source 1..18: mol_type = unassigned DNA
gcccggaggattcaaccc

SEQ ID NO: 511 - DNA, 22 bp, Homo sapiens
  source 1..22: mol_type = unassigned DNA
gccgcggccggggggcgggcgc

SEQ ID NO: 512 - DNA, 15 bp, Homo sapiens
  source 1..15: mol_type = unassigned DNA
gcctacttagaactg

SEQ ID NO: 513 - DNA, 17 bp, Homo sapiens
  source 1..17: mol_type = unassigned DNA
gcctggcgtggaatgcg

SEQ ID NO: 514 - DNA, 17 bp, Homo sapiens
  source 1..17: mol_type = unassigned DNA
gcgcaccaggggaatcc

SEQ ID NO: 515 - DNA, 16 bp, Homo sapiens
  source 1..16: mol_type = unassigned DNA
gcgcgtcccccgaaga

SEQ ID NO: 516 - DNA, 18 bp, Homo sapiens
  source 1..18: mol_type = unassigned DNA
gcgggcatttatcagatc

SEQ ID NO: 517 - DNA, 20 bp, Homo sapiens
  source 1..20: mol_type = unassigned DNA
gcggtgagccttgaagccta

SEQ ID NO: 518 - DNA, 17 bp, Homo sapiens
  source 1..17: mol_type = unassigned DNA
gcgtaccaggggaatcc

SEQ ID NO: 519 - DNA, 16 bp, Homo sapiens
  source 1..16: mol_type = unassigned DNA
gctcgagcgtcgggcc

SEQ ID NO: 520 - DNA, 19 bp, Homo sapiens
  source 1..19: mol_type = unassigned DNA
gctggcgcgtcgggcccat

SEQ ID NO: 521 - DNA, 19 bp, Homo sapiens
  source 1..19: mol_type = unassigned DNA
ggaaggcagcaggcgcgca

SEQ ID NO: 522 - DNA, 20 bp, Homo sapiens
  source 1..20: mol_type = unassigned DNA
ggagcccgaggcctctccag

SEQ ID NO: 523 - DNA, 21 bp, Homo sapiens
  source 1..21: mol_type = unassigned DNA
ggatcggtcgggcggcggcgg

SEQ ID NO: 524 - DNA, 18 bp, Homo sapiens
  source 1..18: mol_type = unassigned DNA
ggatcgtcgggcccatac

SEQ ID NO: 525 - DNA, 16 bp, Homo sapiens
  source 1..16: mol_type = unassigned DNA
ggattgtgggttcgtg

SEQ ID NO: 526 - DNA, 20 bp, Homo sapiens
  source 1..20: mol_type = unassigned DNA
ggcacggtgaagagacatga

SEQ ID NO: 527 - DNA, 19 bp, Homo sapiens
  source 1..19: mol_type = unassigned DNA
ggccgactcttagcggtgg

SEQ ID NO: 528 - DNA, 22 bp, Homo sapiens
  source 1..22: mol_type = unassigned DNA
ggcgcgcgccttggggaccggg

SEQ ID NO: 529 - DNA, 19 bp, Homo sapiens
  source 1..19: mol_type = unassigned DNA
ggctgggtttcgtacgtag

SEQ ID NO: 530 - DNA, 21 bp, Homo sapiens
  source 1..21: mol_type = unassigned DNA
gggggattatgactgaacgcc

SEQ ID NO: 531 - DNA, 15 bp, Homo sapiens
  source 1..15: mol_type = unassigned DNA
gtatttggatcttgg

SEQ ID NO: 532 - DNA, 22 bp, Homo sapiens
  source 1..22: mol_type = unassigned DNA
gtcccggacacggacaggattg

SEQ ID NO: 533 - DNA, 23 bp, Homo sapiens
  source 1..23: mol_type = unassigned DNA
gtccggggggcggggcggactgt

SEQ ID NO: 534 - DNA, 19 bp, Homo sapiens
  source 1..19: mol_type = unassigned DNA
gtcgagccgggcgtggaat

SEQ ID NO: 535 - DNA, 22 bp, Homo sapiens
  source 1..22: mol_type = unassigned DNA
gtcgcggaccaggggaatccga

SEQ ID NO: 536 - DNA, 15 bp, Homo sapiens
  source 1..15: mol_type = unassigned DNA
gtcggggtttcgtac

SEQ ID NO: 537 - DNA, 25 bp, Homo sapiens
  source 1..25: mol_type = unassigned DNA
gtctcgattcccggtcagggaacca

SEQ ID NO: 538 - DNA, 21 bp, Homo sapiens
  source 1..21: mol_type = unassigned DNA
gtctcgggttcatatcccgga

SEQ ID NO: 539 - DNA, 23 bp, Homo sapiens
  source 1..23: mol_type = unassigned DNA
gtctgggcggcggcggcggcggc

SEQ ID NO: 540 - DNA, 29 bp, Homo sapiens
  source 1..29: mol_type = unassigned DNA
gtctgggtggttcagtggtagaattctcg

SEQ ID NO: 541 - DNA, 19 bp, Homo sapiens
  source 1..19: mol_type = unassigned DNA
gtgaatctgacaacagagg

SEQ ID NO: 542 - DNA, 18 bp, Homo sapiens
  source 1..18: mol_type = unassigned DNA
gtgataactggcttgtgg

SEQ ID NO: 543 - DNA, 16 bp, Homo sapiens
  source 1..16: mol_type = unassigned DNA
gtgatcggggattgca

SEQ ID NO: 544 - DNA, 15 bp, Homo sapiens
  source 1..15: mol_type = unassigned DNA
gtgggcgtcggaggg

SEQ ID NO: 545 - DNA, 19 bp, Homo sapiens
  source 1..19: mol_type = unassigned DNA
gtggttagtaatctgcgtt

SEQ ID NO: 546 - DNA, 19 bp, Homo sapiens
  source 1..19: mol_type = unassigned DNA
gtgtcagtcggtcctgaga

SEQ ID NO: 547 - DNA, 23 bp, Homo sapiens
  source 1..23: mol_type = unassigned DNA
tactttatcacactgatgttgac

SEQ ID NO: 548 - DNA, 15 bp, Homo sapiens
  source 1..15: mol_type = unassigned DNA
tagctggatcttggg

SEQ ID NO: 549 - DNA, 23 bp, Homo sapiens
  source 1..23: mol_type = unassigned DNA
tagcttatcagactgatgttctc

SEQ ID NO: 550 - DNA, 22 bp, Homo sapiens
  source 1..22: mol_type = unassigned DNA
tcaactgctcagactcctgtgg

SEQ ID NO: 551 - DNA, 18 bp, Homo sapiens
  source 1..18: mol_type = unassigned DNA
tcagccggcccggacacg

SEQ ID NO: 552 - DNA, 18 bp, Homo sapiens
  source 1..18: mol_type = unassigned DNA
tcagtcattccaccggag

SEQ ID NO: 553 - DNA, 23 bp, Homo sapiens
  source 1..23: mol_type = unassigned DNA
tcagtgtttatctagctgtatga

SEQ ID NO: 554 - DNA, 23 bp, Homo sapiens
  source 1..23: mol_type = unassigned DNA
tcccgccgtcgggcccgggggag

SEQ ID NO: 555 - DNA, 19 bp, Homo sapiens
  source 1..19: mol_type = unassigned DNA
tccgacgactcttagcggt

SEQ ID NO: 556 - DNA, 23 bp, Homo sapiens
  source 1..23: mol_type = unassigned DNA
tccgacgactcttagcggtggat

SEQ ID NO: 557 - DNA, 24 bp, Homo sapiens
  source 1..24: mol_type = unassigned DNA
tccgatggtagtgggttatcagaa

SEQ ID NO: 558 - DNA, 20 bp, Homo sapiens
  source 1..20: mol_type = unassigned DNA
tccgcccagtgctctgaatg

SEQ ID NO: 559 - DNA, 18 bp, Homo sapiens
  source 1..18: mol_type = unassigned DNA
tccggcgagggagcctga

SEQ ID NO: 560 - DNA, 22 bp, Homo sapiens
  source 1..22: mol_type = unassigned DNA
tccgggcactacagacctttgt

SEQ ID NO: 561 - DNA, 21 bp, Homo sapiens
  source 1..21: mol_type = unassigned DNA
tctgtgtttatctagctgtat

SEQ ID NO: 562 - DNA, 21 bp, Homo sapiens
  source 1..21: mol_type = unassigned DNA
tctgtgtttatctagctgtat

SEQ ID NO: 563 - DNA, 21 bp, Homo sapiens
  source 1..21: mol_type = unassigned DNA
tgaaagaaaactattctgagc

SEQ ID NO: 564 - DNA, 21 bp, Homo sapiens
  source 1..21: mol_type = unassigned DNA
tgaaggacacattgatcatcg

SEQ ID NO: 565 - DNA, 21 bp, Homo sapiens
  source 1..21: mol_type = unassigned DNA
tgacggagagggagcctgaga

SEQ ID NO: 566 - DNA, 24 bp, Homo sapiens
  source 1..24: mol_type = unassigned DNA
tgagccatggttgtctgagcatgc

SEQ ID NO: 567 - DNA, 29 bp, Homo sapiens
  source 1..29: mol_type = unassigned DNA
tgatgtaatgattctgccaaatgaaatat

SEQ ID NO: 568 - DNA, 21 bp, Homo sapiens
  source 1..21: mol_type = unassigned DNA
tgcctctagtctggcacggtg

SEQ ID NO: 569 - DNA, 20 bp, Homo sapiens
  source 1..20: mol_type = unassigned DNA
tgcgtggggaacctggcgct

SEQ ID NO: 570 - DNA, 16 bp, Homo sapiens
  source 1..16: mol_type = unassigned DNA
tgctagtgtgctgatg

SEQ ID NO: 571 - DNA, 22 bp, Homo sapiens
  source 1..22: mol_type = unassigned DNA
tggaacaatgtaggtaagggaa

SEQ ID NO: 572 - DNA, 21 bp, Homo sapiens
  source 1..21: mol_type = unassigned DNA
tggactgagccatgctactgg

SEQ ID NO: 573 - DNA, 21 bp, Homo sapiens
  source 1..21: mol_type = unassigned DNA
tggtgcgtcgggcccataccc

SEQ ID NO: 574 - DNA, 25 bp, Homo sapiens
  source 1..25: mol_type = unassigned DNA
tgtggcaatggtagacctcacactg

SEQ ID NO: 575 - DNA, 26 bp, Homo sapiens
  source 1..26: mol_type = unassigned DNA
tgtggcaatggtagacctcacactgg

SEQ ID NO: 576 - DNA, 19 bp, Homo sapiens
  source 1..19: mol_type = unassigned DNA
ttaccagactgatgttgac

SEQ ID NO: 577 - DNA, 20 bp, Homo sapiens
  source 1..20: mol_type = unassigned DNA
ttacggagagggagcctgag

SEQ ID NO: 578 - DNA, 18 bp, Homo sapiens
  source 1..18: mol_type = unassigned DNA
ttatcatactgatgttga

SEQ ID NO: 579 - DNA, 21 bp, Homo sapiens
  source 1..21: mol_type = unassigned DNA
ttcaatgtttaggaccactaa

SEQ ID NO: 580 - DNA, 21 bp, Homo sapiens
  source 1..21: mol_type = unassigned DNA
ttccagtgtcttagctggttg

SEQ ID NO: 581 - DNA, 18 bp, Homo sapiens
  source 1..18: mol_type = unassigned DNA
ttcccagactgatgttga

SEQ ID NO: 582 - DNA, 21 bp, Homo sapiens
  source 1..21: mol_type = unassigned DNA
ttcgtctttgcgggcgagatg

SEQ ID NO: 583 - DNA, 23 bp, Homo sapiens
  source 1..23: mol_type = unassigned DNA
ttcgtgcatttatcagatcaaaa

SEQ ID NO: 584 - DNA, 21 bp, Homo sapiens
  source 1..21: mol_type = unassigned DNA
ttcgtttacgttgggagaact

SEQ ID NO: 585 - DNA, 22 bp, Homo sapiens
  source 1..22: mol_type = unassigned DNA
ttcgtttacgttgggagaactt

SEQ ID NO: 586 - DNA, 16 bp, Homo sapiens
  source 1..16: mol_type = unassigned DNA
ttctgaccaggggaat

SEQ ID NO: 587 - DNA, 18 bp, Homo sapiens
  source 1..18: mol_type = unassigned DNA
ttctgaccaggggaatcc

SEQ ID NO: 588 - DNA, 19 bp, Homo sapiens
  source 1..19: mol_type = unassigned DNA
ttctggataaggattggct

SEQ ID NO: 589 - DNA, 23 bp, Homo sapiens
  source 1..23: mol_type = unassigned DNA
ttctttatcagactgatgtggac

SEQ ID NO: 590 - DNA, 17 bp, Homo sapiens
  source 1..17: mol_type = unassigned DNA
ttgagccgggcgtggaa

SEQ ID NO: 591 - DNA, 18 bp, Homo sapiens
  source 1..18: mol_type = unassigned DNA
ttgcctctaagggctggg

SEQ ID NO: 592 - DNA, 22 bp, Homo sapiens
  source 1..22: mol_type = unassigned DNA
ttggattatgactgaacgcctc

SEQ ID NO: 593 - DNA, 20 bp, Homo sapiens
  source 1..20: mol_type = unassigned DNA
ttttgtgtgcgtcggagggc

SEQ ID NO: 594 - DNA, 22 bp, Homo sapiens
  source 1..22: mol_type = unassigned DNA
aaaagctgggttgcgagggaat

SEQ ID NO: 595 - DNA, 19 bp, Homo sapiens
  source 1..19: mol_type = unassigned DNA
aaaatggcggattcctcgg

SEQ ID NO: 596 - DNA, 18 bp, Homo sapiens
  source 1..18: mol_type = unassigned DNA
aaagagcgcccggacctg

SEQ ID NO: 597 - DNA, 19 bp, Homo sapiens
  source 1..19: mol_type = unassigned DNA
aacggggcgcggccggaaa

SEQ ID NO: 598 - DNA, 21 bp, Homo sapiens
  source 1..21: mol_type = unassigned DNA
aactccagagaggccgggcag

SEQ ID NO: 599 - DNA, 17 bp, Homo sapiens
  source 1..17: mol_type = unassigned DNA
aactgaggctctgagga

SEQ ID NO: 600 - DNA, 20 bp, Homo sapiens
  source 1..20: mol_type = unassigned DNA
aagaaaaggaccagggaagg

SEQ ID NO: 601 - DNA, 19 bp, Homo sapiens
  source 1..19: mol_type = unassigned DNA
aagaaagtcgacagagaca

SEQ ID NO: 602 - DNA, 17 bp, Homo sapiens
  source 1..17: mol_type = unassigned DNA
aagatcgcgggcagatg

SEQ ID NO: 603 - DNA, 21 bp, Homo sapiens
  source 1..21: mol_type = unassigned DNA
aagatgatcaggttgataggt

SEQ ID NO: 604 - DNA, 27 bp, Homo sapiens
  source 1..27: mol_type = unassigned DNA
aagcagatctaaggatgagtatgagaa

SEQ ID NO: 605 - DNA, 22 bp, Homo sapiens
  source 1..22: mol_type = unassigned DNA
aagctcagcagggtcgggcctg

SEQ ID NO: 606 - DNA, 21 bp, Homo sapiens
  source 1..21: mol_type = unassigned DNA
aaggcagggcccccgctccat

SEQ ID NO: 607 - DNA, 17 bp, Homo sapiens
  source 1..17: mol_type = unassigned DNA
aaggtcagggcccaggg

SEQ ID NO: 608 - DNA, 21 bp, Homo sapiens
  source 1..21: mol_type = unassigned DNA
aagtgattctcctgcctcagc

SEQ ID NO: 609 - DNA, 19 bp, Homo sapiens
  source 1..19: mol_type = unassigned DNA
aagtgcacttggacgaaaa

SEQ ID NO: 610 - DNA, 23 bp, Homo sapiens
  source 1..23: mol_type = unassigned DNA
aataccgggtgctgtaggctctg

SEQ ID NO: 611 - DNA, 19 bp, Homo sapiens
  source 1..19: mol_type = unassigned DNA
aataccgggtggtgtaggc

SEQ ID NO: 612 - DNA, 21 bp, Homo sapiens
  source 1..21: mol_type = unassigned DNA
aataccgggtggtgtaggcta

SEQ ID NO: 613 - DNA, 19 bp, Homo sapiens
  source 1..19: mol_type = unassigned DNA
aatcggtcgtccgccctgg

SEQ ID NO: 614 - DNA, 17 bp, Homo sapiens
  source 1..17: mol_type = unassigned DNA
aatggctggcgctggag

SEQ ID NO: 615 - DNA, 16 bp, Homo sapiens
  source 1..16: mol_type = unassigned DNA
acagaaacctcccgtg

SEQ ID NO: 616 - DNA, 19 bp, Homo sapiens
  source 1..19: mol_type = unassigned DNA
acagatcgactatgttgat

SEQ ID NO: 617 - DNA, 16 bp, Homo sapiens
  source 1..16: mol_type = unassigned DNA
acagtccgccgatctg

SEQ ID NO: 618 - DNA, 15 bp, Homo sapiens
  source 1..15: mol_type = unassigned DNA
acccccgggcgcctg

SEQ ID NO: 619 - DNA, 20 bp, Homo sapiens
  source 1..20: mol_type = unassigned DNA
accctgctcgctgcgcctat

SEQ ID NO: 620 - DNA, 18 bp, Homo sapiens
  source 1..18: mol_type = unassigned DNA
accctggtcgcactgctg

SEQ ID NO: 621 - DNA, 22 bp, Homo sapiens
  source 1..22: mol_type = unassigned DNA
accgacgtcggcgcgggctgca

SEQ ID NO: 622 - DNA, 22 bp, Homo sapiens
  source 1..22: mol_type = unassigned DNA
acctcagatcggacgtggcgac

SEQ ID NO: 623 - DNA, 22 bp, Homo sapiens
  source 1..22: mol_type = unassigned DNA
acctcgccgtcccgcccgccgc

SEQ ID NO: 624 - DNA, 20 bp, Homo sapiens
  source 1..20: mol_type = unassigned DNA
acgatgaaggtcttcggatt

SEQ ID NO: 625 - DNA, 20 bp, Homo sapiens
  source 1..20: mol_type = unassigned DNA
acgccagggtagtggatagg

SEQ ID NO: 626 - DNA, 18 bp, Homo sapiens
  source 1..18: mol_type = unassigned DNA
acgcctcctcccctcctg

SEQ ID NO: 627 - DNA, 20 bp, Homo sapiens
  source 1..20: mol_type = unassigned DNA
acgctcgtgaaggaactctg

SEQ ID NO: 628 - DNA, 20 bp, Homo sapiens
  source 1..20: mol_type = unassigned DNA
acggctgtggggcagagaag

SEQ ID NO: 629 - DNA, 17 bp, Homo sapiens
  source 1..17: mol_type = unassigned DNA
acgtcggctgctgggaa

SEQ ID NO: 630 - DNA, 20 bp, Homo sapiens
  source 1..20: mol_type = unassigned DNA
actaccagggccggaggatt

SEQ ID NO: 631 - DNA, 18 bp, Homo sapiens
  source 1..18: mol_type = unassigned DNA
actactgcacttgcctag

SEQ ID NO: 632 - DNA, 20 bp, Homo sapiens
  source 1..20: mol_type = unassigned DNA
actagaactcagaattaaga

SEQ ID NO: 633 - DNA, 21 bp, Homo sapiens
  source 1..21: mol_type = unassigned DNA
actcagaggccagcggaccgg

SEQ ID NO: 634 - DNA, 21 bp, Homo sapiens
  source 1..21: mol_type = unassigned DNA
actcagcttcggacaccctgg

SEQ ID NO: 635 - DNA, 19 bp, Homo sapiens
  source 1..19: mol_type = unassigned DNA
actccctggggttggccgg

SEQ ID NO: 636 - DNA, 19 bp, Homo sapiens
  source 1..19: mol_type = unassigned DNA
actcgatcctaagacatag

SEQ ID NO: 637 - DNA, 18 bp, Homo sapiens
  source 1..18: mol_type = unassigned DNA
actgccgggtactgatgg

SEQ ID NO: 638 - DNA, 21 bp, Homo sapiens
  source 1..21: mol_type = unassigned DNA
actgtctggtcttctgcttgt

SEQ ID NO: 639 - DNA, 21 bp, Homo sapiens
  source 1..21: mol_type = unassigned DNA
actgtgatgagcttctgcagt

SEQ ID NO: 640 - DNA, 21 bp, Homo sapiens
  source 1..21: mol_type = unassigned DNA
agaagatgggcagggctgtgg

SEQ ID NO: 641 - DNA, 20 bp, Homo sapiens
  source 1..20: mol_type = unassigned DNA
agagaacgcggtctggtggt

SEQ ID NO: 642 - DNA, 21 bp, Homo sapiens
  source 1..21: mol_type = unassigned DNA
agcagtggaagaagactgaat

SEQ ID NO: 643 - DNA, 21 bp, Homo sapiens
  source 1..21: mol_type = unassigned DNA
agcgccggagaggaccactga

SEQ ID NO: 644 - DNA, 20 bp, Homo sapiens
  source 1..20: mol_type = unassigned DNA
agcggtggtctgtggagctc

SEQ ID NO: 645 - DNA, 23 bp, Homo sapiens
  source 1..23: mol_type = unassigned DNA
agctccggggagagcatttgact

SEQ ID NO: 646 - DNA, 18 bp, Homo sapiens
  source 1..18: mol_type = unassigned DNA
agctggccgggttggagg

SEQ ID NO: 647 - DNA, 19 bp, Homo sapiens
  source 1..19: mol_type = unassigned DNA
agctgtggtctctgagaga

SEQ ID NO: 648 - DNA, 15 bp, Homo sapiens
  source 1..15: mol_type = unassigned DNA
agcttgactgtgaga

SEQ ID NO: 649 - DNA, 19 bp, Homo sapiens
  source 1..19: mol_type = unassigned DNA
aggactgtgagccggctgc

SEQ ID NO: 650 - DNA, 21 bp, Homo sapiens
  source 1..21: mol_type = unassigned DNA
aggagctctgggcccacccat

SEQ ID NO: 651 - DNA, 18 bp, Homo sapiens
  source 1..18: mol_type = unassigned DNA
aggagctggaggatctgg

SEQ ID NO: 652 - DNA, 18 bp, Homo sapiens
  source 1..18: mol_type = unassigned DNA
aggaggtcgtcgtggcgc

SEQ ID NO: 653 - DNA, 19 bp, Homo sapiens
  source 1..19: mol_type = unassigned DNA
aggccaagagcaggagaga

SEQ ID NO: 654 - DNA, 19 bp, Homo sapiens
  source 1..19: mol_type = unassigned DNA
aggccgagagcgaagcgcg

SEQ ID NO: 655 - DNA, 20 bp, Homo sapiens
  source 1..20: mol_type = unassigned DNA
aggcctgcagcgaactctgg

SEQ ID NO: 656 - DNA, 20 bp, Homo sapiens
  source 1..20: mol_type = unassigned DNA
aggcggacggactgaggctg

SEQ ID NO: 657 - DNA, 19 bp, Homo sapiens
  source 1..19: mol_type = unassigned DNA
aggctgtaggcaccacgca

SEQ ID NO: 658 - DNA, 18 bp, Homo sapiens
  source 1..18: mol_type = unassigned DNA
agggaacctgggctgcag

SEQ ID NO: 659 - DNA, 19 bp, Homo sapiens
  source 1..19: mol_type = unassigned DNA
agggactgacgggggcatt

SEQ ID NO: 660 - DNA, 23 bp, Homo sapiens
  source 1..23: mol_type = unassigned DNA
agggactgtggcctcggcggtat

SEQ ID NO: 661 - DNA, 18 bp, Homo sapiens
  source 1..18: mol_type = unassigned DNA
agggagagagtcggacga

SEQ ID NO: 662 - DNA, 19 bp, Homo sapiens
  source 1..19: mol_type = unassigned DNA
agggattgtggagctctgg

SEQ ID NO: 663 - DNA, 21 bp, Homo sapiens
  source 1..21: mol_type = unassigned DNA
agggccccccctcaatcccgt

SEQ ID NO: 664 - DNA, 15 bp, Homo sapiens
  source 1..15: mol_type = unassigned DNA
agggccgtcgcggtg

SEQ ID NO: 665 - DNA, 22 bp, Homo sapiens
  source 1..22: mol_type = unassigned DNA
agggctgcgcattgcactggcc

SEQ ID NO: 666 - DNA, 18 bp, Homo sapiens
  source 1..18: mol_type = unassigned DNA
agggctgcggcagggact

SEQ ID NO: 667 - DNA, 21 bp, Homo sapiens
  source 1..21: mol_type = unassigned DNA
agggtgaaggatgtcggttgg

SEQ ID NO: 668 - DNA, 18 bp, Homo sapiens
  source 1..18: mol_type = unassigned DNA
agggttcgtgactggggt

SEQ ID NO: 669 - DNA, 19 bp, Homo sapiens
  source 1..19: mol_type = unassigned DNA
aggtcgcggagagaagggg

SEQ ID NO: 670 - DNA, 18 bp, Homo sapiens
  source 1..18: mol_type = unassigned DNA
aggtcggcagggctggtg

SEQ ID NO: 671 - DNA, 19 bp, Homo sapiens
  source 1..19: mol_type = unassigned DNA
aggtgatcgagagaactct

SEQ ID NO: 672 - DNA, 18 bp, Homo sapiens
  source 1..18: mol_type = unassigned DNA
aggtggacccgggctgtg

SEQ ID NO: 673 - DNA, 19 bp, Homo sapiens
  source 1..19: mol_type = unassigned DNA
aggtggtgggactgggggc

SEQ ID NO: 674 - DNA, 18 bp, Homo sapiens
  source 1..18: mol_type = unassigned DNA
agtccacgatctggtcac

SEQ ID NO: 675 - DNA, 19 bp, Homo sapiens
  source 1..19: mol_type = unassigned DNA
agtccgacgatctgatcca

SEQ ID NO: 676 - DNA, 20 bp, Homo sapiens
  source 1..20: mol_type = unassigned DNA
agtcgaacgcttggccagat

SEQ ID NO: 677 - DNA, 23 bp, Homo sapiens
  source 1..23: mol_type = unassigned DNA
agtcgcaggagcagccgcagtag

SEQ ID NO: 678 - DNA, 21 bp, Homo sapiens
  source 1..21: mol_type = unassigned DNA
ataatactgccgggtaatgat

SEQ ID NO: 679 - DNA, 20 bp, Homo sapiens
  source 1..20: mol_type = unassigned DNA
ataccggttgctgtaggcta

SEQ ID NO: 680 - DNA, 20 bp, Homo sapiens
  source 1..20: mol_type = unassigned DNA
ataggaaaccgaactcatgc

SEQ ID NO: 681 - DNA, 19 bp, Homo sapiens
  source 1..19: mol_type = unassigned DNA
atatcgccgggccggccgc

SEQ ID NO: 682 - DNA, 18 bp, Homo sapiens
  source 1..18: mol_type = unassigned DNA
atcgaggcccagcccgtg

SEQ ID NO: 683 - DNA, 25 bp, Homo sapiens
  source 1..25: mol_type = unassigned DNA
atgccatcacggcagcgctctgacc

SEQ ID NO: 684 - DNA, 20 bp, Homo sapiens
  source 1..20: mol_type = unassigned DNA
atgcgaaccgcgtggctggg

SEQ ID NO: 685 - DNA, 21 bp, Homo sapiens
  source 1..21: mol_type = unassigned DNA
atgctatgactgtatcttgat

SEQ ID NO: 686 - DNA, 20 bp, Homo sapiens
  source 1..20: mol_type = unassigned DNA
atgctcaacatctccccctt

SEQ ID NO: 687 - DNA, 16 bp, Homo sapiens
  source 1..16: mol_type = unassigned DNA
atggagccgggcgtgg

SEQ ID NO: 688 - DNA, 20 bp, Homo sapiens
  source 1..20: mol_type = unassigned DNA
atggcagccaggtagtcagg

SEQ ID NO: 689 - DNA, 20 bp, Homo sapiens
  source 1..20: mol_type = unassigned DNA
atgggcgagcgccgttccga

SEQ ID NO: 690 - DNA, 21 bp, Homo sapiens
  source 1..21: mol_type = unassigned DNA
atgtgcggacgccgggagctt

SEQ ID NO: 691 - DNA, 19 bp, Homo sapiens
  source 1..19: mol_type = unassigned DNA
attaataaattctgatcag

SEQ ID NO: 692 - DNA, 19 bp, Homo sapiens
  source 1..19: mol_type = unassigned DNA
attccagggttcggttgcg

SEQ ID NO: 693 - DNA, 28 bp, Homo sapiens
  source 1..28: mol_type = unassigned DNA
attggctctaagggctgggtcgggcggg

SEQ ID NO: 694 - DNA, 23 bp, Homo sapiens
  source 1..23: mol_type = unassigned DNA
attggtggctctcgccgggcagc

SEQ ID NO: 695 - DNA, 16 bp, Homo sapiens
  source 1..16: mol_type = unassigned DNA
caaacgagcactttga

SEQ ID NO: 696 - DNA, 17 bp, Homo sapiens
  source 1..17: mol_type = unassigned DNA
caacatctctgccaagt

SEQ ID NO: 697 - DNA, 21 bp, Homo sapiens
  source 1..21: mol_type = unassigned DNA
caacccagatcacccgctaag

SEQ ID NO: 698 - DNA, 19 bp, Homo sapiens
  source 1..19: mol_type = unassigned DNA
caagaaccgagagctcttc

SEQ ID NO: 699 - DNA, 24 bp, Homo sapiens
  source 1..24: mol_type = unassigned DNA
caagccggatccgtaccttcggga

SEQ ID NO: 700 - DNA, 21 bp, Homo sapiens
  source 1..21: mol_type = unassigned DNA
caaggaagaagtgggctgaag

SEQ ID NO: 701 - DNA, 18 bp, Homo sapiens
  source 1..18: mol_type = unassigned DNA
caaggcgacgatctgtag

SEQ ID NO: 702 - DNA, 16 bp, Homo sapiens
  source 1..16: mol_type = unassigned DNA
caagtgttggattgtt

SEQ ID NO: 703 - DNA, 20 bp, Homo sapiens
  source 1..20: mol_type = unassigned DNA
caataccccgccatgacgac

SEQ ID NO: 704 - DNA, 21 bp, Homo sapiens
  source 1..21: mol_type = unassigned DNA
cacaccggatgtcatctttgt

SEQ ID NO: 705 - DNA, 18 bp, Homo sapiens
  source 1..18: mol_type = unassigned DNA
cacagaggccggggagag

SEQ ID NO: 706 - DNA, 20 bp, Homo sapiens
  source 1..20: mol_type = unassigned DNA
caccaagatctctgatgcac

SEQ ID NO: 707 - DNA, 30 bp, Homo sapiens
  source 1..30: mol_type = unassigned DNA
caccgtgatgaccaggtcggtctcaaattt

SEQ ID NO: 708 - DNA, 18 bp, Homo sapiens
  source 1..18: mol_type = unassigned DNA
cacctcgcggactccatg

SEQ ID NO: 709 - DNA, 23 bp, Homo sapiens
  source 1..23: mol_type = unassigned DNA
cacctgacctcccctgcctgtgt

SEQ ID NO: 710 - DNA, 18 bp, Homo sapiens
  source 1..18: mol_type = unassigned DNA
cacgatccttctgacctt

SEQ ID NO: 711 - DNA, 17 bp, Homo sapiens
  source 1..17: mol_type = unassigned DNA
cacgcgtcgggccccca

SEQ ID NO: 712 - DNA, 19 bp, Homo sapiens
  source 1..19: mol_type = unassigned DNA
cactgccccaggtgctgct

SEQ ID NO: 713 - DNA, 20 bp, Homo sapiens
  source 1..20: mol_type = unassigned DNA
cactgggactgagccacggc

SEQ ID NO: 714 - DNA, 20 bp, Homo sapiens
  source 1..20: mol_type = unassigned DNA
cagaaggaaggattgtgggg

SEQ ID NO: 715 - DNA, 17 bp, Homo sapiens
  source 1..17: mol_type = unassigned DNA
cagcagcactcgccgaa

SEQ ID NO: 716 - DNA, 20 bp, Homo sapiens
  source 1..20: mol_type = unassigned DNA
cagctccagaaccgactccg

SEQ ID NO: 717 - DNA, 22 bp, Homo sapiens
  source 1..22: mol_type = unassigned DNA
cagctccctcgctgcgatctat

SEQ ID NO: 718 - DNA, 21 bp, Homo sapiens
  source 1..21: mol_type = unassigned DNA
cagctgtagatttcaacttag

SEQ ID NO: 719 - DNA, 20 bp, Homo sapiens
  source 1..20: mol_type = unassigned DNA
caggagcgagcagccaaggg

SEQ ID NO: 720 - DNA, 17 bp, Homo sapiens
  source 1..17: mol_type = unassigned DNA
caggcggctcggactga

SEQ ID NO: 721 - DNA, 20 bp, Homo sapiens
  source 1..20: mol_type = unassigned DNA
cagtccgaccatctggtcac

SEQ ID NO: 722 - DNA, 20 bp, Homo sapiens
  source 1..20: mol_type = unassigned DNA
catacagactaggccgggcg

SEQ ID NO: 723 - DNA, 18 bp, Homo sapiens
  source 1..18: mol_type = unassigned DNA
catcccggacgagccctg

SEQ ID NO: 724 - DNA, 18 bp, Homo sapiens
  source 1..18: mol_type = unassigned DNA
catccgacgatctggtca

SEQ ID NO: 725 - DNA, 21 bp, Homo sapiens
  source 1..21: mol_type = unassigned DNA
catgcaagtcgagcggacttt

SEQ ID NO: 726 - DNA, 26 bp, Homo sapiens
  source 1..26: mol_type = unassigned DNA
catgctgacctccctcctgccccaaa

SEQ ID NO: 727 - DNA, 21 bp, Homo sapiens
  source 1..21: mol_type = unassigned DNA
catgggtcggaaaaaaggatt

SEQ ID NO: 728 - DNA, 18 bp, Homo sapiens
  source 1..18: mol_type = unassigned DNA
catgtggatgactctgtg

SEQ ID NO: 729 - DNA, 19 bp, Homo sapiens
  source 1..19: mol_type = unassigned DNA
cattgcactccggatgtgc

SEQ ID NO: 730 - DNA, 19 bp, Homo sapiens
  source 1..19: mol_type = unassigned DNA
ccaagatcggggacccggc

SEQ ID NO: 731 - DNA, 18 bp, Homo sapiens
  source 1..18: mol_type = unassigned DNA
ccacgaggtctgagtggt

SEQ ID NO: 732 - DNA, 24 bp, Homo sapiens
  source 1..24: mol_type = unassigned DNA
ccactaataaacatagtagtctta

SEQ ID NO: 733 - DNA, 30 bp, Homo sapiens
  source 1..30: mol_type = unassigned DNA
ccaggcggcccgggttcgtctcccggtgtg

SEQ ID NO: 734 - DNA, 17 bp, Homo sapiens
  source 1..17: mol_type = unassigned DNA
ccattgatgatcgttct

SEQ ID NO: 735 - DNA, 21 bp, Homo sapiens
  source 1..21: mol_type = unassigned DNA
cccaccgcggacagagcctga

SEQ ID NO: 736 - DNA, 15 bp, Homo sapiens
  source 1..15: mol_type = unassigned DNA
cccacctcggcctcc

SEQ ID NO: 737 - DNA, 20 bp, Homo sapiens
  source 1..20: mol_type = unassigned DNA
cccagaactccggccgtgtg

SEQ ID NO: 738 - DNA, 29 bp, Homo sapiens
  source 1..29: mol_type = unassigned DNA
cccagaagtccaagttatggaagatctcg

SEQ ID NO: 739 - DNA, 18 bp, Homo sapiens
  source 1..18: mol_type = unassigned DNA
cccccgccgcccctccta

SEQ ID NO: 740 - DNA, 21 bp, Homo sapiens
  source 1..21: mol_type = unassigned DNA
cccccgccgcccctcctccta

SEQ ID NO: 741 - DNA, 19 bp, Homo sapiens
  source 1..19: mol_type = unassigned DNA
cccgccggggcccgtcgta

SEQ ID NO: 742 - DNA, 21 bp, Homo sapiens
  source 1..21: mol_type = unassigned DNA
cccgcgtcggctgcgcagcgc

SEQ ID NO: 743 - DNA, 20 bp, Homo sapiens
  source 1..20: mol_type = unassigned DNA
cccgctggtgaggactcgcg

SEQ ID NO: 744 - DNA, 20 bp, Homo sapiens
  source 1..20: mol_type = unassigned DNA
cccgggtcgagcatgtagcg

SEQ ID NO: 745 - DNA, 18 bp, Homo sapiens
  source 1..18: mol_type = unassigned DNA
cccgtccgtccgtccgta

SEQ ID NO: 746 - DNA, 28 bp, Homo sapiens
  source 1..28: mol_type = unassigned DNA
ccctgaggatgacagaataagaactgag

SEQ ID NO: 747 - DNA, 22 bp, Homo sapiens
  source 1..22: mol_type = unassigned DNA
ccctgggccggggaggagtgga

SEQ ID NO: 748 - DNA, 21 bp, Homo sapiens
  source 1..21: mol_type = unassigned DNA
cccttcctggccgccgggctg

SEQ ID NO: 749 - DNA, 17 bp, Homo sapiens
  source 1..17: mol_type = unassigned DNA
ccgaatccggagtggcg

SEQ ID NO: 750 - DNA, 16 bp, Homo sapiens
  source 1..16: mol_type = unassigned DNA
ccgccccccggccccc

SEQ ID NO: 751 - DNA, 18 bp, Homo sapiens
  source 1..18: mol_type = unassigned DNA
ccggcagattgtctctgg

SEQ ID NO: 752 - DNA, 17 bp, Homo sapiens
  source 1..17: mol_type = unassigned DNA
ccgttcccccctcctat

SEQ ID NO: 753 - DNA, 17 bp, Homo sapiens
  source 1..17: mol_type = unassigned DNA
ccgttcccccctcctta

SEQ ID NO: 754 - DNA, 21 bp, Homo sapiens
  source 1..21: mol_type = unassigned DNA
ccgtttcgccggactcttcgc

SEQ ID NO: 755 - DNA, 23 bp, Homo sapiens
  source 1..23: mol_type = unassigned DNA
cctaccttgagcacatctttgag

SEQ ID NO: 756 - DNA, 25 bp, Homo sapiens
  source 1..25: mol_type = unassigned DNA
cctagtcaagggttagatttttatt

SEQ ID NO: 757 - DNA, 30 bp, Homo sapiens
  source 1..30: mol_type = unassigned DNA
cctcactgagatcagggacatgttgctggc

SEQ ID NO: 758 - DNA, 23 bp, Homo sapiens
  source 1..23: mol_type = unassigned DNA
cctgctggtcccactggagctcg

SEQ ID NO: 759 - DNA, 19 bp, Homo sapiens
  source 1..19: mol_type = unassigned DNA
cctggcggccgggggcgat

SEQ ID NO: 760 - DNA, 15 bp, Homo sapiens
  source 1..15: mol_type = unassigned DNA
ccttcgtcctgggaa

SEQ ID NO: 761 - DNA, 19 bp, Homo sapiens
  source 1..19: mol_type = unassigned DNA
cgaatacagaccgtgaaag

SEQ ID NO: 762 - DNA, 22 bp, Homo sapiens
  source 1..22: mol_type = unassigned DNA
cgagagggcgcgagcggcggcg

SEQ ID NO: 763 - DNA, 18 bp, Homo sapiens
  source 1..18: mol_type = unassigned DNA
cgaggccgcggcggaggc

SEQ ID NO: 764 - DNA, 20 bp, Homo sapiens
  source 1..20: mol_type = unassigned DNA
cgagttgttgcctgggctgg

SEQ ID NO: 765 - DNA, 20 bp, Homo sapiens
  source 1..20: mol_type = unassigned DNA
cgatcgccgccgggacctga

SEQ ID NO: 766 - DNA, 21 bp, Homo sapiens
  source 1..21: mol_type = unassigned DNA
cgcacagttaactggaactct

SEQ ID NO: 767 - DNA, 24 bp, Homo sapiens
  source 1..24: mol_type = unassigned DNA
cgccgcggggccggcggcgggggc

SEQ ID NO: 768 - DNA, 19 bp, Homo sapiens
  source 1..19: mol_type = unassigned DNA
cgcctagcagccgacttcg

SEQ ID NO: 769 - DNA, 22 bp, Homo sapiens
  source 1..22: mol_type = unassigned DNA
cgcgccaggcagtcgtcggtaa

SEQ ID NO: 770 - DNA, 20 bp, Homo sapiens
  source 1..20: mol_type = unassigned DNA
cgcgctgaggctccaggacc

SEQ ID NO: 771 - DNA, 18 bp, Homo sapiens
  source 1..18: mol_type = unassigned DNA
cgcggactggggcggcca

SEQ ID NO: 772 - DNA, 25 bp, Homo sapiens
  source 1..25: mol_type = unassigned DNA
cgcggcggccgtcgggtgggggcgt

SEQ ID NO: 773 - DNA, 19 bp, Homo sapiens
  source 1..19: mol_type = unassigned DNA
cgcgggcgggcgcgacgga

SEQ ID NO: 774 - DNA, 27 bp, Homo sapiens
  source 1..27: mol_type = unassigned DNA
cgcggggatgcgaactggagtctgagc

SEQ ID NO: 775 - DNA, 30 bp, Homo sapiens
  source 1..30: mol_type = unassigned DNA
cggagggcggcggcggcggcgggggggtgg

SEQ ID NO: 776 - DNA, 21 bp, Homo sapiens
  source 1..21: mol_type = unassigned DNA
cggaggttcgaagacgatccg

SEQ ID NO: 777 - DNA, 23 bp, Homo sapiens
  source 1..23: mol_type = unassigned DNA
cggatcgccggtcccccgcctgt

SEQ ID NO: 778 - DNA, 22 bp, Homo sapiens
  source 1..22: mol_type = unassigned DNA
cggatcgcgtgggtagaaggtc

SEQ ID NO: 779 - DNA, 15 bp, Homo sapiens
  source 1..15: mol_type = unassigned DNA
cggccgcgtcggggc

SEQ ID NO: 780 - DNA, 19 bp, Homo sapiens
  source 1..19: mol_type = unassigned DNA
cggcgcacccccgcgggga

SEQ ID NO: 781 - DNA, 21 bp, Homo sapiens
  source 1..21: mol_type = unassigned DNA
cggcgcactgaggactgtggt

SEQ ID NO: 782 - DNA, 22 bp, Homo sapiens
  source 1..22: mol_type = unassigned DNA
cggcgccgggcgaggctgtgcg

SEQ ID NO: 783 - DNA, 23 bp, Homo sapiens
  source 1..23: mol_type = unassigned DNA
cggcgcgcgccggcggcggcggc

SEQ ID NO: 784 - DNA, 20 bp, Homo sapiens
  source 1..20: mol_type = unassigned DNA
cggcgcgcggcggcggcggt

SEQ ID NO: 785 - DNA, 19 bp, Homo sapiens
  source 1..19: mol_type = unassigned DNA
cggcgctggactggagacc

SEQ ID NO: 786 - DNA, 21 bp, Homo sapiens
  source 1..21: mol_type = unassigned DNA
cggctgggggccctgggtacg

SEQ ID NO: 787 - DNA, 22 bp, Homo sapiens
  source 1..22: mol_type = unassigned DNA
cggctgtggtgctggcggcgac

SEQ ID NO: 788 - DNA, 23 bp, Homo sapiens
  source 1..23: mol_type = unassigned DNA
cgggatctggctgcgctatgact

SEQ ID NO: 789 - DNA, 19 bp, Homo sapiens
  source 1..19: mol_type = unassigned DNA
cgggccgggcgacttgaga

SEQ ID NO: 790 - DNA, 20 bp, Homo sapiens
  source 1..20: mol_type = unassigned DNA
cgggcggacgagcgggcggg

SEQ ID NO: 791 - DNA, 18 bp, Homo sapiens
  source 1..18: mol_type = unassigned DNA
cggggactgtgaggctgc

SEQ ID NO: 792 - DNA, 18 bp, Homo sapiens
  source 1..18: mol_type = unassigned DNA
cgggtgactgggcgccgg

SEQ ID NO: 793 - DNA, 19 bp, Homo sapiens
  source 1..19: mol_type = unassigned DNA
cggtagagcatctgacttt

SEQ ID NO: 794 - DNA, 20 bp, Homo sapiens
  source 1..20: mol_type = unassigned DNA
cggtctaaggggctgcgttc

SEQ ID NO: 795 - DNA, 18 bp, Homo sapiens
  source 1..18: mol_type = unassigned DNA
cggtgccagactaggacg

SEQ ID NO: 796 - DNA, 24 bp, Homo sapiens
  source 1..24: mol_type = unassigned DNA
cgtaccagagcttgcggctggagt

SEQ ID NO: 797 - DNA, 20 bp, Homo sapiens
  source 1..20: mol_type = unassigned DNA
cgtgatccgcccgcctcggc

SEQ ID NO: 798 - DNA, 22 bp, Homo sapiens
  source 1..22: mol_type = unassigned DNA
cgtgcctgaggtttctccccga

SEQ ID NO: 799 - DNA, 18 bp, Homo sapiens
  source 1..18: mol_type = unassigned DNA
cgtggcggactctgggac

SEQ ID NO: 800 - DNA, 18 bp, Homo sapiens
  source 1..18: mol_type = unassigned DNA
cgtggggctgcttagatg

SEQ ID NO: 801 - DNA, 17 bp, Homo sapiens
  source 1..17: mol_type = unassigned DNA
cgttcctcggcttgtag

SEQ ID NO: 802 - DNA, 21 bp, Homo sapiens
  source 1..21: mol_type = unassigned DNA
ctaaggctgggtcggtcgggc

SEQ ID NO: 803 - DNA, 23 bp, Homo sapiens
  source 1..23: mol_type = unassigned DNA
ctagactgcagctccttgaggtg

SEQ ID NO: 804 - DNA, 22 bp, Homo sapiens
  source 1..22: mol_type = unassigned DNA
ctagagctctccggcggcggcg

SEQ ID NO: 805 - DNA, 20 bp, Homo sapiens
  source 1..20: mol_type = unassigned DNA
ctagcgccgatggtagttgg

SEQ ID NO: 806 - DNA, 19 bp, Homo sapiens
  source 1..19: mol_type = unassigned DNA
ctaggacgtgtcgggctgc

SEQ ID NO: 807 - DNA, 22 bp, Homo sapiens
  source 1..22: mol_type = unassigned DNA
ctatcattgtgaagcagaattc

SEQ ID NO: 808 - DNA, 18 bp, Homo sapiens
  source 1..18: mol_type = unassigned DNA
ctcagaacgaacgttggc

SEQ ID NO: 809 - DNA, 21 bp, Homo sapiens
  source 1..21: mol_type = unassigned DNA
ctcagctttgggtggtggccg

SEQ ID NO: 810 - DNA, 18 bp, Homo sapiens
  source 1..18: mol_type = unassigned DNA
ctccaggccaggtgggac

SEQ ID NO: 811 - DNA, 19 bp, Homo sapiens
  source 1..19: mol_type = unassigned DNA
ctcccacggcgcgcccgct

SEQ ID NO: 812 - DNA, 23 bp, Homo sapiens
  source 1..23: mol_type = unassigned DNA
ctccctcgctgcgatctattgaa

SEQ ID NO: 813 - DNA, 18 bp, Homo sapiens
  source 1..18: mol_type = unassigned DNA
ctcgccctggagtctcgg

SEQ ID NO: 814 - DNA, 22 bp, Homo sapiens
  source 1..22: mol_type = unassigned DNA
ctcggcggagctgtaagatggc

SEQ ID NO: 815 - DNA, 21 bp, Homo sapiens
  source 1..21: mol_type = unassigned DNA
ctcggtgggggccgagggccg

SEQ ID NO: 816 - DNA, 22 bp, Homo sapiens
  source 1..22: mol_type = unassigned DNA
ctcgtcgcgcgcgcgtccgcat

SEQ ID NO: 817 - DNA, 19 bp, Homo sapiens
  source 1..19: mol_type = unassigned DNA
ctcgtcggcctgcggcggc

SEQ ID NO: 818 - DNA, 18 bp, Homo sapiens
  source 1..18: mol_type = unassigned DNA
ctcgtctgatctcggcag

SEQ ID NO: 819 - DNA, 20 bp, Homo sapiens
  source 1..20: mol_type = unassigned DNA
ctctcttggactgccacggc

SEQ ID NO: 820 - DNA, 20 bp, Homo sapiens
  source 1..20: mol_type = unassigned DNA
ctctgaaatacaaaatgaaa

SEQ ID NO: 821 - DNA, 21 bp, Homo sapiens
  source 1..21: mol_type = unassigned DNA
ctctgaatccagtctgtcctt

SEQ ID NO: 822 - DNA, 21 bp, Homo sapiens
  source 1..21: mol_type = unassigned DNA
ctctgaatgtcaacgtgaaga

SEQ ID NO: 823 - DNA, 20 bp, Homo sapiens
  source 1..20: mol_type = unassigned DNA
ctctgaggcaagccaggacc

SEQ ID NO: 824 - DNA, 22 bp, Homo sapiens
  source 1..22: mol_type = unassigned DNA
ctctgcgtgcgccggcggctgc

SEQ ID NO: 825 - DNA, 21 bp, Homo sapiens
  source 1..21: mol_type = unassigned DNA
ctctggaccagacgccgcctg

SEQ ID NO: 826 - DNA, 16 bp, Homo sapiens
  source 1..16: mol_type = unassigned DNA
ctctgtctctgtctct

SEQ ID NO: 827 - DNA, 19 bp, Homo sapiens
  source 1..19: mol_type = unassigned DNA
ctctgtgtctcccaccggc

SEQ ID NO: 828 - DNA, 22 bp, Homo sapiens
  source 1..22: mol_type = unassigned DNA
ctgaccttcgtgccccgccaga

SEQ ID NO: 829 - DNA, 24 bp, Homo sapiens
  source 1..24: mol_type = unassigned DNA
ctgatatctcattcctgaacactc

SEQ ID NO: 830 - DNA, 21 bp, Homo sapiens
  source 1..21: mol_type = unassigned DNA
ctgatctctgaagctaagcag

SEQ ID NO: 831 - DNA, 23 bp, Homo sapiens
  source 1..23: mol_type = unassigned DNA
ctgcaggtgggtcggatgaggct

SEQ ID NO: 832 - DNA, 20 bp, Homo sapiens
  source 1..20: mol_type = unassigned DNA
ctgccgatcgcgggcccggc

SEQ ID NO: 833 - DNA, 21 bp, Homo sapiens
  source 1..21: mol_type = unassigned DNA
ctgcgcccccagttggctctg

SEQ ID NO: 834 - DNA, 20 bp, Homo sapiens
  source 1..20: mol_type = unassigned DNA
ctgcggaccgagcggcgagc

SEQ ID NO: 835 - DNA, 21 bp, Homo sapiens
  source 1..21: mol_type = unassigned DNA
ctgcggctgtgggttctctgc

SEQ ID NO: 836 - DNA, 18 bp, Homo sapiens
  source 1..18: mol_type = unassigned DNA
ctgctgatcggggactcg

SEQ ID NO: 837 - DNA, 21 bp, Homo sapiens
  source 1..21: mol_type = unassigned DNA
ctgctggccctctcctggtgc

SEQ ID NO: 838 - DNA, 19 bp, Homo sapiens
  source 1..19: mol_type = unassigned DNA
ctgctggtcccactggagc

SEQ ID NO: 839 - DNA, 20 bp, Homo sapiens
  source 1..20: mol_type = unassigned DNA
ctggagcgtcgggccatacc

SEQ ID NO: 840 - DNA, 19 bp, Homo sapiens
  source 1..19: mol_type = unassigned DNA
ctggatcggcggcgcggcg

SEQ ID NO: 841 - DNA, 24 bp, Homo sapiens
  source 1..24: mol_type = unassigned DNA
ctggatgatgatacgcaaatgctg

SEQ ID NO: 842 - DNA, 23 bp, Homo sapiens
  source 1..23: mol_type = unassigned DNA
ctggcatgttggaccaatgtagg

SEQ ID NO: 843 - DNA, 23 bp, Homo sapiens
  source 1..23: mol_type = unassigned DNA
ctggcccctgacccctccctggc

SEQ ID NO: 844 - DNA, 20 bp, Homo sapiens
  source 1..20: mol_type = unassigned DNA
ctggctcaggactctgcagc

SEQ ID NO: 845 - DNA, 21 bp, Homo sapiens
  source 1..21: mol_type = unassigned DNA
ctggctctctggatggtaggc

SEQ ID NO: 846 - DNA, 23 bp, Homo sapiens
  source 1..23: mol_type = unassigned DNA
ctggctggggctcgtgtggcagt

SEQ ID NO: 847 - DNA, 18 bp, Homo sapiens
  source 1..18: mol_type = unassigned DNA
ctgggacacggggaactg

SEQ ID NO: 848 - DNA, 21 bp, Homo sapiens
  source 1..21: mol_type = unassigned DNA
ctgggctgggagcaacgcgac

SEQ ID NO: 849 - DNA, 17 bp, Homo sapiens
  source 1..17: mol_type = unassigned DNA
ctggggttgtagggcgt

SEQ ID NO: 850 - DNA, 18 bp, Homo sapiens
  source 1..18: mol_type = unassigned DNA
ctggtaggtgactggagg

SEQ ID NO: 851 - DNA, 22 bp, Homo sapiens
  source 1..22: mol_type = unassigned DNA
ctgtagctgggcagggagaggg

SEQ ID NO: 852 - DNA, 20 bp, Homo sapiens
  source 1..20: mol_type = unassigned DNA
ctgtcctatgagctctagca

SEQ ID NO: 853 - DNA, 21 bp, Homo sapiens
  source 1..21: mol_type = unassigned DNA
ctgtcggtgtaacttcttaga

SEQ ID NO: 854 - DNA, 21 bp, Homo sapiens
  source 1..21: mol_type = unassigned DNA
ctgtctgaatctttaaccgac

SEQ ID NO: 855 - DNA, 22 bp, Homo sapiens
  source 1..22: mol_type = unassigned DNA
ctgtgcacagagttgtctgccc

SEQ ID NO: 856 - DNA, 23 bp, Homo sapiens
  source 1..23: mol_type = unassigned DNA
cttaaccaccattatcttaactg

SEQ ID NO: 857 - DNA, 26 bp, Homo sapiens
  source 1..26: mol_type = unassigned DNA
cttattttggtaagttgatcttcaat

SEQ ID NO: 858 - DNA, 30 bp, Homo sapiens
  source 1..30: mol_type = unassigned DNA
cttcgatgaagagatgatgccgagtctgac

SEQ ID NO: 859 - DNA, 15 bp, Homo sapiens
  source 1..15: mol_type = unassigned DNA
cttcgggttgtaaag

SEQ ID NO: 860 - DNA, 19 bp, Homo sapiens
  source 1..19: mol_type = unassigned DNA
cttgtaattgccattcatt

SEQ ID NO: 861 - DNA, 18 bp, Homo sapiens
  source 1..18: mol_type = unassigned DNA
gaaaatgaagaaggaacg

SEQ ID NO: 862 - DNA, 25 bp, Homo sapiens
  source 1..25: mol_type = unassigned DNA
gaaacatcggatttggggaacgcgt

SEQ ID NO: 863 - DNA, 20 bp, Homo sapiens
  source 1..20: mol_type = unassigned DNA
gaacagtcggaacgcggtgg

SEQ ID NO: 864 - DNA, 20 bp, Homo sapiens
  source 1..20: mol_type = unassigned DNA
gaacttaggtcgccgggacg

SEQ ID NO: 865 - DNA, 21 bp, Homo sapiens
  source 1..21: mol_type = unassigned DNA
gaagtgatctggggctggagc

SEQ ID NO: 866 - DNA, 20 bp, Homo sapiens
  source 1..20: mol_type = unassigned DNA
gaatcctgctcacagcgcca

SEQ ID NO: 867 - DNA, 30 bp, Homo sapiens
  source 1..30: mol_type = unassigned DNA
gaatgttttcattaatcaagaacgaaagtc

SEQ ID NO: 868 - DNA, 17 bp, Homo sapiens
  source 1..17: mol_type = unassigned DNA
gacactctgcgaccgtg

SEQ ID NO: 869 - DNA, 22 bp, Homo sapiens
  source 1..22: mol_type = unassigned DNA
gacccccatctgtgcctccagt

SEQ ID NO: 870 - DNA, 20 bp, Homo sapiens
  source 1..20: mol_type = unassigned DNA
gacctgcttctttgacccag

SEQ ID NO: 871 - DNA, 19 bp, Homo sapiens
  source 1..19: mol_type = unassigned DNA
gagaagctctgaatcgaag

SEQ ID NO: 872 - DNA, 20 bp, Homo sapiens
  source 1..20: mol_type = unassigned DNA
gagactgacccggacttagg

SEQ ID NO: 873 - DNA, 19 bp, Homo sapiens
  source 1..19: mol_type = unassigned DNA
gagactggccctgctggac

SEQ ID NO: 874 - DNA, 21 bp, Homo sapiens
  source 1..21: mol_type = unassigned DNA
gagagctgttgtactgggtgg

SEQ ID NO: 875 - DNA, 15 bp, Homo sapiens
  source 1..15: mol_type = unassigned DNA
gagccgggcgtggca

SEQ ID NO: 876 - DNA, 23 bp, Homo sapiens
  source 1..23: mol_type = unassigned DNA
gagcggtggtctgtggagctcgg

SEQ ID NO: 877 - DNA, 19 bp, Homo sapiens
  source 1..19: mol_type = unassigned DNA
gagctcgttgtggaacctg

SEQ ID NO: 878 - DNA, 22 bp, Homo sapiens
  source 1..22: mol_type = unassigned DNA
gagctgccaaatgaagggctgt

SEQ ID NO: 879 - DNA, 21 bp, Homo sapiens
  source 1..21: mol_type = unassigned DNA
gaggaggagctctgcgcggcg

SEQ ID NO: 880 - DNA, 20 bp, Homo sapiens
  source 1..20: mol_type = unassigned DNA
gaggcagggcgggcgggcga

SEQ ID NO: 881 - DNA, 20 bp, Homo sapiens
  source 1..20: mol_type = unassigned DNA
gaggctgtagggaccgacgg

SEQ ID NO: 882 - DNA, 20 bp, Homo sapiens
  source 1..20: mol_type = unassigned DNA
gaggtagagctactgattgg

SEQ ID NO: 883 - DNA, 18 bp, Homo sapiens
  source 1..18: mol_type = unassigned DNA
gaggtcggacccggggag

SEQ ID NO: 884 - DNA, 18 bp, Homo sapiens
  source 1..18: mol_type = unassigned DNA
gaggtcggggtggggaga

SEQ ID NO: 885 - DNA, 21 bp, Homo sapiens
  source 1..21: mol_type = unassigned DNA
gagtatctggggctgttctgg

SEQ ID NO: 886 - DNA, 19 bp, Homo sapiens
  source 1..19: mol_type = unassigned DNA
gagtcgccggaggagccag

SEQ ID NO: 887 - DNA, 18 bp, Homo sapiens
  source 1..18: mol_type = unassigned DNA
gagtcgggttgcttgggc

SEQ ID NO: 888 - DNA, 18 bp, Homo sapiens
  source 1..18: mol_type = unassigned DNA
gagtgactgggcggtaga

SEQ ID NO: 889 - DNA, 15 bp, Homo sapiens
  source 1..15: mol_type = unassigned DNA
gagtgatttgtctgg

SEQ ID NO: 890 - DNA, 21 bp, Homo sapiens
  source 1..21: mol_type = unassigned DNA
gataggccgggtgtggaagcg

SEQ ID NO: 891 - DNA, 22 bp, Homo sapiens
  source 1..22: mol_type = unassigned DNA
gatcattaacggagcccggagg

SEQ ID NO: 892 - DNA, 20 bp, Homo sapiens
  source 1..20: mol_type = unassigned DNA
gatttctgccccgtgctctg

SEQ ID NO: 893 - DNA, 21 bp, Homo sapiens
  source 1..21: mol_type = unassigned DNA
gcagacccggggaactgaacc

SEQ ID NO: 894 - DNA, 18 bp, Homo sapiens
  source 1..18: mol_type = unassigned DNA
gcagccaggctcggagcg

SEQ ID NO: 895 - DNA, 20 bp, Homo sapiens
  source 1..20: mol_type = unassigned DNA
gcagcggctcggggactggg

SEQ ID NO: 896 - DNA, 20 bp, Homo sapiens
  source 1..20: mol_type = unassigned DNA
gcaggtcggagctcggagct

SEQ ID NO: 897 - DNA, 18 bp, Homo sapiens
  source 1..18: mol_type = unassigned DNA
gcagtcttcagcctgaga

SEQ ID NO: 898 - DNA, 20 bp, Homo sapiens
  source 1..20: mol_type = unassigned DNA
gcccccccggtgtccccgca

SEQ ID NO: 899 - DNA, 20 bp, Homo sapiens
  source 1..20: mol_type = unassigned DNA
gccggcgactgtggagttag

SEQ ID NO: 900 - DNA, 19 bp, Homo sapiens
  source 1..19: mol_type = unassigned DNA
gccgtccggggtctgaaga

SEQ ID NO: 901 - DNA, 19 bp, Homo sapiens
  source 1..19: mol_type = unassigned DNA
gccgtgcctgctgtagaga

SEQ ID NO: 902 - DNA, 19 bp, Homo sapiens
  source 1..19: mol_type = unassigned DNA
gcctccgaggactgtgaag

SEQ ID NO: 903 - DNA, 22 bp, Homo sapiens
  source 1..22: mol_type = unassigned DNA
gcctcggccggcgcctagcagc

SEQ ID NO: 904 - DNA, 18 bp, Homo sapiens
  source 1..18: mol_type = unassigned DNA
gcctgcggggtcgtctgg

SEQ ID NO: 905 - DNA, 21 bp, Homo sapiens
  source 1..21: mol_type = unassigned DNA
gccttctctgaacaccccggc

SEQ ID NO: 906 - DNA, 21 bp, Homo sapiens
  source 1..21: mol_type = unassigned DNA
gcgagccgctgggaactgaac

SEQ ID NO: 907 - DNA, 19 bp, Homo sapiens
  source 1..19: mol_type = unassigned DNA
gcgagcgcggactggggcg

SEQ ID NO: 908 - DNA, 24 bp, Homo sapiens
  source 1..24: mol_type = unassigned DNA
gcgcgccggccgggcgcgacccgc

SEQ ID NO: 909 - DNA, 19 bp, Homo sapiens
  source 1..19: mol_type = unassigned DNA
gcgcgcgtgtcgcccccgg

SEQ ID NO: 910 - DNA, 20 bp, Homo sapiens
  source 1..20: mol_type = unassigned DNA
gcggactatcgggcggctag

SEQ ID NO: 911 - DNA, 15 bp, Homo sapiens
  source 1..15: mol_type = unassigned DNA
gcggccgggggcgat

SEQ ID NO: 912 - DNA, 20 bp, Homo sapiens
  source 1..20: mol_type = unassigned DNA
gcgggccgggcgacttgaga

SEQ ID NO: 913 - DNA, 18 bp, Homo sapiens
  source 1..18: mol_type = unassigned DNA
gcgggcgggcgcgacgga

SEQ ID NO: 914 - DNA, 19 bp, Homo sapiens
  source 1..19: mol_type = unassigned DNA
gcgggcgggcgcgacggag

SEQ ID NO: 915 - DNA, 21 bp, Homo sapiens
  source 1..21: mol_type = unassigned DNA
gcgggcgtcagtacagtagag

SEQ ID NO: 916 - DNA, 27 bp, Homo sapiens
  source 1..27: mol_type = unassigned DNA
gcgggttatgcgacctggagtctgagc

SEQ ID NO: 917 - DNA, 20 bp, Homo sapiens
  source 1..20: mol_type = unassigned DNA
gcgtcgggcccgggggaggt

SEQ ID NO: 918 - DNA, 18 bp, Homo sapiens
  source 1..18: mol_type = unassigned DNA
gcgtgtgccacccctgcg

SEQ ID NO: 919 - DNA, 20 bp, Homo sapiens
  source 1..20: mol_type = unassigned DNA
gctaatgattagtggactcg

SEQ ID NO: 920 - DNA, 19 bp, Homo sapiens
  source 1..19: mol_type = unassigned DNA
gctcgggcgtcggatcgga

SEQ ID NO: 921 - DNA, 19 bp, Homo sapiens
  source 1..19: mol_type = unassigned DNA
gctgggagtggatctgaga

SEQ ID NO: 922 - DNA, 18 bp, Homo sapiens
  source 1..18: mol_type = unassigned DNA
gctgggctggagtctctg

SEQ ID NO: 923 - DNA, 19 bp, Homo sapiens
  source 1..19: mol_type = unassigned DNA
gctgggctggagtctctgc

SEQ ID NO: 924 - DNA, 20 bp, Homo sapiens
  source 1..20: mol_type = unassigned DNA
gctggtcggcggccgctctg

SEQ ID NO: 925 - DNA, 21 bp, Homo sapiens
  source 1..21: mol_type = unassigned DNA
gcttgacattgaactttgatc

SEQ ID NO: 926 - DNA, 20 bp, Homo sapiens
  source 1..20: mol_type = unassigned DNA
ggaggtagagcactgattgg

SEQ ID NO: 927 - DNA, 16 bp, Homo sapiens
  source 1..16: mol_type = unassigned DNA
ggagtcgggttcagat

SEQ ID NO: 928 - DNA, 17 bp, Homo sapiens
  source 1..17: mol_type = unassigned DNA
ggatcctgctcgggctg

SEQ ID NO: 929 - DNA, 24 bp, Homo sapiens
  source 1..24: mol_type = unassigned DNA
ggcggcggcgggggtgtggggtct

SEQ ID NO: 930 - DNA, 24 bp, Homo sapiens
  source 1..24: mol_type = unassigned DNA
ggctgcggagccaatggggcgaag

SEQ ID NO: 931 - DNA, 21 bp, Homo sapiens
  source 1..21: mol_type = unassigned DNA
ggctgctctggactgtcctag

SEQ ID NO: 932 - DNA, 18 bp, Homo sapiens
  source 1..18: mol_type = unassigned DNA
gggactgggagcgggcgg

SEQ ID NO: 933 - DNA, 24 bp, Homo sapiens
  source 1..24: mol_type = unassigned DNA
gggagaggacgcggtctgagtggt

SEQ ID NO: 934 - DNA, 20 bp, Homo sapiens
  source 1..20: mol_type = unassigned DNA
gggatatgggactgagacca

SEQ ID NO: 935 - DNA, 22 bp, Homo sapiens
  source 1..22: mol_type = unassigned DNA
gggcaaaagctcgcttgctctt

SEQ ID NO: 936 - DNA, 24 bp, Homo sapiens
  source 1..24: mol_type = unassigned DNA
gggcagcttccgggaaaccaaagt

SEQ ID NO: 937 - DNA, 21 bp, Homo sapiens
  source 1..21: mol_type = unassigned DNA
gggccgaccagaaaaaggacg

SEQ ID NO: 938 - DNA, 22 bp, Homo sapiens
  source 1..22: mol_type = unassigned DNA
gggcgcaccaccggcccgtctc

SEQ ID NO: 939 - DNA, 20 bp, Homo sapiens
  source 1..20: mol_type = unassigned DNA
gggcgcgcaggcagagaacg

SEQ ID NO: 940 - DNA, 23 bp, Homo sapiens
  source 1..23: mol_type = unassigned DNA
gggctgcgggcggccgggcgcgg

SEQ ID NO: 941 - DNA, 21 bp, Homo sapiens
  source 1..21: mol_type = unassigned DNA
gggctgctaagggaactgtga

SEQ ID NO: 942 - DNA, 18 bp, Homo sapiens
  source 1..18: mol_type = unassigned DNA
ggggctgcctctggaatg

SEQ ID NO: 943 - DNA, 20 bp, Homo sapiens
  source 1..20: mol_type = unassigned DNA
ggggcttcgggctgtcgggc

SEQ ID NO: 944 - DNA, 19 bp, Homo sapiens
  source 1..19: mol_type = unassigned DNA
gggggaagagcatttgact

SEQ ID NO: 945 - DNA, 20 bp, Homo sapiens
  source 1..20: mol_type = unassigned DNA
ggggggagaagggtcgggga

SEQ ID NO: 946 - DNA, 22 bp, Homo sapiens
  source 1..22: mol_type = unassigned DNA
ggggggagccaaaagggtcatc

SEQ ID NO: 947 - DNA, 21 bp, Homo sapiens
  source 1..21: mol_type = unassigned DNA
ggggggtagagcgactgaatc

SEQ ID NO: 948 - DNA, 25 bp, Homo sapiens
  source 1..25: mol_type = unassigned DNA
gggggtatagctcagggttcagagc

SEQ ID NO: 949 - DNA, 21 bp, Homo sapiens
  source 1..21: mol_type = unassigned DNA
gggtccgtcgggctggggcgc

SEQ ID NO: 950 - DNA, 17 bp, Homo sapiens
  source 1..17: mol_type = unassigned DNA
gggtcggggcggcggca

SEQ ID NO: 951 - DNA, 19 bp, Homo sapiens
  source 1..19: mol_type = unassigned DNA
ggtcagtcggtcctaagag

SEQ ID NO: 952 - DNA, 19 bp, Homo sapiens
  source 1..19: mol_type = unassigned DNA
ggtcgcgccgttggagggc

SEQ ID NO: 953 - DNA, 28 bp, Homo sapiens
  source 1..28: mol_type = unassigned DNA
ggtcggcgggcggcggggcgggggggtt

SEQ ID NO: 954 - DNA, 23 bp, Homo sapiens
  source 1..23: mol_type = unassigned DNA
ggtgagctcgtcgtccggattgc

SEQ ID NO: 955 - DNA, 25 bp, Homo sapiens
  source 1..25: mol_type = unassigned DNA
ggtgcggaccaggggcatccgactg

SEQ ID NO: 956 - DNA, 19 bp, Homo sapiens
  source 1..19: mol_type = unassigned DNA
ggtggaggcgtcggtggga

SEQ ID NO: 957 - DNA, 19 bp, Homo sapiens
  source 1..19: mol_type = unassigned DNA
ggtggggatcggggattgc

SEQ ID NO: 958 - DNA, 17 bp, Homo sapiens
  source 1..17: mol_type = unassigned DNA
ggttcgaatcctccatg

SEQ ID NO: 959 - DNA, 19 bp, Homo sapiens
  source 1..19: mol_type = unassigned DNA
gtagtttgactggggcggt

SEQ ID NO: 960 - DNA, 18 bp, Homo sapiens
  source 1..18: mol_type = unassigned DNA
gtcgagtgactctgcgcc

SEQ ID NO: 961 - DNA, 19 bp, Homo sapiens
  source 1..19: mol_type = unassigned DNA
gtcgcggcctgaggagacc

SEQ ID NO: 962 - DNA, 20 bp, Homo sapiens
  source 1..20: mol_type = unassigned DNA
gtcgggaaagaagggctggg

SEQ ID NO: 963 - DNA, 23 bp, Homo sapiens
  source 1..23: mol_type = unassigned DNA
gtctgatctcggaagctaagcaa

SEQ ID NO: 964 - DNA, 22 bp, Homo sapiens
  source 1..22: mol_type = unassigned DNA
gtgagatctgggaactccgggc

SEQ ID NO: 965 - DNA, 23 bp, Homo sapiens
  source 1..23: mol_type = unassigned DNA
gtgatttctgccccgtgctctga

SEQ ID NO: 966 - DNA, 22 bp, Homo sapiens
  source 1..22: mol_type = unassigned DNA
gtgcgggacctgaggctgtgtg

SEQ ID NO: 967 - DNA, 19 bp, Homo sapiens
  source 1..19: mol_type = unassigned DNA
gtgcggtgggggaccctga

SEQ ID NO: 968 - DNA, 18 bp, Homo sapiens
  source 1..18: mol_type = unassigned DNA
gtgcgtcaaggactactg

SEQ ID NO: 969 - DNA, 22 bp, Homo sapiens
  source 1..22: mol_type = unassigned DNA
gtggacagacacaggcctgagg

SEQ ID NO: 970 - DNA, 18 bp, Homo sapiens
  source 1..18: mol_type = unassigned DNA
gtggactcgggccgctgc

SEQ ID NO: 971 - DNA, 18 bp, Homo sapiens
  source 1..18: mol_type = unassigned DNA
gtggggccggaaggactg

SEQ ID NO: 972 - DNA, 20 bp, Homo sapiens
  source 1..20: mol_type = unassigned DNA
gtgggtagcgcatttgactg

SEQ ID NO: 973 - DNA, 18 bp, Homo sapiens
  source 1..18: mol_type = unassigned DNA
gtgtatttttagatggaa

SEQ ID NO: 974 - DNA, 18 bp, Homo sapiens
  source 1..18: mol_type = unassigned DNA
gtgtcgcgccgtcgggct

SEQ ID NO: 975 - DNA, 22 bp, Homo sapiens
  source 1..22: mol_type = unassigned DNA
gtgttaggacccgcaagatggt

SEQ ID NO: 976 - DNA, 20 bp, Homo sapiens
  source 1..20: mol_type = unassigned DNA
gttagcgttcggatagttga

SEQ ID NO: 977 - DNA, 20 bp, Homo sapiens
  source 1..20: mol_type = unassigned DNA
gttctcagttcggattggag

SEQ ID NO: 978 - DNA, 22 bp, Homo sapiens
  source 1..22: mol_type = unassigned DNA
gttcttccagttcgcagtcaag

SEQ ID NO: 979 - DNA, 18 bp, Homo sapiens
  source 1..18: mol_type = unassigned DNA
gttggctggggctggatg

SEQ ID NO: 980 - DNA, 21 bp, Homo sapiens
  source 1..21: mol_type = unassigned DNA
gtttgatctcggaagctaagc

SEQ ID NO: 981 - DNA, 26 bp, Homo sapiens
  source 1..26: mol_type = unassigned DNA
gttttcggaactgaggccatgattaa

SEQ ID NO: 982 - DNA, 18 bp, Homo sapiens
  source 1..18: mol_type = unassigned DNA
gttttcggatcgtaaaac

SEQ ID NO: 983 - DNA, 17 bp, Homo sapiens
  source 1..17: mol_type = unassigned DNA
taagctctgtcgtcgag

SEQ ID NO: 984 - DNA, 25 bp, Homo sapiens
  source 1..25: mol_type = unassigned DNA
taagcttgcgttgattaagtccctg

SEQ ID NO: 985 - DNA, 19 bp, Homo sapiens
  source 1..19: mol_type = unassigned DNA
taaggaactgtctgaggga

SEQ ID NO: 986 - DNA, 22 bp, Homo sapiens
  source 1..22: mol_type = unassigned DNA
taagggtcggggcggcaggggc

SEQ ID NO: 987 - DNA, 21 bp, Homo sapiens
  source 1..21: mol_type = unassigned DNA
tacggagcggacggactgggg

SEQ ID NO: 988 - DNA, 21 bp, Homo sapiens
  source 1..21: mol_type = unassigned DNA
tagagcgccgggacctgtgac

SEQ ID NO: 989 - DNA, 21 bp, Homo sapiens
  source 1..21: mol_type = unassigned DNA
tagatccattcatgtttgcac

SEQ ID NO: 990 - DNA, 23 bp, Homo sapiens
  source 1..23: mol_type = unassigned DNA
tagcagcgggaccagttctgcag

SEQ ID NO: 991 - DNA, 18 bp, Homo sapiens
  source 1..18: mol_type = unassigned DNA
taggccctgaatcaagac

SEQ ID NO: 992 - DNA, 18 bp, Homo sapiens
  source 1..18: mol_type = unassigned DNA
tagtatgtggttgtagac

SEQ ID NO: 993 - DNA, 16 bp, Homo sapiens
  source 1..16: mol_type = unassigned DNA
tatccattgcactccg

SEQ ID NO: 994 - DNA, 23 bp, Homo sapiens
  source 1..23: mol_type = unassigned DNA
tattggccagttttgtctgatgc

SEQ ID NO: 995 - DNA, 24 bp, Homo sapiens
  source 1..24: mol_type = unassigned DNA
tcactcctctcctcccgtcttcag

SEQ ID NO: 996 - DNA, 23 bp, Homo sapiens
  source 1..23: mol_type = unassigned DNA
tcattgacctcgtgttggaccga

SEQ ID NO: 997 - DNA, 20 bp, Homo sapiens
  source 1..20: mol_type = unassigned DNA
tccccggcacctccactaaa

SEQ ID NO: 998 - DNA, 21 bp, Homo sapiens
  source 1..21: mol_type = unassigned DNA
tccccggcctctccaccaaga

SEQ ID NO: 999 - DNA, 18 bp, Homo sapiens
  source 1..18: mol_type = unassigned DNA
tccctgagcccctaactt

SEQ ID NO: 1000 - DNA, 19 bp, Homo sapiens
  source 1..19: mol_type = unassigned DNA
tccgccgggcatcgctctg

SEQ ID NO: 1001 - DNA, 20 bp, Homo sapiens
  source 1..20: mol_type = unassigned DNA
tccgggctctgggtggcggc

SEQ ID NO: 1002 - DNA, 17 bp, Homo sapiens
  source 1..17: mol_type = unassigned DNA
tcgagcccaggtcgagg

SEQ ID NO: 1003 - DNA, 21 bp, Homo sapiens
  source 1..21: mol_type = unassigned DNA
tcgcacccggaccgagaccag

SEQ ID NO: 1004 - DNA, 22 bp, Homo sapiens
  source 1..22: mol_type = unassigned DNA
tcggaagctaagcagggtcggg

SEQ ID NO: 1005 - DNA, 21 bp, Homo sapiens
  source 1..21: mol_type = unassigned DNA
tcggtcgggctggggcgaagc

SEQ ID NO: 1006 - DNA, 21 bp, Homo sapiens
  source 1..21: mol_type = unassigned DNA
tcgtctgaacctgtctgcagc

SEQ ID NO: 1007 - DNA, 20 bp, Homo sapiens
  source 1..20: mol_type = unassigned DNA
tctaactggtgtgagatggt

SEQ ID NO: 1008 - DNA, 23 bp, Homo sapiens
  source 1..23: mol_type = unassigned DNA
tctcaccccaactctgccccaga

SEQ ID NO: 1009 - DNA, 21 bp, Homo sapiens
  source 1..21: mol_type = unassigned DNA
tctcgtcgcgcgcgcgtccgt

SEQ ID NO: 1010 - DNA, 24 bp, Homo sapiens
  source 1..24: mol_type = unassigned DNA
tctcgtctgatctcggacgctaag

SEQ ID NO: 1011 - DNA, 19 bp, Homo sapiens
  source 1..19: mol_type = unassigned DNA
tctgactgcctgtgctgag

SEQ ID NO: 1012 - DNA, 20 bp, Homo sapiens
  source 1..20: mol_type = unassigned DNA
tctgtgcgaaggtccgtgga

SEQ ID NO: 1013 - DNA, 15 bp, Homo sapiens
  source 1..15: mol_type = unassigned DNA
tcttatctcggaagc

SEQ ID NO: 1014 - DNA, 20 bp, Homo sapiens
  source 1..20: mol_type = unassigned DNA
tgaacgatcgtcagggtttt

SEQ ID NO: 1015 - DNA, 18 bp, Homo sapiens
  source 1..18: mol_type = unassigned DNA
tgaagcagccatgatctg

SEQ ID NO: 1016 - DNA, 22 bp, Homo sapiens
  source 1..22: mol_type = unassigned DNA
tgccctgcggccccggctctga

SEQ ID NO: 1017 - DNA, 20 bp, Homo sapiens
  source 1..20: mol_type = unassigned DNA
tgccggtcgctcgccctcta

SEQ ID NO: 1018 - DNA, 21 bp, Homo sapiens
  source 1..21: mol_type = unassigned DNA
tggacagacacaggcctgagg

SEQ ID NO: 1019 - DNA, 19 bp, Homo sapiens
  source 1..19: mol_type = unassigned DNA
tggactcgagggctgggcg

SEQ ID NO: 1020 - DNA, 30 bp, Homo sapiens
  source 1..30: mol_type = unassigned DNA
tggagcgtcgggcccctacccggccgtcgc

SEQ ID NO: 1021 - DNA, 26 bp, Homo sapiens
  source 1..26: mol_type = unassigned DNA
tggaggtgctgaactgtctgagcctg

SEQ ID NO: 1022 - DNA, 17 bp, Homo sapiens
  source 1..17: mol_type = unassigned DNA
tggagtgatttgtctgg

SEQ ID NO: 1023 - DNA, 18 bp, Homo sapiens
  source 1..18: mol_type = unassigned DNA
tggatgtccggggctgca

SEQ ID NO: 1024 - DNA, 21 bp, Homo sapiens
  source 1..21: mol_type = unassigned DNA
tggcgttcgccgggctggagc

SEQ ID NO: 1025 - DNA, 18 bp, Homo sapiens
  source 1..18: mol_type = unassigned DNA
tggctgctgggactcaag

SEQ ID NO: 1026 - DNA, 22 bp, Homo sapiens
  source 1..22: mol_type = unassigned DNA
tgggtcggtcgagctggggcgc

SEQ ID NO: 1027 - DNA, 23 bp, Homo sapiens
  source 1..23: mol_type = unassigned DNA
tggtctggaactgaacctgcagt

SEQ ID NO: 1028 - DNA, 22 bp, Homo sapiens
  source 1..22: mol_type = unassigned DNA
tggtctgtggagctcggcggcg

SEQ ID NO: 1029 - DNA, 17 bp, Homo sapiens
  source 1..17: mol_type = unassigned DNA
tggtggcggggagcggt

SEQ ID NO: 1030 - DNA, 23 bp, Homo sapiens
  source 1..23: mol_type = unassigned DNA
tgtgagaacgcggtctgagtggt

SEQ ID NO: 1031 - DNA, 26 bp, Homo sapiens
  source 1..26: mol_type = unassigned DNA
tgtgatgcgaactggagtctgagcct

SEQ ID NO: 1032 - DNA, 19 bp, Homo sapiens
  source 1..19: mol_type = unassigned DNA
tgtgatttctgcccagtgc

SEQ ID NO: 1033 - DNA, 20 bp, Homo sapiens
  source 1..20: mol_type = unassigned DNA
tgtgtaggattctgacccac

SEQ ID NO: 1034 - DNA, 20 bp, Homo sapiens
  source 1..20: mol_type = unassigned DNA
tgttggttttcggcactgag

SEQ ID NO: 1035 - DNA, 19 bp, Homo sapiens
  source 1..19: mol_type = unassigned DNA
tgtttaccctcttactttc

SEQ ID NO: 1036 - DNA, 17 bp, Homo sapiens
  source 1..17: mol_type = unassigned DNA
ttaataggaacagtcgg

SEQ ID NO: 1037 - DNA, 19 bp, Homo sapiens
  source 1..19: mol_type = unassigned DNA
ttatgcctgaacgcctcta

SEQ ID NO: 1038 - DNA, 18 bp, Homo sapiens
  source 1..18: mol_type = unassigned DNA
ttcaatacgggactgatg

SEQ ID NO: 1039 - DNA, 30 bp, Homo sapiens
  source 1..30: mol_type = unassigned DNA
ttcagatttttggattaaggacgttcaact

SEQ ID NO: 1040 - DNA, 20 bp, Homo sapiens
  source 1..20: mol_type = unassigned DNA
ttccacgctcttccctgcct

SEQ ID NO: 1041 - DNA, 27 bp, Homo sapiens
  source 1..27: mol_type = unassigned DNA
ttccgataccgaacgagactctggcat

SEQ ID NO: 1042 - DNA, 17 bp, Homo sapiens
  source 1..17: mol_type = unassigned DNA
ttcgaacttgactatct

SEQ ID NO: 1043 - DNA, 21 bp, Homo sapiens
  source 1..21: mol_type = unassigned DNA
ttcggatggggctgttctgcg

SEQ ID NO: 1044 - DNA, 15 bp, Homo sapiens
  source 1..15: mol_type = unassigned DNA
ttcggtcgggctggg

SEQ ID NO: 1045 - DNA, 21 bp, Homo sapiens
  source 1..21: mol_type = unassigned DNA
ttctttcgctcctatctgatg

SEQ ID NO: 1046 - DNA, 18 bp, Homo sapiens
  source 1..18: mol_type = unassigned DNA
ttgaggtccggggcagag

SEQ ID NO: 1047 - DNA, 16 bp, Homo sapiens
  source 1..16: mol_type = unassigned DNA
ttgatcactcggctcg

SEQ ID NO: 1048 - DNA, 21 bp, Homo sapiens
  source 1..21: mol_type = unassigned DNA
ttgccggtcgctcgccctctt

SEQ ID NO: 1049 - DNA, 18 bp, Homo sapiens
  source 1..18: mol_type = unassigned DNA
ttggggttgtgggacagt

SEQ ID NO: 1050 - DNA, 20 bp, Homo sapiens
  source 1..20: mol_type = unassigned DNA
ttgggttttaagcaggaggt

SEQ ID NO: 1051 - DNA, 21 bp, Homo sapiens
  source 1..21: mol_type = unassigned DNA
ttggtccgcgaggtcccgggt

SEQ ID NO: 1052 - DNA, 20 bp, Homo sapiens
  source 1..20: mol_type = unassigned DNA
ttgtctgggcccggagtagg

SEQ ID NO: 1053 - DNA, 16 bp, Homo sapiens
  source 1..16: mol_type = unassigned DNA
ttgtttgggattgcag

SEQ ID NO: 1054 - DNA, 20 bp, Homo sapiens
  source 1..20: mol_type = unassigned DNA
tttcagagtagttggggttg

SEQ ID NO: 1055 - DNA, 19 bp, Homo sapiens
  source 1..19: mol_type = unassigned DNA
tttgcaggaccagggccgg

SEQ ID NO: 1056 - DNA, 24 bp, Homo sapiens
  source 1..24: mol_type = unassigned DNA
tttggcaatggtagacctcccact

SEQ ID NO: 1057 - DNA, 21 bp, Homo sapiens
  source 1..21: mol_type = unassigned DNA
aacatcggatttggggaacgc

SEQ ID NO: 1058 - DNA, 24 bp, Homo sapiens
  source 1..24: mol_type = unassigned DNA
ccgctccccggcgccgctcgtggg

SEQ ID NO: 1059 - DNA, 23 bp, Homo sapiens
  source 1..23: mol_type = unassigned DNA
ggagcgcgccgcggctggacgag

SEQ ID NO: 1060 - DNA, 20 bp, Homo sapiens
  source 1..20: mol_type = unassigned DNA
atgtttgtactctggccgct

SEQ ID NO: 1061 - DNA, 23 bp, Homo sapiens
  source 1..23: mol_type = unassigned DNA
agggggggagtttgactggggcg

SEQ ID NO: 1062 - DNA, 20 bp, Homo sapiens
  source 1..20: mol_type = unassigned DNA
cactgtccctacctactctc

SEQ ID NO: 1063 - DNA, 23 bp, Homo sapiens
  source 1..23: mol_type = unassigned DNA
cggaccaggggaatccgcctgtt

SEQ ID NO: 1064 - DNA, 19 bp, Homo sapiens
  source 1..19: mol_type = unassigned DNA
gtcggggtttcgtacgtcg

SEQ ID NO: 1065 - DNA, 21 bp, Homo sapiens
  source 1..21: mol_type = unassigned DNA
gtctgggtttcgtacgtagca

SEQ ID NO: 1066 - DNA, 22 bp, Homo sapiens
  source 1..22: mol_type = unassigned DNA
accatgaccgagacgtgtggaa

SEQ ID NO: 1067 - DNA, 25 bp, Homo sapiens
  source 1..25: mol_type = unassigned DNA
cgagccgtcgggcccgggggaggtt

SEQ ID NO: 1068 - DNA, 25 bp, Homo sapiens
  source 1..25: mol_type = unassigned DNA
gatggcgctggagcgtcgggcccct

SEQ ID NO: 1069 - DNA, 23 bp, Homo sapiens
  source 1..23: mol_type = unassigned DNA
cgagagaggggcccgtgccttgg

SEQ ID NO: 1070 - DNA, 23 bp, Homo sapiens
  source 1..23: mol_type = unassigned DNA
aaaaccagtcgatgggctgtctt

SEQ ID NO: 1071 - DNA, 21 bp, Homo sapiens
  source 1..21: mol_type = unassigned DNA
aaaaccttgccagggatttcc

SEQ ID NO: 1072 - DNA, 21 bp, Homo sapiens
  source 1..21: mol_type = unassigned DNA
aaaattcaacgctgtctgtga

SEQ ID NO: 1073 - DNA, 21 bp, Homo sapiens
  source 1..21: mol_type = unassigned DNA
aaacctctgcaggcaaatgtg

SEQ ID NO: 1074 - DNA, 28 bp, Homo sapiens
  source 1..28: mol_type = unassigned DNA
aacacgtgtggaaaactaatgactgagc

SEQ ID NO: 1075 - DNA, 23 bp, Homo sapiens
  source 1..23: mol_type = unassigned DNA
aacattcaacgctgtccgcgagt

SEQ ID NO: 1076 - DNA, 21 bp, Homo sapiens
  source 1..21: mol_type = unassigned DNA
aagacatttccagggattacc

SEQ ID NO: 1077 - DNA, 21 bp, Homo sapiens
  source 1..21: mol_type = unassigned DNA
aagacatttccagggatttcc

SEQ ID NO: 1078 - DNA, 22 bp, Homo sapiens
  source 1..22: mol_type = unassigned DNA
aagaccttgccagggattacca

SEQ ID NO: 1079 - DNA, 20 bp, Homo sapiens
  source 1..20: mol_type = unassigned DNA
aagaccttgccagggatttc

SEQ ID NO: 1080 - DNA, 23 bp, Homo sapiens
  source 1..23: mol_type = unassigned DNA
aagaccttgccagggatttccaa

SEQ ID NO: 1081 - DNA, 21 bp, Homo sapiens
  source 1..21: mol_type = unassigned DNA
aagccgtaaatccgatcttgt

SEQ ID NO: 1082 - DNA, 22 bp, Homo sapiens
  source 1..22: mol_type = unassigned DNA
aagctgccagttgaagccttga

SEQ ID NO: 1083 - DNA, 22 bp, Homo sapiens
  source 1..22: mol_type = unassigned DNA
aagctgccagtttaagccgtgt

SEQ ID NO: 1084 - DNA, 22 bp, Homo sapiens
  source 1..22: mol_type = unassigned DNA
aaggtgccagctgaagcactgt

SEQ ID NO: 1085 - DNA, 22 bp, Homo sapiens
  source 1..22: mol_type = unassigned DNA
aaggtgccagtttaagaaatgt

SEQ ID NO: 1086 - DNA, 21 bp, Homo sapiens
  source 1..21: mol_type = unassigned DNA
aatctatcagactgatgttga

SEQ ID NO: 1087 - DNA, 21 bp, Homo sapiens
  source 1..21: mol_type = unassigned DNA
acactgtatacccgaatttgt

SEQ ID NO: 1088 - DNA, 21 bp, Homo sapiens
  source 1..21: mol_type = unassigned DNA
acagcagtctgcccattggtt

SEQ ID NO: 1089 - DNA, 23 bp, Homo sapiens
  source 1..23: mol_type = unassigned DNA
acagtgtatatccgaatttgtgt

SEQ ID NO: 1090 - DNA, 23 bp, Homo sapiens
  source 1..23: mol_type = unassigned DNA
accatgaccgagacgtgtggaaa

SEQ ID NO: 1091 - DNA, 21 bp, Homo sapiens
  source 1..21: mol_type = unassigned DNA
accgtagtcagcacattggtt

SEQ ID NO: 1092 - DNA, 21 bp, Homo sapiens
  source 1..21: mol_type = unassigned DNA
accgtagtctgcacattcgtt

SEQ ID NO: 1093 - DNA, 21 bp, Homo sapiens
  source 1..21: mol_type = unassigned DNA
accgtattctgcacattggta

SEQ ID NO: 1094 - DNA, 21 bp, Homo sapiens
  source 1..21: mol_type = unassigned DNA
accgtattctgcacattgttt

SEQ ID NO: 1095 - DNA, 20 bp, Homo sapiens
  source 1..20: mol_type = unassigned DNA
accttattctgcacattgct

SEQ ID NO: 1096 - DNA, 22 bp, Homo sapiens
  source 1..22: mol_type = unassigned DNA
acctttgtctgcacattggtta

SEQ ID NO: 1097 - DNA, 20 bp, Homo sapiens
  source 1..20: mol_type = unassigned DNA
acgctgtaaatccgaatttg

SEQ ID NO: 1098 - DNA, 22 bp, Homo sapiens
  source 1..22: mol_type = unassigned DNA
acgctgtacatccgaatttgtg

SEQ ID NO: 1099 - DNA, 20 bp, Homo sapiens
  source 1..20: mol_type = unassigned DNA
acgctgtatatccgaatttg

SEQ ID NO: 1100 - DNA, 22 bp, Homo sapiens
  source 1..22: mol_type = unassigned DNA
actactgaccgttgactgttcc

SEQ ID NO: 1101 - DNA, 22 bp, Homo sapiens
  source 1..22: mol_type = unassigned DNA
actagattgtgagctcatcgag

SEQ ID NO: 1102 - DNA, 23 bp, Homo sapiens
  source 1..23: mol_type = unassigned DNA
actctgtatatccgaatttgttt

SEQ ID NO: 1103 - DNA, 20 bp, Homo sapiens
  source 1..20: mol_type = unassigned DNA
actgcacttgaccgctctga

SEQ ID NO: 1104 - DNA, 20 bp, Homo sapiens
  source 1..20: mol_type = unassigned DNA
actttcgtctgcacattggt

SEQ ID NO: 1105 - DNA, 23 bp, Homo sapiens
  source 1..23: mol_type = unassigned DNA
agagccttgccagggatttccag

SEQ ID NO: 1106 - DNA, 20 bp, Homo sapiens
  source 1..20: mol_type = unassigned DNA
agagtattctgcacattggt

SEQ ID NO: 1107 - DNA, 22 bp, Homo sapiens
  source 1..22: mol_type = unassigned DNA
agagtgggagttgaagaactgt

SEQ ID NO: 1108 - DNA, 19 bp, Homo sapiens
  source 1..19: mol_type = unassigned DNA
agattggaccagaccctga

SEQ ID NO: 1109 - DNA, 23 bp, Homo sapiens
  source 1..23: mol_type = unassigned DNA
agcagcattgcacagggctctga

SEQ ID NO: 1110 - DNA, 21 bp, Homo sapiens
  source 1..21: mol_type = unassigned DNA
agcgtctcagactgatgttga

SEQ ID NO: 1111 - DNA, 21 bp, Homo sapiens
  source 1..21: mol_type = unassigned DNA
agggcactggtagaattcgct

SEQ ID NO: 1112 - DNA, 21 bp, Homo sapiens
  source 1..21: mol_type = unassigned DNA
agggcacttgtagaattcact

SEQ ID NO: 1113 - DNA, 21 bp, Homo sapiens
  source 1..21: mol_type = unassigned DNA
agtgctgggctgtagtgcgct

SEQ ID NO: 1114 - DNA, 22 bp, Homo sapiens
  source 1..22: mol_type = unassigned DNA
ataacatggccagggatttcca

SEQ ID NO: 1115 - DNA, 22 bp, Homo sapiens
  source 1..22: mol_type = unassigned DNA
atagccattgtctgctgggttt

SEQ ID NO: 1116 - DNA, 23 bp, Homo sapiens
  source 1..23: mol_type = unassigned DNA
atcagaattgtacaggtctctga

SEQ ID NO: 1117 - DNA, 23 bp, Homo sapiens
  source 1..23: mol_type = unassigned DNA
atcagcattgtccaggtctatga

SEQ ID NO: 1118 - DNA, 21 bp, Homo sapiens
  source 1..21: mol_type = unassigned DNA
atcatatcagactgatgttga

SEQ ID NO: 1119 - DNA, 21 bp, Homo sapiens
  source 1..21: mol_type = unassigned DNA
atctgccatttgaagacctgt

SEQ ID NO: 1120 - DNA, 21 bp, Homo sapiens
  source 1..21: mol_type = unassigned DNA
atgacatttccagggatttcc

SEQ ID NO: 1121 - DNA, 22 bp, Homo sapiens
  source 1..22: mol_type = unassigned DNA
atgctgccagttgaagtagtgt

SEQ ID NO: 1122 - DNA, 21 bp, Homo sapiens
  source 1..21: mol_type = unassigned DNA
atggacattgtctgctgggtt

SEQ ID NO: 1123 - DNA, 22 bp, Homo sapiens
  source 1..22: mol_type = unassigned DNA
atggcacttgtagaattcaatg

SEQ ID NO: 1124 - DNA, 20 bp, Homo sapiens
  source 1..20: mol_type = unassigned DNA
atgtctttttggaaatagga

SEQ ID NO: 1125 - DNA, 23 bp, Homo sapiens
  source 1..23: mol_type = unassigned DNA
attctgcatcaggaactgattgt

SEQ ID NO: 1126 - DNA, 29 bp, Homo sapiens
  source 1..29: mol_type = unassigned DNA
attgggtccgagtgttgtgggttattgtt

SEQ ID NO: 1127 - DNA, 27 bp, Homo sapiens
  source 1..27: mol_type = unassigned DNA
caacatgatggaactgaggctctgagg

SEQ ID NO: 1128 - DNA, 21 bp, Homo sapiens
  source 1..21: mol_type = unassigned DNA
caagaccagtcgatgggctga

SEQ ID NO: 1129 - DNA, 23 bp, Homo sapiens
  source 1..23: mol_type = unassigned DNA
cacagttctgctcgtgcaggtag

SEQ ID NO: 1130 - DNA, 22 bp, Homo sapiens
  source 1..22: mol_type = unassigned DNA
caccaccagtcgatgggctatt

SEQ ID NO: 1131 - DNA, 21 bp, Homo sapiens
  source 1..21: mol_type = unassigned DNA
cacccccggtcgatgggctgt

SEQ ID NO: 1132 - DNA, 25 bp, Homo sapiens
  source 1..25: mol_type = unassigned DNA
cacgtcactagtggttccgtttagt

SEQ ID NO: 1133 - DNA, 22 bp, Homo sapiens
  source 1..22: mol_type = unassigned DNA
cagacctatgaattgacagtca

SEQ ID NO: 1134 - DNA, 22 bp, Homo sapiens
  source 1..22: mol_type = unassigned DNA
cagagtggtctctgggattatg

SEQ ID NO: 1135 - DNA, 22 bp, Homo sapiens
  source 1..22: mol_type = unassigned DNA
cagcgcctgtgacagcggctga

SEQ ID NO: 1136 - DNA, 22 bp, Homo sapiens
  source 1..22: mol_type = unassigned DNA
cagcgcgtttgacagcggctga

SEQ ID NO: 1137 - DNA, 20 bp, Homo sapiens
  source 1..20: mol_type = unassigned DNA
caggagtgtgcacattggtt

SEQ ID NO: 1138 - DNA, 23 bp, Homo sapiens
  source 1..23: mol_type = unassigned DNA
cagttcggagttagctcaagcgg

SEQ ID NO: 1139 - DNA, 21 bp, Homo sapiens
  source 1..21: mol_type = unassigned DNA
catggtacttgtctcggtctg

SEQ ID NO: 1140 - DNA, 23 bp, Homo sapiens
  source 1..23: mol_type = unassigned DNA
ccaagtgtttagactacctgttc

SEQ ID NO: 1141 - DNA, 20 bp, Homo sapiens
  source 1..20: mol_type = unassigned DNA
cccaccctcagatcagacgt

SEQ ID NO: 1142 - DNA, 22 bp, Homo sapiens
  source 1..22: mol_type = unassigned DNA
cccagttttcagactagctgtt

SEQ ID NO: 1143 - DNA, 25 bp, Homo sapiens
  source 1..25: mol_type = unassigned DNA
cccatctgactccttttcttctaga

SEQ ID NO: 1144 - DNA, 23 bp, Homo sapiens
  source 1..23: mol_type = unassigned DNA
ccccgtctcgtcgcgcgcgcgtc

SEQ ID NO: 1145 - DNA, 23 bp, Homo sapiens
  source 1..23: mol_type = unassigned DNA
ccctggtcggagttagctcaagc

SEQ ID NO: 1146 - DNA, 23 bp, Homo sapiens
  source 1..23: mol_type = unassigned DNA
ccgagtgttcagactatctgttc

SEQ ID NO: 1147 - DNA, 27 bp, Homo sapiens
  source 1..27: mol_type = unassigned DNA
ccgcggggccccggcggcgggggcacg

SEQ ID NO: 1148 - DNA, 23 bp, Homo sapiens
  source 1..23: mol_type = unassigned DNA
cctagttttcagactagctgttc

SEQ ID NO: 1149 - DNA, 27 bp, Homo sapiens
  source 1..27: mol_type = unassigned DNA
cctcggactaccgggtgctgtaggctt

SEQ ID NO: 1150 - DNA, 20 bp, Homo sapiens
  source 1..20: mol_type = unassigned DNA
cctgagccagcagatcgagt

SEQ ID NO: 1151 - DNA, 22 bp, Homo sapiens
  source 1..22: mol_type = unassigned DNA
cgagcaccagctgaaatcggtt

SEQ ID NO: 1152 - DNA, 20 bp, Homo sapiens
  source 1..20: mol_type = unassigned DNA
cgagccccatctgaaatcgg

SEQ ID NO: 1153 - DNA, 21 bp, Homo sapiens
  source 1..21: mol_type = unassigned DNA
cgggacgcgagccgggccctt

SEQ ID NO: 1154 - DNA, 21 bp, Homo sapiens
  source 1..21: mol_type = unassigned DNA
cgtgctgtcggatgtttacag

SEQ ID NO: 1155 - DNA, 21 bp, Homo sapiens
  source 1..21: mol_type = unassigned DNA
ctatctcccccgctccccgtc

SEQ ID NO: 1156 - DNA, 20 bp, Homo sapiens
  source 1..20: mol_type = unassigned DNA
ctatctctctcccccgctcc

SEQ ID NO: 1157 - DNA, 22 bp, Homo sapiens
  source 1..22: mol_type = unassigned DNA
ctctgcgggtgacagcggctga

SEQ ID NO: 1158 - DNA, 23 bp, Homo sapiens
  source 1..23: mol_type = unassigned DNA
ctctgcgtgtgacagcggctgag

SEQ ID NO: 1159 - DNA, 22 bp, Homo sapiens
  source 1..22: mol_type = unassigned DNA
ctgccctgaagctccttgaggt

SEQ ID NO: 1160 - DNA, 16 bp, Homo sapiens
  source 1..16: mol_type = unassigned DNA
ctggcttagcgtcgct

SEQ ID NO: 1161 - DNA, 23 bp, Homo sapiens
  source 1..23: mol_type = unassigned DNA
ctgggtcggtcgggctggggcgg

SEQ ID NO: 1162 - DNA, 22 bp, Homo sapiens
  source 1..22: mol_type = unassigned DNA
cttatcatattgtattgtgatt

SEQ ID NO: 1163 - DNA, 21 bp, Homo sapiens
  source 1..21: mol_type = unassigned DNA
ctttcatgcggatgtttaaag

SEQ ID NO: 1164 - DNA, 23 bp, Homo sapiens
  source 1..23: mol_type = unassigned DNA
gcaaccatccttgactggcagct

SEQ ID NO: 1165 - DNA, 19 bp, Homo sapiens
  source 1..19: mol_type = unassigned DNA
gcatcagtggcctaatgga

SEQ ID NO: 1166 - DNA, 22 bp, Homo sapiens
  source 1..22: mol_type = unassigned DNA
gcgcgctccgcggctggacgag

SEQ ID NO: 1167 - DNA, 21 bp, Homo sapiens
  source 1..21: mol_type = unassigned DNA
gcgcgctcgccggccgaggtg

SEQ ID NO: 1168 - DNA, 18 bp, Homo sapiens
  source 1..18: mol_type = unassigned DNA
gcgggtggtgtgcgtcgg

SEQ ID NO: 1169 - DNA, 23 bp, Homo sapiens
  source 1..23: mol_type = unassigned DNA
ggacgccggtgaaataccactac

SEQ ID NO: 1170 - DNA, 28 bp, Homo sapiens
  source 1..28: mol_type = unassigned DNA
ggacgccggtgaaataccactactctga

SEQ ID NO: 1171 - DNA, 20 bp, Homo sapiens
  source 1..20: mol_type = unassigned DNA
ggagatcagactgatgttga

SEQ ID NO: 1172 - DNA, 27 bp, Homo sapiens
  source 1..27: mol_type = unassigned DNA
ggagccggtgaaataccactactctga

SEQ ID NO: 1173 - DNA, 23 bp, Homo sapiens
  source 1..23: mol_type = unassigned DNA
ggagcttatcagactgatcttga

SEQ ID NO: 1174 - DNA, 20 bp, Homo sapiens
  source 1..20: mol_type = unassigned DNA
ggaggaaggaggttgtgtgg

SEQ ID NO: 1175 - DNA, 22 bp, Homo sapiens
  source 1..22: mol_type = unassigned DNA
ggaggaagtaggttgtgtggtt

SEQ ID NO: 1176 - DNA, 25 bp, Homo sapiens
  source 1..25: mol_type = unassigned DNA
ggccgcgccgtcgggcccgggggag

SEQ ID NO: 1177 - DNA, 22 bp, Homo sapiens
  source 1..22: mol_type = unassigned DNA
ggcctcaggtaccatgaccgag

SEQ ID NO: 1178 - DNA, 23 bp, Homo sapiens
  source 1..23: mol_type = unassigned DNA
ggcgttctgggctgtagtgcgct

SEQ ID NO: 1179 - DNA, 19 bp, Homo sapiens
  source 1..19: mol_type = unassigned DNA
gggcgctttgcctaatgga

SEQ ID NO: 1180 - DNA, 22 bp, Homo sapiens
  source 1..22: mol_type = unassigned DNA
gggggattatgactgaacgcct

SEQ ID NO: 1181 - DNA, 22 bp, Homo sapiens
  source 1..22: mol_type = unassigned DNA
gtagcttatcagactgatcttg

SEQ ID NO: 1182 - DNA, 23 bp, Homo sapiens
  source 1..23: mol_type = unassigned DNA
gtagcttatcatactgctgttga

SEQ ID NO: 1183 - DNA, 23 bp, Homo sapiens
  source 1..23: mol_type = unassigned DNA
gtatcttatccgactgatgttga

SEQ ID NO: 1184 - DNA, 21 bp, Homo sapiens
  source 1..21: mol_type = unassigned DNA
gtcccgtcctgtgatagctga

SEQ ID NO: 1185 - DNA, 24 bp, Homo sapiens
  source 1..24: mol_type = unassigned DNA
gtcgtcttggccgagtggttaagg

SEQ ID NO: 1186 - DNA, 23 bp, Homo sapiens
  source 1..23: mol_type = unassigned DNA
gtgacatttttaggaccattaga

SEQ ID NO: 1187 - DNA, 19 bp, Homo sapiens
  source 1..19: mol_type = unassigned DNA
gtgccattggcgcaatggc

SEQ ID NO: 1188 - DNA, 22 bp, Homo sapiens
  source 1..22: mol_type = unassigned DNA
gtgcgctcgccgcggctggacg

SEQ ID NO: 1189 - DNA, 22 bp, Homo sapiens
  source 1..22: mol_type = unassigned DNA
gtgtgcgcgccgcggctggacg

SEQ ID NO: 1190 - DNA, 22 bp, Homo sapiens
  source 1..22: mol_type = unassigned DNA
gttaccatccttgactggcagc

SEQ ID NO: 1191 - DNA, 21 bp, Homo sapiens
  source 1..21: mol_type = unassigned DNA
gttttcggaactgcggccatg

SEQ ID NO: 1192 - DNA, 23 bp, Homo sapiens
  source 1..23: mol_type = unassigned DNA
taaagcaggcacagacaggcaga

SEQ ID NO: 1193 - DNA, 22 bp, Homo sapiens
  source 1..22: mol_type = unassigned DNA
taaagtactgtgataactggac

SEQ ID NO: 1194 - DNA, 20 bp, Homo sapiens
  source 1..20: mol_type = unassigned DNA
taaagtactgttataacttc

SEQ ID NO: 1195 - DNA, 22 bp, Homo sapiens
  source 1..22: mol_type = unassigned DNA
taaagtagtatgcacattggtt

SEQ ID NO: 1196 - DNA, 23 bp, Homo sapiens
  source 1..23: mol_type = unassigned DNA
taacacagtgtagaaccacggac

SEQ ID NO: 1197 - DNA, 21 bp, Homo sapiens
  source 1..21: mol_type = unassigned DNA
taacttatcacactgatgttg

SEQ ID NO: 1198 - DNA, 20 bp, Homo sapiens
  source 1..20: mol_type = unassigned DNA
taagattaagcactgtcgtt

SEQ ID NO: 1199 - DNA, 23 bp, Homo sapiens
  source 1..23: mol_type = unassigned DNA
taagctcagctggcaactgtgag

SEQ ID NO: 1200 - DNA, 20 bp, Homo sapiens
  source 1..20: mol_type = unassigned DNA
taagcttaagcactgtcgca

SEQ ID NO: 1201 - DNA, 22 bp, Homo sapiens
  source 1..22: mol_type = unassigned DNA
taaggtattaggttgtcttgtt

SEQ ID NO: 1202 - DNA, 22 bp, Homo sapiens
  source 1..22: mol_type = unassigned DNA
taaggtggtaggttgtctagtt

SEQ ID NO: 1203 - DNA, 23 bp, Homo sapiens
  source 1..23: mol_type = unassigned DNA
taagttgtcagactgatgttgaa

SEQ ID NO: 1204 - DNA, 21 bp, Homo sapiens
  source 1..21: mol_type = unassigned DNA
taagttgtcagactgttgttg

SEQ ID NO: 1205 - DNA, 22 bp, Homo sapiens
  source 1..22: mol_type = unassigned DNA
tacaatactgtgataaatgaac

SEQ ID NO: 1206 - DNA, 21 bp, Homo sapiens
  source 1..21: mol_type = unassigned DNA
tacaccgttgctaagttctgc

SEQ ID NO: 1207 - DNA, 21 bp, Homo sapiens
  source 1..21: mol_type = unassigned DNA
tacagtattctgcacatttgt

SEQ ID NO: 1208 - DNA, 21 bp, Homo sapiens
  source 1..21: mol_type = unassigned DNA
taccctatagatccgattttg

SEQ ID NO: 1209 - DNA, 22 bp, Homo sapiens
  source 1..22: mol_type = unassigned DNA
taccctgtagctcagactttgt

SEQ ID NO: 1210 - DNA, 21 bp, Homo sapiens
  source 1..21: mol_type = unassigned DNA
tacccttaagaactgtagctc

SEQ ID NO: 1211 - DNA, 22 bp, Homo sapiens
  source 1..22: mol_type = unassigned DNA
taccctttagctcagaatttgt

SEQ ID NO: 1212 - DNA, 21 bp, Homo sapiens
  source 1..21: mol_type = unassigned DNA
taccttgtcagactgaagttg

SEQ ID NO: 1213 - DNA, 20 bp, Homo sapiens
  source 1..20: mol_type = unassigned DNA
tacgatgaatcactgtagct

SEQ ID NO: 1214 - DNA, 22 bp, Homo sapiens
  source 1..22: mol_type = unassigned DNA
tactttatctgactgatgttga

SEQ ID NO: 1215 - DNA, 22 bp, Homo sapiens
  source 1..22: mol_type = unassigned DNA
tactttgtcagactgaagttga

SEQ ID NO: 1216 - DNA, 20 bp, Homo sapiens
  source 1..20: mol_type = unassigned DNA
tagaccgtggctaagttctg

SEQ ID NO: 1217 - DNA, 21 bp, Homo sapiens
  source 1..21: mol_type = unassigned DNA
tagcatcatcttaaatcgttt

SEQ ID NO: 1218 - DNA, 22 bp, Homo sapiens
  source 1..22: mol_type = unassigned DNA
tagcctaacacactgatgttga

SEQ ID NO: 1219 - DNA, 22 bp, Homo sapiens
  source 1..22: mol_type = unassigned DNA
tagcctatagatccgattttga

SEQ ID NO: 1220 - DNA, 22 bp, Homo sapiens
  source 1..22: mol_type = unassigned DNA
tagcgtattaggttgtcttgtt

SEQ ID NO: 1221 - DNA, 22 bp, Homo sapiens
  source 1..22: mol_type = unassigned DNA
tagcgtggtaggttgtatcgtt

SEQ ID NO: 1222 - DNA, 22 bp, Homo sapiens
  source 1..22: mol_type = unassigned DNA
tagctcagttcagcaggaagag

SEQ ID NO: 1223 - DNA, 22 bp, Homo sapiens
  source 1..22: mol_type = unassigned DNA
tagcttagaagactgatattga

SEQ ID NO: 1224 - DNA, 21 bp, Homo sapiens
  source 1..21: mol_type = unassigned DNA
tagcttagcacactgatgttg

SEQ ID NO: 1225 - DNA, 23 bp, Homo sapiens
  source 1..23: mol_type = unassigned DNA
tagcttagcagactgtagatgac

SEQ ID NO: 1226 - DNA, 21 bp, Homo sapiens
  source 1..21: mol_type = unassigned DNA
tagcttagcagacttatgttg

SEQ ID NO: 1227 - DNA, 22 bp, Homo sapiens
  source 1..22: mol_type = unassigned DNA
tagcttagcagtctgatgttga

SEQ ID NO: 1228 - DNA, 22 bp, Homo sapiens
  source 1..22: mol_type = unassigned DNA
tagcttatcagcctaatgttgc

SEQ ID NO: 1229 - DNA, 22 bp, Homo sapiens
  source 1..22: mol_type = unassigned DNA
tagcttatcagccttctgttga

SEQ ID NO: 1230 - DNA, 22 bp, Homo sapiens
  source 1..22: mol_type = unassigned DNA
tagcttatcagggttatgttga

SEQ ID NO: 1231 - DNA, 22 bp, Homo sapiens
  source 1..22: mol_type = unassigned DNA
tagcttatcagtctgacgttga

SEQ ID NO: 1232 - DNA, 23 bp, Homo sapiens
  source 1..23: mol_type = unassigned DNA
tagcttatctgactgaggttgac

SEQ ID NO: 1233 - DNA, 23 bp, Homo sapiens
  source 1..23: mol_type = unassigned DNA
tagcttatgagactgatggtgac

SEQ ID NO: 1234 - DNA, 20 bp, Homo sapiens
  source 1..20: mol_type = unassigned DNA
tagcttgtcagactgaagtt

SEQ ID NO: 1235 - DNA, 22 bp, Homo sapiens
  source 1..22: mol_type = unassigned DNA
tagcttgtcagactgatattga

SEQ ID NO: 1236 - DNA, 22 bp, Homo sapiens
  source 1..22: mol_type = unassigned DNA
tagcttgtcagcctgatggtga

SEQ ID NO: 1237 - DNA, 22 bp, Homo sapiens
  source 1..22: mol_type = unassigned DNA
tagcttgtcaggctgaagctga

SEQ ID NO: 1238 - DNA, 21 bp, Homo sapiens
  source 1..21: mol_type = unassigned DNA
tagggtagtagtttgtatagt

SEQ ID NO: 1239 - DNA, 22 bp, Homo sapiens
  source 1..22: mol_type = unassigned DNA
tagggtagtagtttgtccagtt

SEQ ID NO: 1240 - DNA, 22 bp, Homo sapiens
  source 1..22: mol_type = unassigned DNA
taggttatccgactgatgttgc

SEQ ID NO: 1241 - DNA, 22 bp, Homo sapiens
  source 1..22: mol_type = unassigned DNA
taggttatccgcctgatgttga

SEQ ID NO: 1242 - DNA, 20 bp, Homo sapiens
  source 1..20: mol_type = unassigned DNA
tagtgtagtaggttgtgttg

SEQ ID NO: 1243 - DNA, 20 bp, Homo sapiens
  source 1..20: mol_type = unassigned DNA
tagtgtattaggttgtgtgg

SEQ ID NO: 1244 - DNA, 22 bp, Homo sapiens
  source 1..22: mol_type = unassigned DNA
tagtttagcagactgaagatga

SEQ ID NO: 1245 - DNA, 21 bp, Homo sapiens
  source 1..21: mol_type = unassigned DNA
tagtttatcagattgatgttg

SEQ ID NO: 1246 - DNA, 22 bp, Homo sapiens
  source 1..22: mol_type = unassigned DNA
tatacttaagcactgtagatct

SEQ ID NO: 1247 - DNA, 22 bp, Homo sapiens
  source 1..22: mol_type = unassigned DNA
tatagtaatctgcacattggtt

SEQ ID NO: 1248 - DNA, 20 bp, Homo sapiens
  source 1..20: mol_type = unassigned DNA
tatagtagtaggttgtgggg

SEQ ID NO: 1249 - DNA, 22 bp, Homo sapiens
  source 1..22: mol_type = unassigned DNA
tatagtattagtttgtatagtt

SEQ ID NO: 1250 - DNA, 22 bp, Homo sapiens
  source 1..22: mol_type = unassigned DNA
tatatacctcttcgactggaag

SEQ ID NO: 1251 - DNA, 21 bp, Homo sapiens
  source 1..21: mol_type = unassigned DNA
tatcctgtagatccgagtttg

SEQ ID NO: 1252 - DNA, 22 bp, Homo sapiens
  source 1..22: mol_type = unassigned DNA
tatcctttagaacagactttgt

SEQ ID NO: 1253 - DNA, 22 bp, Homo sapiens
  source 1..22: mol_type = unassigned DNA
tatcctttagatcagactttgt

SEQ ID NO: 1254 - DNA, 23 bp, Homo sapiens
  source 1..23: mol_type = unassigned DNA
tatcctttagatccgaatttgtt

SEQ ID NO: 1255 - DNA, 22 bp, Homo sapiens
  source 1..22: mol_type = unassigned DNA
tatggtattaggttgtctcgtt

SEQ ID NO: 1256 - DNA, 29 bp, Homo sapiens
  source 1..29: mol_type = unassigned DNA
tcaaagtttccgggttcgtgtcccggcgg

SEQ ID NO: 1257 - DNA, 22 bp, Homo sapiens
  source 1..22: mol_type = unassigned DNA
tcagtgcgctagagaactctgt

SEQ ID NO: 1258 - DNA, 22 bp, Homo sapiens
  source 1..22: mol_type = unassigned DNA
tccctgataccctaacctgtga

SEQ ID NO: 1259 - DNA, 22 bp, Homo sapiens
  source 1..22: mol_type = unassigned DNA
tcctgaagtaggttgtatagtt

SEQ ID NO: 1260 - DNA, 22 bp, Homo sapiens
  source 1..22: mol_type = unassigned DNA
tcgaattaagcactgtagctca

SEQ ID NO: 1261 - DNA, 21 bp, Homo sapiens
  source 1..21: mol_type = unassigned DNA
tcgttgcacgacagaactttg

SEQ ID NO: 1262 - DNA, 22 bp, Homo sapiens
  source 1..22: mol_type = unassigned DNA
tctatgcaccacagaactttgt

SEQ ID NO: 1263 - DNA, 21 bp, Homo sapiens
  source 1..21: mol_type = unassigned DNA
tctgtgcacgacagaactttg

SEQ ID NO: 1264 - DNA, 22 bp, Homo sapiens
  source 1..22: mol_type = unassigned DNA
tctgtgcactccagaaatttgt

SEQ ID NO: 1265 - DNA, 20 bp, Homo sapiens
  source 1..20: mol_type = unassigned DNA
tgaacagttgctaagttctg

SEQ ID NO: 1266 - DNA, 20 bp, Homo sapiens
  source 1..20: mol_type = unassigned DNA
tgagatgaagcactgtgtgg

SEQ ID NO: 1267 - DNA, 22 bp, Homo sapiens
  source 1..22: mol_type = unassigned DNA
tgagatgacacactgttgttct

SEQ ID NO: 1268 - DNA, 22 bp, Homo sapiens
  source 1..22: mol_type = unassigned DNA
tgagatggagcactttcgctct

SEQ ID NO: 1269 - DNA, 21 bp, Homo sapiens
  source 1..21: mol_type = unassigned DNA
tgagattaagaactgtcgttc

SEQ ID NO: 1270 - DNA, 20 bp, Homo sapiens
  source 1..20: mol_type = unassigned DNA
tgagcagttgctaagttccg

SEQ ID NO: 1271 - DNA, 20 bp, Homo sapiens
  source 1..20: mol_type = unassigned DNA
tgagcagttgctaagttctg

SEQ ID NO: 1272 - DNA, 22 bp, Homo sapiens
  source 1..22: mol_type = unassigned DNA
tgagccgaatctccaggggtaa

SEQ ID NO: 1273 - DNA, 20 bp, Homo sapiens
  source 1..20: mol_type = unassigned DNA
tgagccgtggctaagttctg

SEQ ID NO: 1274 - DNA, 20 bp, Homo sapiens
  source 1..20: mol_type = unassigned DNA
tgagcttaagccctgtaggt

SEQ ID NO: 1275 - DNA, 22 bp, Homo sapiens
  source 1..22: mol_type = unassigned DNA
tgaggtaataggttgtcttgtt

SEQ ID NO: 1276 - DNA, 22 bp, Homo sapiens
  source 1..22: mol_type = unassigned DNA
tgaggtagtaggttgtgcggct

SEQ ID NO: 1277 - DNA, 20 bp, Homo sapiens
  source 1..20: mol_type = unassigned DNA
tgaggtattagattgtctcg

SEQ ID NO: 1278 - DNA, 23 bp, Homo sapiens
  source 1..23: mol_type = unassigned DNA
tgaggtattaggttgtcttgttt

SEQ ID NO: 1279 - DNA, 23 bp, Homo sapiens
  source 1..23: mol_type = unassigned DNA
tgaggtattaggttgttttgtta

SEQ ID NO: 1280 - DNA, 22 bp, Homo sapiens
  source 1..22: mol_type = unassigned DNA
tgaggtcgttcgtcttatagtt

SEQ ID NO: 1281 - DNA, 22 bp, Homo sapiens
  source 1..22: mol_type = unassigned DNA
tgagttagcagacttatgttga

SEQ ID NO: 1282 - DNA, 22 bp, Homo sapiens
  source 1..22: mol_type = unassigned DNA
tgagttataagactgatggtga

SEQ ID NO: 1283 - DNA, 22 bp, Homo sapiens
  source 1..22: mol_type = unassigned DNA
tgagttatcagacttttgttga

SEQ ID NO: 1284 - DNA, 22 bp, Homo sapiens
  source 1..22: mol_type = unassigned DNA
tgagttgtcagaatgatgttga

SEQ ID NO: 1285 - DNA, 21 bp, Homo sapiens
  source 1..21: mol_type = unassigned DNA
tgagttgtcagactgacgttg

SEQ ID NO: 1286 - DNA, 20 bp, Homo sapiens
  source 1..20: mol_type = unassigned DNA
tgatattaagaactgtcgct

SEQ ID NO: 1287 - DNA, 20 bp, Homo sapiens
  source 1..20: mol_type = unassigned DNA
tgcacagttgctaagttctg

SEQ ID NO: 1288 - DNA, 23 bp, Homo sapiens
  source 1..23: mol_type = unassigned DNA
tgccctgtggactcagttctggg

SEQ ID NO: 1289 - DNA, 22 bp, Homo sapiens
  source 1..22: mol_type = unassigned DNA
tgccttatcagacggatgttga

SEQ ID NO: 1290 - DNA, 20 bp, Homo sapiens
  source 1..20: mol_type = unassigned DNA
tgcgatattaggttgtgtgg

SEQ ID NO: 1291 - DNA, 23 bp, Homo sapiens
  source 1..23: mol_type = unassigned DNA
tgcggtagtcggttgtgtggttt

SEQ ID NO: 1292 - DNA, 22 bp, Homo sapiens
  source 1..22: mol_type = unassigned DNA
tgcggtattagattgtctggtt

SEQ ID NO: 1293 - DNA, 23 bp, Homo sapiens
  source 1..23: mol_type = unassigned DNA
tgctatgccaacatattgccctc

SEQ ID NO: 1294 - DNA, 22 bp, Homo sapiens
  source 1..22: mol_type = unassigned DNA
tgctattaagcactgtgggtct

SEQ ID NO: 1295 - DNA, 21 bp, Homo sapiens
  source 1..21: mol_type = unassigned DNA
tgctcttcagcactgtagcta

SEQ ID NO: 1296 - DNA, 22 bp, Homo sapiens
  source 1..22: mol_type = unassigned DNA
tgctgtaataggttgtctcgtt

SEQ ID NO: 1297 - DNA, 21 bp, Homo sapiens
  source 1..21: mol_type = unassigned DNA
tgctgtagtagtttgtccagt

SEQ ID NO: 1298 - DNA, 22 bp, Homo sapiens
  source 1..22: mol_type = unassigned DNA
tggcttatcagacggatggtga

SEQ ID NO: 1299 - DNA, 22 bp, Homo sapiens
  source 1..22: mol_type = unassigned DNA
tggcttatcagcctgatgctga

SEQ ID NO: 1300 - DNA, 22 bp, Homo sapiens
  source 1..22: mol_type = unassigned DNA
tgtaacatcaaccccatgtgga

SEQ ID NO: 1301 - DNA, 20 bp, Homo sapiens
  source 1..20: mol_type = unassigned DNA
tgtagcactggtagaactca

SEQ ID NO: 1302 - DNA, 20 bp, Homo sapiens
  source 1..20: mol_type = unassigned DNA
ttaacagttgctaagttccg

SEQ ID NO: 1303 - DNA, 20 bp, Homo sapiens
  source 1..20: mol_type = unassigned DNA
ttaggtagtaggtcgtgtgg

SEQ ID NO: 1304 - DNA, 20 bp, Homo sapiens
  source 1..20: mol_type = unassigned DNA
ttaggtagttggttgtatag

SEQ ID NO: 1305 - DNA, 20 bp, Homo sapiens
  source 1..20: mol_type = unassigned DNA
ttatcttcagcactgtcgct

SEQ ID NO: 1306 - DNA, 22 bp, Homo sapiens
  source 1..22: mol_type = unassigned DNA
ttcatagtatttaccaaccagt

SEQ ID NO: 1307 - DNA, 23 bp, Homo sapiens
  source 1..23: mol_type = unassigned DNA
ttcatgctaatcgtgatacgggt

SEQ ID NO: 1308 - DNA, 22 bp, Homo sapiens
  source 1..22: mol_type = unassigned DNA
ttccataacagactgatgttga

SEQ ID NO: 1309 - DNA, 22 bp, Homo sapiens
  source 1..22: mol_type = unassigned DNA
ttccctatgtattgacagccag

SEQ ID NO: 1310 - DNA, 20 bp, Homo sapiens
  source 1..20: mol_type = unassigned DNA
ttccgtattaggttgtatag

SEQ ID NO: 1311 - DNA, 22 bp, Homo sapiens
  source 1..22: mol_type = unassigned DNA
ttcctaatcagactgatgttga

SEQ ID NO: 1312 - DNA, 22 bp, Homo sapiens
  source 1..22: mol_type = unassigned DNA
ttcggtattagattgtatcgtt

SEQ ID NO: 1313 - DNA, 21 bp, Homo sapiens
  source 1..21: mol_type = unassigned DNA
ttctacccacgtctgctctga

SEQ ID NO: 1314 - DNA, 22 bp, Homo sapiens
  source 1..22: mol_type = unassigned DNA
ttctataaagcactgtcgttct

SEQ ID NO: 1315 - DNA, 22 bp, Homo sapiens
  source 1..22: mol_type = unassigned DNA
ttctatattaggttgtctcgtt

SEQ ID NO: 1316 - DNA, 22 bp, Homo sapiens
  source 1..22: mol_type = unassigned DNA
ttctctatgaattgacacccag

SEQ ID NO: 1317 - DNA, 22 bp, Homo sapiens
  source 1..22: mol_type = unassigned DNA
ttctggggtaggttgtgtggtt

SEQ ID NO: 1318 - DNA, 22 bp, Homo sapiens
  source 1..22: mol_type = unassigned DNA
ttctgtaataggttgtcttgtt

SEQ ID NO: 1319 - DNA, 21 bp, Homo sapiens
  source 1..21: mol_type = unassigned DNA
ttctgtaatagtttgtatagt

SEQ ID NO: 1320 - DNA, 22 bp, Homo sapiens
  source 1..22: mol_type = unassigned DNA
ttctgtagtagtttgtatcgtt

SEQ ID NO: 1321 - DNA, 21 bp, Homo sapiens
  source 1..21: mol_type = unassigned DNA
ttctgtagtagtttgtctagt

SEQ ID NO: 1322 - DNA, 22 bp, Homo sapiens
  source 1..22: mol_type = unassigned DNA
ttctgtagttggttgtatggtt

SEQ ID NO: 1323 - DNA, 21 bp, Homo sapiens
  source 1..21: mol_type = unassigned DNA
ttctgtattagattgtataga

SEQ ID NO: 1324 - DNA, 22 bp, Homo sapiens
  source 1..22: mol_type = unassigned DNA
ttctgtattagattgtctggtt

SEQ ID NO: 1325 - DNA, 20 bp, Homo sapiens
  source 1..20: mol_type = unassigned DNA
ttctgtattaggttgtctcg

SEQ ID NO: 1326 - DNA, 23 bp, Homo sapiens
  source 1..23: mol_type = unassigned DNA
ttctgtattaggttgtctcgttt

SEQ ID NO: 1327 - DNA, 22 bp, Homo sapiens
  source 1..22: mol_type = unassigned DNA
ttctgtattaggttgtgtcgtt

SEQ ID NO: 1328 - DNA, 23 bp, Homo sapiens
  source 1..23: mol_type = unassigned DNA
ttctgtattaggttgtgttgttt

SEQ ID NO: 1329 - DNA, 22 bp, Homo sapiens
  source 1..22: mol_type = unassigned DNA
ttctgtattaggttgttttgtt

SEQ ID NO: 1330 - DNA, 22 bp, Homo sapiens
  source 1..22: mol_type = unassigned DNA
ttctgtattagtttgtcttgtt

SEQ ID NO: 1331 - DNA, 22 bp, Homo sapiens
  source 1..22: mol_type = unassigned DNA
ttctgtgttaggttgtctcgtt

SEQ ID NO: 1332 - DNA, 22 bp, Homo sapiens
  source 1..22: mol_type = unassigned DNA
ttctttagcagactgaagatga

SEQ ID NO: 1333 - DNA, 22 bp, Homo sapiens
  source 1..22: mol_type = unassigned DNA
ttctttagcagactgaagttga

SEQ ID NO: 1334 - DNA, 21 bp, Homo sapiens
  source 1..21: mol_type = unassigned DNA
ttctttatcaaactgatgttg

SEQ ID NO: 1335 - DNA, 22 bp, Homo sapiens
  source 1..22: mol_type = unassigned DNA
ttctttatcacactgttgttga

SEQ ID NO: 1336 - DNA, 22 bp, Homo sapiens
  source 1..22: mol_type = unassigned DNA
ttctttattacactgatgttga

SEQ ID NO: 1337 - DNA, 22 bp, Homo sapiens
  source 1..22: mol_type = unassigned DNA
ttctttattagtttgtgtggtt

SEQ ID NO: 1338 - DNA, 22 bp, Homo sapiens
  source 1..22: mol_type = unassigned DNA
ttctttgtcacactgatgttga

SEQ ID NO: 1339 - DNA, 22 bp, Homo sapiens
  source 1..22: mol_type = unassigned DNA
ttgcatgtcagactgaagctga

SEQ ID NO: 1340 - DNA, 22 bp, Homo sapiens
  source 1..22: mol_type = unassigned DNA
ttgctcatttcagcaggagcag

SEQ ID NO: 1341 - DNA, 21 bp, Homo sapiens
  source 1..21: mol_type = unassigned DNA
ttgcttatcagacggatgttg

SEQ ID NO: 1342 - DNA, 20 bp, Homo sapiens
  source 1..20: mol_type = unassigned DNA
ttggagactatggcacgtag

SEQ ID NO: 1343 - DNA, 19 bp, Homo sapiens
  source 1..19: mol_type = unassigned DNA
ttggcttaagcactgtaga

SEQ ID NO: 1344 - DNA, 22 bp, Homo sapiens
  source 1..22: mol_type = unassigned DNA
ttggcttaagcactgtaggtct

SEQ ID NO: 1345 - DNA, 22 bp, Homo sapiens
  source 1..22: mol_type = unassigned DNA
ttggcttaagcactgtgggtct

SEQ ID NO: 1346 - DNA, 21 bp, Homo sapiens
  source 1..21: mol_type = unassigned DNA
ttgggtaggaggttgtataga

SEQ ID NO: 1347 - DNA, 21 bp, Homo sapiens
  source 1..21: mol_type = unassigned DNA
ttgggtagtacgttgtatagt

SEQ ID NO: 1348 - DNA, 22 bp, Homo sapiens
  source 1..22: mol_type = unassigned DNA
ttgggtagtagattgtctggtt

SEQ ID NO: 1349 - DNA, 22 bp, Homo sapiens
  source 1..22: mol_type = unassigned DNA
ttggtaatcagactgatgttga

SEQ ID NO: 1350 - DNA, 22 bp, Homo sapiens
  source 1..22: mol_type = unassigned DNA
ttggtaatcagactgatgttga

SEQ ID NO: 1351 - DNA, 22 bp, Homo sapiens
  source 1..22: mol_type = unassigned DNA
ttggtcagttcagcaggcacag

SEQ ID NO: 1352 - DNA, 22 bp, Homo sapiens
  source 1..22: mol_type = unassigned DNA
ttggtcatcagactgatgttga

SEQ ID NO: 1353 - DNA, 22 bp, Homo sapiens
  source 1..22: mol_type = unassigned DNA
ttggttagcagacttatgttga

SEQ ID NO: 1354 - DNA, 22 bp, Homo sapiens
  source 1..22: mol_type = unassigned DNA
ttggttatcagactgatgttgg

SEQ ID NO: 1355 - DNA, 22 bp, Homo sapiens
  source 1..22: mol_type = unassigned DNA
ttggttattaggttgtgtggtt

SEQ ID NO: 1356 - DNA, 21 bp, Homo sapiens
  source 1..21: mol_type = unassigned DNA
ttggttgtcagactgatgttg

SEQ ID NO: 1357 - DNA, 21 bp, Homo sapiens
  source 1..21: mol_type = unassigned DNA
ttgtgtagtaggttgtctggt

SEQ ID NO: 1358 - DNA, 21 bp, Homo sapiens
  source 1..21: mol_type = unassigned DNA
ttgtgtattaggttgtataga

SEQ ID NO: 1359 - DNA, 23 bp, Homo sapiens
  source 1..23: mol_type = unassigned DNA
ttgtgtattaggttgtgtggtta

SEQ ID NO: 1360 - DNA, 22 bp, Homo sapiens
  source 1..22: mol_type = unassigned DNA
ttgttcatttcagcaggaacag

SEQ ID NO: 1361 - DNA, 21 bp, Homo sapiens
  source 1..21: mol_type = unassigned DNA
ttgtttatcaggctgatgttg

SEQ ID NO: 1362 - DNA, 24 bp, Homo sapiens
  source 1..24: mol_type = unassigned DNA
tttaaccatcctcgactgggagct

SEQ ID NO: 1363 - DNA, 24 bp, Homo sapiens
  source 1..24: mol_type = unassigned DNA
tttacacctcctacactctcagct

SEQ ID NO: 1364 - DNA, 22 bp, Homo sapiens
  source 1..22: mol_type = unassigned DNA
tttgctgaagcactgtagttct

SEQ ID NO: 1365 - DNA, 20 bp, Homo sapiens
  source 1..20: mol_type = unassigned DNA
tttgctggagcactgtagct

SEQ ID NO: 1366 - DNA, 21 bp, Homo sapiens
  source 1..21: mol_type = unassigned DNA
tttggtagtctgcacattggt

SEQ ID NO: 1367 - DNA, 24 bp, Homo sapiens
  source 1..24: mol_type = unassigned DNA
aaaagtgcttaccgtgcaggtagt

SEQ ID NO: 1368 - DNA, 22 bp, Homo sapiens
  source 1..22: mol_type = unassigned DNA
aagctgccagctccataactgt

SEQ ID NO: 1369 - DNA, 22 bp, Homo sapiens
  source 1..22: mol_type = unassigned DNA
aagcttccagctccataactgt

SEQ ID NO: 1370 - DNA, 22 bp, Homo sapiens
  source 1..22: mol_type = unassigned DNA
aattgcacggtgtccatctgta

SEQ ID NO: 1371 - DNA, 21 bp, Homo sapiens
  source 1..21: mol_type = unassigned DNA
aattttccagtaccgtgttgg

SEQ ID NO: 1372 - DNA, 28 bp, Homo sapiens
  source 1..28: mol_type = unassigned DNA
acaccatgatggcactgaggatctgcgg

SEQ ID NO: 1373 - DNA, 22 bp, Homo sapiens
  source 1..22: mol_type = unassigned DNA
aggagactctggacgcgagccg

SEQ ID NO: 1374 - DNA, 22 bp, Homo sapiens
  source 1..22: mol_type = unassigned DNA
atggaactgaggctctgaggaa

SEQ ID NO: 1375 - DNA, 23 bp, Homo sapiens
  source 1..23: mol_type = unassigned DNA
caaagtgctcatcgttcaggtag

SEQ ID NO: 1376 - DNA, 22 bp, Homo sapiens
  source 1..22: mol_type = unassigned DNA
cagaatgctgactagtagacta

SEQ ID NO: 1377 - DNA, 22 bp, Homo sapiens
  source 1..22: mol_type = unassigned DNA
cagctgccaggtgcataactgt

SEQ ID NO: 1378 - DNA, 22 bp, Homo sapiens
  source 1..22: mol_type = unassigned DNA
cagcttccagctgcatagctgt

SEQ ID NO: 1379 - DNA, 19 bp, Homo sapiens
  source 1..19: mol_type = unassigned DNA
ccaccatgatggaactgag

SEQ ID NO: 1380 - DNA, 22 bp, Homo sapiens
  source 1..22: mol_type = unassigned DNA
cgtagggacctgtatgaatggc

SEQ ID NO: 1381 - DNA, 22 bp, Homo sapiens
  source 1..22: mol_type = unassigned DNA
ctcgtacgacccttatcggtgg

SEQ ID NO: 1382 - DNA, 29 bp, Homo sapiens
  source 1..29: mol_type = unassigned DNA
ctggatgatgctcagcaaatgctgactga

SEQ ID NO: 1383 - DNA, 27 bp, Homo sapiens
  misc_difference 25: note = modified_base - a, c, t, g, unknown or other
  source 1..27: mol_type = unassigned DNA
gagggtgatgcgaactggagtctgngc

SEQ ID NO: 1384 - DNA, 22 bp, Homo sapiens
  source 1..22: mol_type = unassigned DNA
gcggtcggcgggcggcgggggc

SEQ ID NO: 1385 - DNA, 21 bp, Homo sapiens
  source 1..21: mol_type = unassigned DNA
gcttgtgatgacttacatgta

SEQ ID NO: 1386 - DNA, 22 bp, Homo sapiens
  source 1..22: mol_type = unassigned DNA
ggattcctggcactactgttct

SEQ ID NO: 1387 - DNA, 22 bp, Homo sapiens
  source 1..22: mol_type = unassigned DNA
gtacagtactgttataacttaa

SEQ ID NO: 1388 - DNA, 22 bp, Homo sapiens
  source 1..22: mol_type = unassigned DNA
taccctgcagaaccgcatctgt

SEQ ID NO: 1389 - DNA, 22 bp, Homo sapiens
  source 1..22: mol_type = unassigned DNA
tacctgctctacacaactttgt

SEQ ID NO: 1390 - DNA, 22 bp, Homo sapiens
  source 1..22: mol_type = unassigned DNA
tagctgccagtttcataactgt

SEQ ID NO: 1391 - DNA, 22 bp, Homo sapiens
  source 1..22: mol_type = unassigned DNA
taggtgatcagactcatgttga

SEQ ID NO: 1392 - DNA, 29 bp, Homo sapiens
  source 1..29: mol_type = unassigned DNA
tatgtgtgactgacaggtattttctgagc

SEQ ID NO: 1393 - DNA, 22 bp, Homo sapiens
  source 1..22: mol_type = unassigned DNA
tattttatcagagtgatcttga

SEQ ID NO: 1394 - DNA, 22 bp, Homo sapiens
  source 1..22: mol_type = unassigned DNA
tcaatgcactcccgaactttgt

SEQ ID NO: 1395 - DNA, 22 bp, Homo sapiens
  source 1..22: mol_type = unassigned DNA
tcagttatcagactgacgttta

SEQ ID NO: 1396 - DNA, 22 bp, Homo sapiens
  source 1..22: mol_type = unassigned DNA
tccctaagaccctcacttgtga

SEQ ID NO: 1397 - DNA, 30 bp, Homo sapiens
  source 1..30: mol_type = unassigned DNA
tccttggtggtctagtggttagtattcggc

SEQ ID NO: 1398 - DNA, 22 bp, Homo sapiens
  source 1..22: mol_type = unassigned DNA
tcggttcactacagaactgtgt

SEQ ID NO: 1399 - DNA, 21 bp, Homo sapiens
  source 1..21: mol_type = unassigned DNA
tcgtgtttagtactctgcgtt

SEQ ID NO: 1400 - DNA, 21 bp, Homo sapiens
  source 1..21: mol_type = unassigned DNA
tctcccaacccttgtacaatt

SEQ ID NO: 1401 - DNA, 21 bp, Homo sapiens
  source 1..21: mol_type = unassigned DNA
tctcttatcagattgatgttg

SEQ ID NO: 1402 - DNA, 26 bp, Homo sapiens
  source 1..26: mol_type = unassigned DNA
tctgagatttcaacttaacttgaccg

SEQ ID NO: 1403 - DNA, 22 bp, Homo sapiens
  source 1..22: mol_type = unassigned DNA
tctggcactggtagaagtcact

SEQ ID NO: 1404 - DNA, 22 bp, Homo sapiens
  source 1..22: mol_type = unassigned DNA
tgagatgaagcaccctacctct

SEQ ID NO: 1405 - DNA, 20 bp, Homo sapiens
  source 1..20: mol_type = unassigned DNA
tgagatgaagtagtgtacct

SEQ ID NO: 1406 - DNA, 22 bp, Homo sapiens
  source 1..22: mol_type = unassigned DNA
tgagatgtaacactgttgctct

SEQ ID NO: 1407 - DNA, 21 bp, Homo sapiens
  source 1..21: mol_type = unassigned DNA
tgtaaacatcctggactcgaa

SEQ ID NO: 1408 - DNA, 22 bp, Homo sapiens
  source 1..22: mol_type = unassigned DNA
ttacatgaagcagtgtacctct

SEQ ID NO: 1409 - DNA, 22 bp, Homo sapiens
  source 1..22: mol_type = unassigned DNA
ttagcactggtataattcactg

SEQ ID NO: 1410 - DNA, 22 bp, Homo sapiens
  source 1..22: mol_type = unassigned DNA
ttaggactgaggccttcttatt

SEQ ID NO: 1411 - DNA, 22 bp, Homo sapiens
  source 1..22: mol_type = unassigned DNA
ttagtgcacttcaaaactttgt

SEQ ID NO: 1412 - DNA, 21 bp, Homo sapiens
  source 1..21: mol_type = unassigned DNA
ttgatcgttcggctagcgtga

SEQ ID NO: 1413 - DNA, 22 bp, Homo sapiens
  source 1..22: mol_type = unassigned DNA
ttgcttattagagtgatgttga

SEQ ID NO: 1414 - DNA, 22 bp, Homo sapiens
  source 1..22: mol_type = unassigned DNA
tttcgcacttgtccaggcctgt

SEQ ID NO: 1415 - DNA, 23 bp, Homo sapiens
  source 1..23: mol_type = unassigned DNA
tttgcactggtataattcactgt

SEQ ID NO: 1416 - DNA, 22 bp, Homo sapiens
  source 1..22: mol_type = unassigned DNA
tttggcaatggtagaattcact

SEQ ID NO: 1417 - DNA, 22 bp, Homo sapiens
  source 1..22: mol_type = unassigned DNA
tttggcaatggtcgaactctca

SEQ ID NO: 1418 - DNA, 21 bp, Homo sapiens
  source 1..21: mol_type = unassigned DNA
tttggcactagcccatttttg

SEQ ID NO: 1419 - DNA, 22 bp, Homo sapiens
  source 1..22: mol_type = unassigned DNA
tttgttagtacggctcgcgtga

SEQ ID NO: 1420 - DNA, 23 bp, Homo sapiens
  source 1..23: mol_type = unassigned DNA
tttgttatcagagtgatgttgac

SEQ ID NO: 1421 - DNA, 22 bp, Homo sapiens
  source 1..22: mol_type = unassigned DNA
tttgttcgtacggctcgtgtga

SEQ ID NO: 1422 - DNA, 21 bp, Homo sapiens
  source 1..21: mol_type = unassigned DNA
tttgttcgttcgtctctggtg

SEQ ID NO: 1423 - DNA, 22 bp, Homo sapiens
  source 1..22: mol_type = unassigned DNA
tttgttcgttcgtctctggtgt

SEQ ID NO: 1424 - DNA, 29 bp, Homo sapiens
  source 1..29: mol_type = unassigned DNA
cataaggaaaggttaaaaaaagtaaaagg

SEQ ID NO: 1425 - DNA, 25 bp, Homo sapiens
  source 1..25: mol_type = unassigned DNA
atggcactggtagaattcactgaat

SEQ ID NO: 1426 - DNA, 22 bp, Homo sapiens
  source 1..22: mol_type = unassigned DNA
agagaagggtcggggcggcagg

SEQ ID NO: 1427 - DNA, 17 bp, Homo sapiens
  source 1..17: mol_type = unassigned DNA
gatcccgaggcctctcc

SEQ ID NO: 1428 - DNA, 30 bp, Homo sapiens
  source 1..30: mol_type = unassigned DNA
ggccgaagtggagaagggttccatgtgaac

SEQ ID NO: 1429 - DNA, 22 bp, Homo sapiens
  source 1..22: mol_type = unassigned DNA
gggaaggcccggcggggaaggg

SEQ ID NO: 1430 - DNA, 25 bp, Homo sapiens
  source 1..25: mol_type = unassigned DNA
gttcctcccggggctacgcctgtct

SEQ ID NO: 1431 - DNA, 20 bp, Homo sapiens
  source 1..20: mol_type = unassigned DNA
cgcaatgaaggtgaaggccg

SEQ ID NO: 1432 - DNA, 16 bp, Homo sapiens
  source 1..16: mol_type = unassigned DNA
ctccacgcgccccgcg

SEQ ID NO: 1433 - DNA, 17 bp, Homo sapiens
  source 1..17: mol_type = unassigned DNA
gggtccggtgcggagtg

SEQ ID NO: 1434 - DNA, 19 bp, Homo sapiens
  source 1..19: mol_type = unassigned DNA
ggttccggcggcgtccggt

SEQ ID NO: 1435 - DNA, 17 bp, Homo sapiens
  source 1..17: mol_type = unassigned DNA
tagcgacgtcgcttttt

SEQ ID NO: 1436 - DNA, 21 bp, Homo sapiens
  source 1..21: mol_type = unassigned DNA
aaagaacttttgactggagag

SEQ ID NO: 1437 - DNA, 23 bp, Homo sapiens
  source 1..23: mol_type = unassigned DNA
aaagcagaatcaatgtcttttcc

SEQ ID NO: 1438 - DNA, 19 bp, Homo sapiens
  source 1..19: mol_type = unassigned DNA
aacagatcgtcactcggtg

SEQ ID NO: 1439 - DNA, 22 bp, Homo sapiens
  source 1..22: mol_type = unassigned DNA
aagaccctctggctgtggacaa

SEQ ID NO: 1440 - DNA, 15 bp, Homo sapiens
  source 1..15: mol_type = unassigned DNA
aagctgggttgagag

SEQ ID NO: 1441 - DNA, 16 bp, Homo sapiens
  source 1..16: mol_type = unassigned DNA
aataataggacagtag

SEQ ID NO: 1442 - DNA, 23 bp, Homo sapiens
  source 1..23: mol_type = unassigned DNA
acacagtatgggtgctgcctctg

SEQ ID NO: 1443 - DNA, 17 bp, Homo sapiens
  source 1..17: mol_type = unassigned DNA
accgtcgtagttccgac

SEQ ID NO: 1444 - DNA, 30 bp, Homo sapiens
  source 1..30: mol_type = unassigned DNA
acgcatgggtttggatttatgatgggctgg

SEQ ID NO: 1445 - DNA, 25 bp, Homo sapiens
  source 1..25: mol_type = unassigned DNA
acgcgatgtgatttctgcccagtgc

SEQ ID NO: 1446 - DNA, 25 bp, Homo sapiens
  source 1..25: mol_type = unassigned DNA
acgtgggcacattacccctctgacc

SEQ ID NO: 1447 - DNA, 18 bp, Homo sapiens
  source 1..18: mol_type = unassigned DNA
agaaaagactctgaccag

SEQ ID NO: 1448 - DNA, 16 bp, Homo sapiens
  source 1..16: mol_type = unassigned DNA
agatcgtcactcggtg

SEQ ID NO: 1449 - DNA, 20 bp, Homo sapiens
  source 1..20: mol_type = unassigned DNA
aggatgctgtagccttaacc

SEQ ID NO: 1450 - DNA, 30 bp, Homo sapiens
  source 1..30: mol_type = unassigned DNA
agggaacgtgagctgggtttagaccgtcgt

SEQ ID NO: 1451 - DNA, 29 bp, Homo sapiens
  source 1..29: mol_type = unassigned DNA
agggcaaaagctcgcttgatcttgatcgt

SEQ ID NO: 1452 - DNA, 22 bp, Homo sapiens
  source 1..22: mol_type = unassigned DNA
aggtgcagatcttggtggtcgt

SEQ ID NO: 1453 - DNA, 19 bp, Homo sapiens
  source 1..19: mol_type = unassigned DNA
agttgtgtgggctgtagag

SEQ ID NO: 1454 - DNA, 17 bp, Homo sapiens
  source 1..17: mol_type = unassigned DNA
agtttgatctcagactg

SEQ ID NO: 1455 - DNA, 20 bp, Homo sapiens
  source 1..20: mol_type = unassigned DNA
atactgcctggtcatgatga

SEQ ID NO: 1456 - DNA, 23 bp, Homo sapiens
  source 1..23: mol_type = unassigned DNA
atggcactgctagaattcactgt

SEQ ID NO: 1457 - DNA, 22 bp, Homo sapiens
  source 1..22: mol_type = unassigned DNA
atggtcagtaggacagaaggta

SEQ ID NO: 1458 - DNA, 25 bp, Homo sapiens
  source 1..25: mol_type = unassigned DNA
attaacatgctgaggattgtagagc

SEQ ID NO: 1459 - DNA, 20 bp, Homo sapiens
  source 1..20: mol_type = unassigned DNA
attggtcgtggttgtagtgg

SEQ ID NO: 1460 - DNA, 24 bp, Homo sapiens
  source 1..24: mol_type = unassigned DNA
caggattgacagcttgatagctct

SEQ ID NO: 1461 - DNA, 15 bp, Homo sapiens
  source 1..15: mol_type = unassigned DNA
cagtggtagagccca

SEQ ID NO: 1462 - DNA, 23 bp, Homo sapiens
  source 1..23: mol_type = unassigned DNA
ccagaggtcgatggatcgtaacc

SEQ ID NO: 1463 - DNA, 22 bp, Homo sapiens
  source 1..22: mol_type = unassigned DNA
cccactgcttcacttgactcga

SEQ ID NO: 1464 - DNA, 19 bp, Homo sapiens
  source 1..19: mol_type = unassigned DNA
cccccgagacagagtttca

SEQ ID NO: 1465 - DNA, 15 bp, Homo sapiens
  source 1..15: mol_type = unassigned DNA
cccctcctcctcggc

SEQ ID NO: 1466 - DNA, 17 bp, Homo sapiens
  source 1..17: mol_type = unassigned DNA
cccctctccggagtccg

SEQ ID NO: 1467 - DNA, 18 bp, Homo sapiens
  source 1..18: mol_type = unassigned DNA
ccctgagtgacagaaccg

SEQ ID NO: 1468 - DNA, 28 bp, Homo sapiens
  source 1..28: mol_type = unassigned DNA
ccgcggagcctcggttggcctcggatag

SEQ ID NO: 1469 - DNA, 22 bp, Homo sapiens
  source 1..22: mol_type = unassigned DNA
ccggctgtggaatctgaagaca

SEQ ID NO: 1470 - DNA, 21 bp, Homo sapiens
  source 1..21: mol_type = unassigned DNA
cgcctgtcacgcgggagaccg

SEQ ID NO: 1471 - DNA, 21 bp, Homo sapiens
  source 1..21: mol_type = unassigned DNA
cgctacgccgcgacgaggagg

SEQ ID NO: 1472 - DNA, 17 bp, Homo sapiens
  source 1..17: mol_type = unassigned DNA
cggaaaaaaggactttt

SEQ ID NO: 1473 - DNA, 25 bp, Homo sapiens
  source 1..25: mol_type = unassigned DNA
cggttccggcggcgtccggtgagct

SEQ ID NO: 1474 - DNA, 24 bp, Homo sapiens
  source 1..24: mol_type = unassigned DNA
cgtcgtcggcggtgggggcgtgtt

SEQ ID NO: 1475 - DNA, 29 bp, Homo sapiens
  source 1..29: mol_type = unassigned DNA
cgtggggaacctgccgctaaaccattcgt

SEQ ID NO: 1476 - DNA, 22 bp, Homo sapiens
  source 1..22: mol_type = unassigned DNA
ctccattatgagcacttaaagt

SEQ ID NO: 1477 - DNA, 15 bp, Homo sapiens
  source 1..15: mol_type = unassigned DNA
ctcgggagggcgcgc

SEQ ID NO: 1478 - DNA, 16 bp, Homo sapiens
  source 1..16: mol_type = unassigned DNA
ctctaccttacctacc

SEQ ID NO: 1479 - DNA, 18 bp, Homo sapiens
  source 1..18: mol_type = unassigned DNA
ctctgtgtccccacccaa

SEQ ID NO: 1480 - DNA, 20 bp, Homo sapiens
  source 1..20: mol_type = unassigned DNA
ctgccccctctgctgatgcc

SEQ ID NO: 1481 - DNA, 19 bp, Homo sapiens
  source 1..19: mol_type = unassigned DNA
ctgtagtgtagtggtcatc

SEQ ID NO: 1482 - DNA, 18 bp, Homo sapiens
  source 1..18: mol_type = unassigned DNA
ctgtcggggcacctggag

SEQ ID NO: 1483 - DNA, 25 bp, Homo sapiens
  source 1..25: mol_type = unassigned DNA
ctgtgaacctgagactcaggacgca

SEQ ID NO: 1484 - DNA, 20 bp, Homo sapiens
  source 1..20: mol_type = unassigned DNA
ctgtgcctggcctgaggggc

SEQ ID NO: 1485 - DNA, 17 bp, Homo sapiens
  source 1..17: mol_type = unassigned DNA
ctgtgctctcaggaagg

SEQ ID NO: 1486 - DNA, 26 bp, Homo sapiens
  source 1..26: mol_type = unassigned DNA
cttaaaggaattgacggaagggcacc

SEQ ID NO: 1487 - DNA, 23 bp, Homo sapiens
  source 1..23: mol_type = unassigned DNA
cttccacagctactggtctgcag

SEQ ID NO: 1488 - DNA, 23 bp, Homo sapiens
  source 1..23: mol_type = unassigned DNA
gaacgtgagctgggttagaccgt

SEQ ID NO: 1489 - DNA, 18 bp, Homo sapiens
  source 1..18: mol_type = unassigned DNA
gaagagggttacacagtg

SEQ ID NO: 1490 - DNA, 28 bp, Homo sapiens
  source 1..28: mol_type = unassigned DNA
gaatcccgcccaggcggaacgatacggc

SEQ ID NO: 1491 - DNA, 24 bp, Homo sapiens
  source 1..24: mol_type = unassigned DNA
gacgaggtggccgggtggttaagg

SEQ ID NO: 1492 - DNA, 20 bp, Homo sapiens
  source 1..20: mol_type = unassigned DNA
gagatcagggacatgttgct

SEQ ID NO: 1493 - DNA, 23 bp, Homo sapiens
  source 1..23: mol_type = unassigned DNA
gaggaattgctttgacttctgac

SEQ ID NO: 1494 - DNA, 23 bp, Homo sapiens
  source 1..23: mol_type = unassigned DNA
gagggtccagggttcaggtccct

SEQ ID NO: 1495 - DNA, 23 bp, Homo sapiens
  source 1..23: mol_type = unassigned DNA
gagttggtggttcagtggtagaa

SEQ ID NO: 1496 - DNA, 18 bp, Homo sapiens
  source 1..18: mol_type = unassigned DNA
gagtttaagtcttgcctg

SEQ ID NO: 1497 - DNA, 21 bp, Homo sapiens
  source 1..21: mol_type = unassigned DNA
gatgttgtagcttatcagact

SEQ ID NO: 1498 - DNA, 23 bp, Homo sapiens
  source 1..23: mol_type = unassigned DNA
gattctgagcagattcgtctagg

SEQ ID NO: 1499 - DNA, 22 bp, Homo sapiens
  source 1..22: mol_type = unassigned DNA
gattgtgggttcgggtcccctc

SEQ ID NO: 1500 - DNA, 20 bp, Homo sapiens
  source 1..20: mol_type = unassigned DNA
gcaccaccaggagtggagcc

SEQ ID NO: 1501 - DNA, 29 bp, Homo sapiens
  source 1..29: mol_type = unassigned DNA
gcaggtgtcctaaggcgagctcagggagg

SEQ ID NO: 1502 - DNA, 23 bp, Homo sapiens
  source 1..23: mol_type = unassigned DNA
gcattggtggttcagtggtcgga

SEQ ID NO: 1503 - DNA, 21 bp, Homo sapiens
  source 1..21: mol_type = unassigned DNA
gccgaataggaacagctccgg

SEQ ID NO: 1504 - DNA, 21 bp, Homo sapiens
  source 1..21: mol_type = unassigned DNA
gcggcggccggcgggcggtgg

SEQ ID NO: 1505 - DNA, 28 bp, Homo sapiens
  source 1..28: mol_type = unassigned DNA
gcggcggcggcgaatctggacgcgagcc

SEQ ID NO: 1506 - DNA, 16 bp, Homo sapiens
  source 1..16: mol_type = unassigned DNA
gcgtgtggtgtgcgtc

SEQ ID NO: 1507 - DNA, 21 bp, Homo sapiens
  source 1..21: mol_type = unassigned DNA
gctccccgtcctccccccccc

SEQ ID NO: 1508 - DNA, 16 bp, Homo sapiens
  source 1..16: mol_type = unassigned DNA
gctgacccccttcgcg

SEQ ID NO: 1509 - DNA, 18 bp, Homo sapiens
  source 1..18: mol_type = unassigned DNA
gcttacagtgcaggtaga

SEQ ID NO: 1510 - DNA, 23 bp, Homo sapiens
  source 1..23: mol_type = unassigned DNA
gcttggcttgcatgaggtcccgg

SEQ ID NO: 1511 - DNA, 22 bp, Homo sapiens
  source 1..22: mol_type = unassigned DNA
ggagagaagggtcggggcggca

SEQ ID NO: 1512 - DNA, 17 bp, Homo sapiens
  source 1..17: mol_type = unassigned DNA
ggccccccccgcgggga

SEQ ID NO: 1513 - DNA, 24 bp, Homo sapiens
  source 1..24: mol_type = unassigned DNA
ggccggttagctcagttggtgaga

SEQ ID NO: 1514 - DNA, 15 bp, Homo sapiens
  source 1..15: mol_type = unassigned DNA
ggcgccctggaatgg

SEQ ID NO: 1515 - DNA, 17 bp, Homo sapiens
  source 1..17: mol_type = unassigned DNA
ggtcgcagtctcccttg

SEQ ID NO: 1516 - DNA, 17 bp, Homo sapiens
  source 1..17: mol_type = unassigned DNA
ggtcgtcccgctccggc

SEQ ID NO: 1517 - DNA, 15 bp, Homo sapiens
  source 1..15: mol_type = unassigned DNA
ggttcggaccccgtc

SEQ ID NO: 1518 - DNA, 15 bp, Homo sapiens
  source 1..15: mol_type = unassigned DNA
gtcagcccctctccg

SEQ ID NO: 1519 - DNA, 26 bp, Homo sapiens
  source 1..26: mol_type = unassigned DNA
gtgatcgtatagtggttagtactccg

SEQ ID NO: 1520 - DNA, 30 bp, Homo sapiens
  source 1..30: mol_type = unassigned DNA
gtgatcgtatagtggttagtactctgtctc

SEQ ID NO: 1521 - DNA, 20 bp, Homo sapiens
  source 1..20: mol_type = unassigned DNA
gtgatcgtatagtgttagta

SEQ ID NO: 1522 - DNA, 20 bp, Homo sapiens
  source 1..20: mol_type = unassigned DNA
gtggactcgactgtaaggac

SEQ ID NO: 1523 - DNA, 21 bp, Homo sapiens
  source 1..21: mol_type = unassigned DNA
gttcgtatcccaccttcgtcg

SEQ ID NO: 1524 - DNA, 18 bp, Homo sapiens
  source 1..18: mol_type = unassigned DNA
gtttcccagatttcagga

SEQ ID NO: 1525 - DNA, 24 bp, Homo sapiens
  source 1..24: mol_type = unassigned DNA
taatactgcctggtaatgataact

SEQ ID NO: 1526 - DNA, 26 bp, Homo sapiens
  source 1..26: mol_type = unassigned DNA
tagaatttgtctagtaggctttctgg

SEQ ID NO: 1527 - DNA, 25 bp, Homo sapiens
  source 1..25: mol_type = unassigned DNA
tataactgaactcctcacacccaat

SEQ ID NO: 1528 - DNA, 21 bp, Homo sapiens
  source 1..21: mol_type = unassigned DNA
tcaccttgtatagctgataaa

SEQ ID NO: 1529 - DNA, 15 bp, Homo sapiens
  source 1..15: mol_type = unassigned DNA
tcagaaggctgcgtg

SEQ ID NO: 1530 - DNA, 22 bp, Homo sapiens
  misc_difference 8: note = modified_base - a, c, t, g, unknown or other
  source 1..22: mol_type = unassigned DNA
tgaaatgnttaggaccactaga

SEQ ID NO: 1531 - DNA, 30 bp, Homo sapiens
  source 1..30: mol_type = unassigned DNA
tgacattttaaaccaccaagatcgctgatg

SEQ ID NO: 1532 - DNA, 21 bp, Homo sapiens
  source 1..21: mol_type = unassigned DNA
tgagatcagggacatgttgct

SEQ ID NO: 1533 - DNA, 15 bp, Homo sapiens
  source 1..15: mol_type = unassigned DNA
tgcactacagaactt

SEQ ID NO: 1534 - DNA, 17 bp, Homo sapiens
  source 1..17: mol_type = unassigned DNA
tgcatcacagaactttg

SEQ ID NO: 1535 - DNA, 18 bp, Homo sapiens
  source 1..18: mol_type = unassigned DNA
tgcatgcatttatcagat

SEQ ID NO: 1536 - DNA, 21 bp, Homo sapiens
  source 1..21: mol_type = unassigned DNA
tggattggaaatccattgggg

SEQ ID NO: 1537 - DNA, 20 bp, Homo sapiens
  source 1..20: mol_type = unassigned DNA
tggatttttggaactaggag

SEQ ID NO: 1538 - DNA, 25 bp, Homo sapiens
  source 1..25: mol_type = unassigned DNA
tggctctaagggctgggtcggtcgc

SEQ ID NO: 1539 - DNA, 25 bp, Homo sapiens
  source 1..25: mol_type = unassigned DNA
tgtaaacatccccgactggcagcta

SEQ ID NO: 1540 - DNA, 22 bp, Homo sapiens
  source 1..22: mol_type = unassigned DNA
tgtaataggaactcaacaagct

SEQ ID NO: 1541 - DNA, 19 bp, Homo sapiens
  source 1..19: mol_type = unassigned DNA
tgtcatggactctggagac

SEQ ID NO: 1542 - DNA, 18 bp, Homo sapiens
  source 1..18: mol_type = unassigned DNA
ttggagaacgtggacacc

SEQ ID NO: 1543 - DNA, 20 bp, Homo sapiens
  source 1..20: mol_type = unassigned DNA
ttgtagtgtgctgatgtgca

SEQ ID NO: 1544 - RNA, 26 nt, Homo sapiens
  source 1..26: mol_type = unassigned RNA
ctcttggtttatctacctgtattatt

SEQ ID NO: 1545 - DNA, 26 bp, Homo sapiens
  source 1..26: mol_type = unassigned DNA
ctcttggtttatctacctgtattatt

SEQ ID NO: 1546 - DNA, 26 bp, Homo sapiens
  source 1..26: mol_type = unassigned DNA
aataatacaggtagataaaccaagag

SEQ ID NO: 1547 - RNA, 88 nt, Homo sapiens
  source 1..88: mol_type = unassigned RNA
catctttttttctctagctgtttgaagattttctctttatcactggttctaagtaaattgattatggtgtgccttagtgtgttgtcta

SEQ ID NO: 1548 - DNA, 88 bp, Homo sapiens
  source 1..88: mol_type = unassigned DNA
catctttttttctctagctgtttgaagattttctctttatcactggttctaagtaaattgattatggtgtgccttagtgtgttgtcta

SEQ ID NO: 1549 - DNA, 88 bp, Homo sapiens
  source 1..88: mol_type = unassigned DNA
tagacaacacactaaggcacaccataatcaatttacttagaaccagtgataaagagaaaatcttcaaacagctagagaaaaaaagatg

SEQ ID NO: 1550 - RNA, 23 nt, Homo sapiens
  source 1..23: mol_type = unassigned RNA
tgtctctggagctatggactagt

SEQ ID NO: 1551 - DNA, 23 bp, Homo sapiens
  source 1..23: mol_type = unassigned DNA
tgtctctggagctatggactagt

SEQ ID NO: 1552 - DNA, 23 bp, Homo sapiens
  source 1..23: mol_type = unassigned DNA
actagtccatagctccagagaca

SEQ ID NO: 1553 - RNA, 28 nt, Homo sapiens
  source 1..28: mol_type = unassigned RNA
ggggtctttggcccaatggacagccaac

SEQ ID NO: 1554 - DNA, 28 bp, Homo sapiens
  source 1..28: mol_type = unassigned DNA
ggggtctttggcccaatggacagccaac

SEQ ID NO: 1555 - DNA, 28 bp, Homo sapiens
  source 1..28: mol_type = unassigned DNA
gttggctgtccattgggccaaagacccc

SEQ ID NO: 1556 - RNA, 27 nt, Homo sapiens
  source 1..27: mol_type = unassigned RNA
tcaagtctctggtgcaaaggacaactg

SEQ ID NO: 1557 - DNA, 27 bp, Homo sapiens
  source 1..27: mol_type = unassigned DNA
tcaagtctctggtgcaaaggacaactg

SEQ ID NO: 1558 - DNA, 27 bp, Homo sapiens
  source 1..27: mol_type = unassigned DNA
cagttgtcctttgcaccagagacttga

SEQ ID NO: 1559 - RNA, 44 nt, Homo sapiens
  source 1..44: mol_type = unassigned RNA
atccagtgtctctggggcaagggactgaggctttggtgctgatt

SEQ ID NO: 1560 - DNA, 44 bp, Homo sapiens
  source 1..44: mol_type = unassigned DNA
atccagtgtctctggggcaagggactgaggctttggtgctgatt

SEQ ID NO: 1561 - DNA, 44 bp, Homo sapiens
  source 1..44: mol_type = unassigned DNA
aatcagcaccaaagcctcagtcccttgccccagagacactggat

SEQ ID NO: 1562 - RNA, 25 nt, Homo sapiens
  source 1..25: mol_type = unassigned RNA
atgtggtctcaggctcaatggactt

SEQ ID NO: 1563 - DNA, 25 bp, Homo sapiens
  source 1..25: mol_type = unassigned DNA
atgtggtctcaggctcaatggactt

SEQ ID NO: 1564 - DNA, 25 bp, Homo sapiens
  source 1..25: mol_type = unassigned DNA
aagtccattgagcctgagaccacat

SEQ ID NO: 1565 - RNA, 85 nt, Homo sapiens
  source 1..85: mol_type = unassigned RNA
acccaggtacaaggtcacccagcagctggaccagctgggactctgacctagttttttcaatctagaactcacaatatttccatta

SEQ ID NO: 1566 - DNA, 85 bp, Homo sapiens
  source 1..85: mol_type = unassigned DNA
acccaggtacaaggtcacccagcagctggaccagctgggactctgacctagttttttcaatctagaactcacaatatttccatta

SEQ ID NO: 1567 - DNA, 85 bp, Homo sapiens
  source 1..85: mol_type = unassigned DNA
taatggaaatattgtgagttctagattgaaaaaactaggtcagagtcccagctggtccagctgctgggtgaccttgtacctgggt

SEQ ID NO: 1568 - RNA, 49 nt, Homo sapiens
  source 1..49: mol_type = unassigned RNA
ttgtgtctttgtgtatgtagctgtgtgtcgtgtggagtctgtgtctgca

SEQ ID NO: 1569 - DNA, 49 bp, Homo sapiens
  source 1..49: mol_type = unassigned DNA
ttgtgtctttgtgtatgtagctgtgtgtcgtgtggagtctgtgtctgca

SEQ ID NO: 1570 - DNA, 49 bp, Homo sapiens
  source 1..49: mol_type = unassigned DNA
tgcagacacagactccacacgacacacagctacatacacaaagacacaa

SEQ ID NO: 1571 - RNA, 25 nt, Homo sapiens
  source 1..25: mol_type = unassigned RNA
tgattttggagtttgtatagttttt

SEQ ID NO: 1572 - DNA, 25 bp, Homo sapiens
  source 1..25: mol_type = unassigned DNA
tgattttggagtttgtatagttttt

SEQ ID NO: 1573 - DNA, 25 bp, Homo sapiens
  source 1..25: mol_type = unassigned DNA
aaaaactatacaaactccaaaatca

SEQ ID NO: 1574 - RNA, 24 nt, Homo sapiens
  source 1..24: mol_type = unassigned RNA
ttattatagccttttggagtctct

SEQ ID NO: 1575 - DNA, 24 bp, Homo sapiens
  source 1..24: mol_type = unassigned DNA
ttattatagccttttggagtctct

SEQ ID NO: 1576 - DNA, 24 bp, Homo sapiens
  source 1..24: mol_type = unassigned DNA
agagactccaaaaggctataataa

SEQ ID NO: 1577 - RNA, 21 nt, Homo sapiens
  source 1..21: mol_type = unassigned RNA
gtctcttttgcacaatggcca

SEQ ID NO: 1578 - DNA, 21 bp, Homo sapiens
  source 1..21: mol_type = unassigned DNA
gtctcttttgcacaatggcca

SEQ ID NO: 1579 - DNA, 21 bp, Homo sapiens
  source 1..21: mol_type = unassigned DNA
tggccattgtgcaaaagagac

SEQ ID NO: 1580 - RNA, 25 nt, Homo sapiens
  source 1..25: mol_type = unassigned RNA
ctaagttctagtttgtgtggttttc

SEQ ID NO: 1581 - DNA, 25 bp, Homo sapiens
  source 1..25: mol_type = unassigned DNA
ctaagttctagtttgtgtggttttc

SEQ ID NO: 1582 - DNA, 25 bp, Homo sapiens
  source 1..25: mol_type = unassigned DNA
gaaaaccacacaaactagaacttag

SEQ ID NO: 1583 - RNA, 55 nt, Homo sapiens
  source 1..55: mol_type = unassigned RNA
taggaatgtttagagggatctggaaaacctgcccagccagttcgttcccaggcac

SEQ ID NO: 1584 - DNA, 55 bp, Homo sapiens
  source 1..55: mol_type = unassigned DNA
taggaatgtttagagggatctggaaaacctgcccagccagttcgttcccaggcac

SEQ ID NO: 1585 - DNA, 55 bp, Homo sapiens
  source 1..55: mol_type = unassigned DNA
gtgcctgggaacgaactggctgggcaggttttccagatccctctaaacattccta

SEQ ID NO: 1586 - RNA, 22 nt, Homo sapiens
  source 1..22: mol_type = unassigned RNA
agtctctgttgagctatggcct

SEQ ID NO: 1587 - DNA, 22 bp, Homo sapiens
  source 1..22: mol_type = unassigned DNA
agtctctgttgagctatggcct

SEQ ID NO: 1588 - DNA, 22 bp, Homo sapiens
  source 1..22: mol_type = unassigned DNA
aggccatagctcaacagagact

SEQ ID NO: 1589 - RNA, 31 nt, Homo sapiens
  source 1..31: mol_type = unassigned RNA
tttgagggcctatctagctgtatgaaaaaca

SEQ ID NO: 1590 - DNA, 31 bp, Homo sapiens
  source 1..31: mol_type = unassigned DNA
tttgagggcctatctagctgtatgaaaaaca

SEQ ID NO: 1591 - DNA, 31 bp, Homo sapiens
  source 1..31: mol_type = unassigned DNA
tgtttttcatacagctagataggccctcaaa

SEQ ID NO: 1592 - RNA, 155 nt, Homo sapiens
  source 1..155: mol_type = unassigned RNA
gtctgggttaggaacaagaactttgggccatttatgatgagttcccagctgaggccgatgctcttggtcaaagattcctgctttgagaaccgctgctgtaaggcatggttgctcttcctgggttatctagttgaatggagatttccatcagtggt

SEQ ID NO: 1593 - DNA, 155 bp, Homo sapiens
  source 1..155: mol_type = unassigned DNA
gtctgggttaggaacaagaactttgggccatttatgatgagttcccagctgaggccgatgctcttggtcaaagattcctgctttgagaaccgctgctgtaaggcatggttgctcttcctgggttatctagttgaatggagatttccatcagtggt

SEQ ID NO: 1594 - DNA, 155 bp, Homo sapiens
  source 1..155: mol_type = unassigned DNA
accactgatggaaatctccattcaactagataacccaggaagagcaaccatgccttacagcagcggttctcaaagcaggaatctttgaccaagagcatcggcctcagctgggaactcatcataaatggcccaaagttcttgttcctaacccagac

SEQ ID NO: 1595 - RNA, 61 nt, Homo sapiens
  source 1..61: mol_type = unassigned RNA
aagctgctggtactccttcagctcctgtggagcgtaggtctctggggcgcaatgaacacac

SEQ ID NO: 1596 - DNA, 61 bp, Homo sapiens
  source 1..61: mol_type = unassigned DNA
aagctgctggtactccttcagctcctgtggagcgtaggtctctggggcgcaatgaacacac

SEQ ID NO: 1597 - DNA, 61 bp, Homo sapiens
  source 1..61: mol_type = unassigned DNA
gtgtgttcattgcgccccagagacctacgctccacaggagctgaaggagtaccagcagctt

SEQ ID NO: 1598 - RNA, 55 nt, Homo sapiens
  source 1..55: mol_type = unassigned RNA
aggtttttgatgccttatattgagactaatgttgagttgtagaggttttatatta

SEQ ID NO: 1599 - DNA, 55 bp, Homo sapiens
  source 1..55: mol_type = unassigned DNA
aggtttttgatgccttatattgagactaatgttgagttgtagaggttttatatta

SEQ ID NO: 1600 - DNA, 55 bp, Homo sapiens
  source 1..55: mol_type = unassigned DNA
taatataaaacctctacaactcaacattagtctcaatataaggcatcaaaaacct

SEQ ID NO: 1601 - RNA, 26 nt, Homo sapiens
  source 1..26: mol_type = unassigned RNA
gatcacgtctctgtgtgcaaaggaca

SEQ ID NO: 1602 - DNA, 26 bp, Homo sapiens
  source 1..26: mol_type = unassigned DNA
gatcacgtctctgtgtgcaaaggaca

SEQ ID NO: 1603 - DNA, 26 bp, Homo sapiens
  source 1..26: mol_type = unassigned DNA
tgtcctttgcacacagagacgtgatc

SEQ ID NO: 1604 - RNA, 51 nt, Homo sapiens
  source 1..51: mol_type = unassigned RNA
ttagtttgttttctgtgtgtctctgtgcacaatgtactttgcaaatatctg

SEQ ID NO: 1605 - DNA, 51 bp, Homo sapiens
  source 1..51: mol_type = unassigned DNA
ttagtttgttttctgtgtgtctctgtgcacaatgtactttgcaaatatctg

SEQ ID NO: 1606 - DNA, 51 bp, Homo sapiens
  source 1..51: mol_type = unassigned DNA
cagatatttgcaaagtacattgtgcacagagacacacagaaaacaaactaa

SEQ ID NO: 1607 - RNA, 24 nt, Homo sapiens
  source 1..24: mol_type = unassigned RNA
tccatcctcattgattatcttgat

SEQ ID NO: 1608 - DNA, 24 bp, Homo sapiens
  source 1..24: mol_type = unassigned DNA
tccatcctcattgattatcttgat

SEQ ID NO: 1609 - DNA, 24 bp, Homo sapiens
  source 1..24: mol_type = unassigned DNA
atcaagataatcaatgaggatgga

SEQ ID NO: 1610 - RNA, 35 nt, Homo sapiens
  source 1..35: mol_type = unassigned RNA
cagtctttggtctctagctgtattggtttcatgga

SEQ ID NO: 1611 - DNA, 35 bp, Homo sapiens
  source 1..35: mol_type = unassigned DNA
cagtctttggtctctagctgtattggtttcatgga

SEQ ID NO: 1612 - DNA, 35 bp, Homo sapiens
  source 1..35: mol_type = unassigned DNA
tccatgaaaccaatacagctagagaccaaagactg

SEQ ID NO: 1613 - RNA, 42 nt, Homo sapiens
  source 1..42: mol_type = unassigned RNA
tggtttttaaagacttacattgagtcactgtgggacttgaaa

SEQ ID NO: 1614 - DNA, 42 bp, Homo sapiens
  source 1..42: mol_type = unassigned DNA
tggtttttaaagacttacattgagtcactgtgggacttgaaa

SEQ ID NO: 1615 - DNA, 42 bp, Homo sapiens
  source 1..42: mol_type = unassigned DNA
tttcaagtcccacagtgactcaatgtaagtctttaaaaacca

SEQ ID NO: 1616 - RNA, 158 nt, Homo sapiens
  source 1..158: mol_type = unassigned RNA
ggtatccaatatatcttgtcctttattcagattgacttctggaagccagattctgtcacacaaatcaaacctcacagtacagttgacttccgtgttaaagcagaagatactgtcactgtggagaatgttctaaagcagaatgaactacaatacaagta

SEQ ID NO: 1617 - DNA, 158 bp, Homo sapiens
  source 1..158: mol_type = unassigned DNA
ggtatccaatatatcttgtcctttattcagattgacttctggaagccagattctgtcacacaaatcaaacctcacagtacagttgacttccgtgttaaagcagaagatactgtcactgtggagaatgttctaaagcagaatgaactacaatacaagta

SEQ ID NO: 1618 - DNA, 158 bp, Homo sapiens
  source 1..158: mol_type = unassigned DNA
tacttgtattgtagttcattctgctttagaacattctccacagtgacagtatcttctgctttaacacggaagtcaactgtactgtgaggtttgatttgtgtgacagaatctggcttccagaagtcaatctgaataaaggacaagatatattggatacc

SEQ ID NO: 1619 - RNA, 24 nt, Homo sapiens
  source 1..24: mol_type = unassigned RNA
tctttgggtaggaagctgtctgct

SEQ ID NO: 1620 - DNA, 24 bp, Homo sapiens
  source 1..24: mol_type = unassigned DNA
tctttgggtaggaagctgtctgct

SEQ ID NO: 1621 - DNA, 24 bp, Homo sapiens
  source 1..24: mol_type = unassigned DNA
agcagacagcttcctacccaaaga

SEQ ID NO: 1622 - RNA, 25 nt, Homo sapiens
  source 1..25: mol_type = unassigned RNA
atctgtgattatctatttgtatgca

SEQ ID NO: 1623 - DNA, 25 bp, Homo sapiens
  source 1..25: mol_type = unassigned DNA
atctgtgattatctatttgtatgca

SEQ ID NO: 1624 - DNA, 25 bp, Homo sapiens
  source 1..25: mol_type = unassigned DNA
tgcatacaaatagataatcacagat

SEQ ID NO: 1625 - RNA, 25 nt, Homo sapiens
  source 1..25: mol_type = unassigned RNA
tactatattattttgtgtggttcaa

SEQ ID NO: 1626 - DNA, 25 bp, Homo sapiens
  source 1..25: mol_type = unassigned DNA
tactatattattttgtgtggttcaa

SEQ ID NO: 1627 - DNA, 25 bp, Homo sapiens
  source 1..25: mol_type = unassigned DNA
ttgaaccacacaaaataatatagta

SEQ ID NO: 1628 - RNA, 65 nt, Homo sapiens
  source 1..65: mol_type = unassigned RNA
caactgtgcagcctctgggtgctagatcaatgcacacctctagctgtatgactttggtttttctg

SEQ ID NO: 1629 - DNA, 65 bp, Homo sapiens
  source 1..65: mol_type = unassigned DNA
caactgtgcagcctctgggtgctagatcaatgcacacctctagctgtatgactttggtttttctg

SEQ ID NO: 1630 - DNA, 65 bp, Homo sapiens
  source 1..65: mol_type = unassigned DNA
cagaaaaaccaaagtcatacagctagaggtgtgcattgatctagcacccagaggctgcacagttg

SEQ ID NO: 1631 - RNA, 62 nt, Homo sapiens
  source 1..62: mol_type = unassigned RNA
tatcagcttgaggagcttttgggctgagactggggttttctagctgtaggatcctgtcatct

SEQ ID NO: 1632 - DNA, 62 bp, Homo sapiens
  source 1..62: mol_type = unassigned DNA
tatcagcttgaggagcttttgggctgagactggggttttctagctgtaggatcctgtcatct

SEQ ID NO: 1633 - DNA, 62 bp, Homo sapiens
  source 1..62: mol_type = unassigned DNA
agatgacaggatcctacagctagaaaaccccagtctcagcccaaaagctcctcaagctgata

SEQ ID NO: 1634 - RNA, 56 nt, Homo sapiens
  source 1..56: mol_type = unassigned RNA
gtaaaattaggcatgtacacagcatctctggttctaactgtatgaatgtgtgcaca

SEQ ID NO: 1635 - DNA, 56 bp, Homo sapiens
  source 1..56: mol_type = unassigned DNA
gtaaaattaggcatgtacacagcatctctggttctaactgtatgaatgtgtgcaca

SEQ ID NO: 1636 - DNA, 56 bp, Homo sapiens
  source 1..56: mol_type = unassigned DNA
tgtgcacacattcatacagttagaaccagagatgctgtgtacatgcctaattttac

SEQ ID NO: 1637 - RNA, 23 nt, Homo sapiens
  source 1..23: mol_type = unassigned RNA
tctctggttgtctaactgtttgc

SEQ ID NO: 1638 - DNA, 23 bp, Homo sapiens
  source 1..23: mol_type = unassigned DNA
tctctggttgtctaactgtttgc

SEQ ID NO: 1639 - DNA, 23 bp, Homo sapiens
  source 1..23: mol_type = unassigned DNA
gcaaacagttagacaaccagaga

SEQ ID NO: 1640 - RNA, 71 nt, Homo sapiens
  source 1..71: mol_type = unassigned RNA
aatgtttaggtatttagctgtatgatagataaagcaagttagagataaggaaagtaaggtgaaaatgagcc

SEQ ID NO: 1641 - DNA, 71 bp, Homo sapiens
  source 1..71: mol_type = unassigned DNA
aatgtttaggtatttagctgtatgatagataaagcaagttagagataaggaaagtaaggtgaaaatgagcc

SEQ ID NO: 1642 - DNA, 71 bp, Homo sapiens
  source 1..71: mol_type = unassigned DNA
ggctcattttcaccttactttccttatctctaacttgctttatctatcatacagctaaatacctaaacatt

SEQ ID NO: 1643 - RNA, 23 nt, Homo sapiens
  source 1..23: mol_type = unassigned RNA
gtctttgtttctagctttatgat

SEQ ID NO: 1644 - DNA, 23 bp, Homo sapiens
  source 1..23: mol_type = unassigned DNA
gtctttgtttctagctttatgat

SEQ ID NO: 1645 - DNA, 23 bp, Homo sapiens
  source 1..23: mol_type = unassigned DNA
atcataaagctagaaacaaagac

SEQ ID NO: 1646 - RNA, 24 nt, Homo sapiens
  source 1..24: mol_type = unassigned RNA
atgagttctagtttgtattgttca

SEQ ID NO: 1647 - DNA, 24 bp, Homo sapiens
  source 1..24: mol_type = unassigned DNA
atgagttctagtttgtattgttca

SEQ ID NO: 1648 - DNA, 24 bp, Homo sapiens
  source 1..24: mol_type = unassigned DNA
tgaacaatacaaactagaactcat

SEQ ID NO: 1649 - RNA, 24 nt, Homo sapiens
  source 1..24: mol_type = unassigned RNA
tgaggccttattttgtctggttat

SEQ ID NO: 1650 - DNA, 24 bp, Homo sapiens
  source 1..24: mol_type = unassigned DNA
tgaggccttattttgtctggttat

SEQ ID NO: 1651 - DNA, 24 bp, Homo sapiens
  source 1..24: mol_type = unassigned DNA
ataaccagacaaaataaggcctca

SEQ ID NO: 1652 - RNA, 54 nt, Homo sapiens
  source 1..54: mol_type = unassigned RNA
cgtatttggatctgtttctgcttattttatctagctgtatgtttttcctgtgtg

SEQ ID NO: 1653 - DNA, 54 bp, Homo sapiens
  source 1..54: mol_type = unassigned DNA
cgtatttggatctgtttctgcttattttatctagctgtatgtttttcctgtgtg

SEQ ID NO: 1654 - DNA, 54 bp, Homo sapiens
  source 1..54: mol_type = unassigned DNA
cacacaggaaaaacatacagctagataaaataagcagaaacagatccaaatacg

SEQ ID NO: 1655 - RNA, 24 nt, Homo sapiens
  source 1..24: mol_type = unassigned RNA
ttatttattattttgtctggtttt

SEQ ID NO: 1656 - DNA, 24 bp, Homo sapiens
  source 1..24: mol_type = unassigned DNA
ttatttattattttgtctggtttt

SEQ ID NO: 1657 - DNA, 24 bp, Homo sapiens
  source 1..24: mol_type = unassigned DNA
aaaaccagacaaaataataaataa

SEQ ID NO: 1658 - RNA, 23 nt, Homo sapiens
  source 1..23: mol_type = unassigned RNA
ttttttcaatggtataactcttt

SEQ ID NO: 1659 - DNA, 23 bp, Homo sapiens
  source 1..23: mol_type = unassigned DNA
ttttttcaatggtataactcttt

SEQ ID NO: 1660 - DNA, 23 bp, Homo sapiens
  source 1..23: mol_type = unassigned DNA
aaagagttataccattgaaaaaa

SEQ ID NO: 1661 - RNA, 25 nt, Homo sapiens
  source 1..25: mol_type = unassigned RNA
tttttcaatgttataacacacacgt

SEQ ID NO: 1662 - DNA, 25 bp, Homo sapiens
  source 1..25: mol_type = unassigned DNA
tttttcaatgttataacacacacgt

SEQ ID NO: 1663 - DNA, 25 bp, Homo sapiens
  source 1..25: mol_type = unassigned DNA
acgtgtgtgttataacattgaaaaa

SEQ ID NO: 1664 - RNA, 41 nt, Homo sapiens
  source 1..41: mol_type = unassigned RNA
tctcaataattgtaataatgagaaccttttccaagacacca

SEQ ID NO: 1665 - DNA, 41 bp, Homo sapiens
  source 1..41: mol_type = unassigned DNA
tctcaataattgtaataatgagaaccttttccaagacacca

SEQ ID NO: 1666 - DNA, 41 bp, Homo sapiens
  source 1..41: mol_type = unassigned DNA
tggtgtcttggaaaaggttctcattattacaattattgaga

SEQ ID NO: 1667 - RNA, 45 nt, Homo sapiens
  source 1..45: mol_type = unassigned RNA
tggatatgatcttcctggaggtgttatctggctgtatgatcacat

SEQ ID NO: 1668 - DNA, 45 bp, Homo sapiens
  source 1..45: mol_type = unassigned DNA
tggatatgatcttcctggaggtgttatctggctgtatgatcacat

SEQ ID NO: 1669 - DNA, 45 bp, Homo sapiens
  source 1..45: mol_type = unassigned DNA
atgtgatcatacagccagataacacctccaggaagatcatatcca

SEQ ID NO: 1670 - RNA, 25 nt, Homo sapiens
  source 1..25: mol_type = unassigned RNA
atcttgaagtcttttggagtagact

SEQ ID NO: 1671 - DNA, 25 bp, Homo sapiens
  source 1..25: mol_type = unassigned DNA
atcttgaagtcttttggagtagact

SEQ ID NO: 1672 - DNA, 25 bp, Homo sapiens
  source 1..25: mol_type = unassigned DNA
agtctactccaaaagacttcaagat

SEQ ID NO: 1673 - RNA, 31 nt, Homo sapiens
  source 1..31: mol_type = unassigned RNA
ggtgctccttgggtattagctgaatgactgg

SEQ ID NO: 1674 - DNA, 31 bp, Homo sapiens
  source 1..31: mol_type = unassigned DNA
ggtgctccttgggtattagctgaatgactgg

SEQ ID NO: 1675 - DNA, 31 bp, Homo sapiens
  source 1..31: mol_type = unassigned DNA
ccagtcattcagctaatacccaaggagcacc

SEQ ID NO: 1676 - RNA, 24 nt, Homo sapiens
  source 1..24: mol_type = unassigned RNA
ttcttggtgtgtctgtgggtatgt

SEQ ID NO: 1677 - DNA, 24 bp, Homo sapiens
  source 1..24: mol_type = unassigned DNA
ttcttggtgtgtctgtgggtatgt

SEQ ID NO: 1678 - DNA, 24 bp, Homo sapiens
  source 1..24: mol_type = unassigned DNA
acatacccacagacacaccaagaa

SEQ ID NO: 1679 - RNA, 29 nt, Homo sapiens
  source 1..29: mol_type = unassigned RNA
tgatgtatttgtttttatagtgagactgt

SEQ ID NO: 1680 - DNA, 29 bp, Homo sapiens
  source 1..29: mol_type = unassigned DNA
tgatgtatttgtttttatagtgagactgt

SEQ ID NO: 1681 - DNA, 29 bp, Homo sapiens
  source 1..29: mol_type = unassigned DNA
acagtctcactataaaaacaaatacatca

SEQ ID NO: 1682 - RNA, 24 nt, Homo sapiens
  source 1..24: mol_type = unassigned RNA
tttttcaatagtagaactcttggt

SEQ ID NO: 1683 - DNA, 24 bp, Homo sapiens
  source 1..24: mol_type = unassigned DNA
tttttcaatagtagaactcttggt

SEQ ID NO: 1684 - DNA, 24 bp, Homo sapiens
  source 1..24: mol_type = unassigned DNA
accaagagttctactattgaaaaa

SEQ ID NO: 1685 - RNA, 45 nt, Homo sapiens
  source 1..45: mol_type = unassigned RNA
cctcttctctggttatttatctgtatatccagatctactatatga

SEQ ID NO: 1686 - DNA, 45 bp, Homo sapiens
  source 1..45: mol_type = unassigned DNA
cctcttctctggttatttatctgtatatccagatctactatatga

SEQ ID NO: 1687 - DNA, 45 bp, Homo sapiens
  source 1..45: mol_type = unassigned DNA
tcatatagtagatctggatatacagataaataaccagagaagagg

SEQ ID NO: 1688 - RNA, 24 nt, Homo sapiens
  source 1..24: mol_type = unassigned RNA
tcaggggttatatactgtatgatt

SEQ ID NO: 1689 - DNA, 24 bp, Homo sapiens
  source 1..24: mol_type = unassigned DNA
tcaggggttatatactgtatgatt

SEQ ID NO: 1690 - DNA, 24 bp, Homo sapiens
  source 1..24: mol_type = unassigned DNA
aatcatacagtatataacccctga

SEQ ID NO: 1691 - RNA, 60 nt, Homo sapiens
  source 1..60: mol_type = unassigned RNA
acacctggctgaaatctaggaattttttggagaactcttgggttttctaggtatatgatt

SEQ ID NO: 1692 - DNA, 60 bp, Homo sapiens
  source 1..60: mol_type = unassigned DNA
acacctggctgaaatctaggaattttttggagaactcttgggttttctaggtatatgatt

SEQ ID NO: 1693 - DNA, 60 bp, Homo sapiens
  source 1..60: mol_type = unassigned DNA
aatcatatacctagaaaacccaagagttctccaaaaaattcctagatttcagccaggtgt

SEQ ID NO: 1694 - RNA, 42 nt, Homo sapiens
  source 1..42: mol_type = unassigned RNA
tcctttgttccactggtatctttagttctctatctttatgct

SEQ ID NO: 1695 - DNA, 42 bp, Homo sapiens
  source 1..42: mol_type = unassigned DNA
tcctttgttccactggtatctttagttctctatctttatgct

SEQ ID NO: 1696 - DNA, 42 bp, Homo sapiens
  source 1..42: mol_type = unassigned DNA
agcataaagatagagaactaaagataccagtggaacaaagga

SEQ ID NO: 1697 - RNA, 23 nt, Homo sapiens
  source 1..23: mol_type = unassigned RNA
gtgagttttagtttgtatcattc

SEQ ID NO: 1698 - DNA, 23 bp, Homo sapiens
  source 1..23: mol_type = unassigned DNA
gtgagttttagtttgtatcattc

SEQ ID NO: 1699 - DNA, 23 bp, Homo sapiens
  source 1..23: mol_type = unassigned DNA
gaatgatacaaactaaaactcac

SEQ ID NO: 1700 - RNA, 54 nt, Homo sapiens
  source 1..54: mol_type = unassigned RNA
caaacacaaggtcctgtatgctttagttaggaagtggtatagttttatggattc

SEQ ID NO: 1701 - DNA, 54 bp, Homo sapiens
  source 1..54: mol_type = unassigned DNA
caaacacaaggtcctgtatgctttagttaggaagtggtatagttttatggattc

SEQ ID NO: 1702 - DNA, 54 bp, Homo sapiens
  source 1..54: mol_type = unassigned DNA
gaatccataaaactataccacttcctaactaaagcatacaggaccttgtgtttg

SEQ ID NO: 1703 - RNA, 25 nt, Homo sapiens
  source 1..25: mol_type = unassigned RNA
tgagtggttatgtaactgtaagaaa

SEQ ID NO: 1704 - DNA, 25 bp, Homo sapiens
  source 1..25: mol_type = unassigned DNA
tgagtggttatgtaactgtaagaaa

SEQ ID NO: 1705 - DNA, 25 bp, Homo sapiens
  source 1..25: mol_type = unassigned DNA
tttcttacagttacataaccactca

SEQ ID NO: 1706 - RNA, 56 nt, Homo sapiens
  source 1..56: mol_type = unassigned RNA
tgcattattattttgtgtggtttgctggtttggactgtttttatgctgtagttccc

SEQ ID NO: 1707 - DNA, 56 bp, Homo sapiens
  source 1..56: mol_type = unassigned DNA
tgcattattattttgtgtggtttgctggtttggactgtttttatgctgtagttccc

SEQ ID NO: 1708 - DNA, 56 bp, Homo sapiens
  source 1..56: mol_type = unassigned DNA
gggaactacagcataaaaacagtccaaaccagcaaaccacacaaaataataatgca

SEQ ID NO: 1709 - RNA, 24 nt, Homo sapiens
  source 1..24: mol_type = unassigned RNA
tgatttattagtttatatagtaaa

SEQ ID NO: 1710 - DNA, 24 bp, Homo sapiens
  source 1..24: mol_type = unassigned DNA
tgatttattagtttatatagtaaa

SEQ ID NO: 1711 - DNA, 24 bp, Homo sapiens
  source 1..24: mol_type = unassigned DNA
tttactatataaactaataaatca

SEQ ID NO: 1712 - RNA, 28 nt, Homo sapiens
  source 1..28: mol_type = unassigned RNA
ttcttgggttttctaggtctatgagcca

SEQ ID NO: 1713 - DNA, 28 bp, Homo sapiens
  source 1..28: mol_type = unassigned DNA
ttcttgggttttctaggtctatgagcca

SEQ ID NO: 1714 - DNA, 28 bp, Homo sapiens
  source 1..28: mol_type = unassigned DNA
tggctcatagacctagaaaacccaagaa

SEQ ID NO: 1715 - RNA, 34 nt, Homo sapiens
  source 1..34: mol_type = unassigned RNA
atttttgtggatacgttagtaggtgtatattttt

SEQ ID NO: 1716 - DNA, 34 bp, Homo sapiens
  source 1..34: mol_type = unassigned DNA
atttttgtggatacgttagtaggtgtatattttt

SEQ ID NO: 1717 - DNA, 34 bp, Homo sapiens
  source 1..34: mol_type = unassigned DNA
aaaaatatacacctactaacgtatccacaaaaat

SEQ ID NO: 1718 - RNA, 30 nt, Homo sapiens
  source 1..30: mol_type = unassigned RNA
cttctgtattagtttgttggtttttgtaga

SEQ ID NO: 1719 - DNA, 30 bp, Homo sapiens
  source 1..30: mol_type = unassigned DNA
cttctgtattagtttgttggtttttgtaga

SEQ ID NO: 1720 - DNA, 30 bp, Homo sapiens
  source 1..30: mol_type = unassigned DNA
tctacaaaaaccaacaaactaatacagaag

SEQ ID NO: 1721 - RNA, 24 nt, Homo sapiens
  source 1..24: mol_type = unassigned RNA
tgatttattattttgtattgttca

SEQ ID NO: 1722 - DNA, 24 bp, Homo sapiens
  source 1..24: mol_type = unassigned DNA
tgatttattattttgtattgttca

SEQ ID NO: 1723 - DNA, 24 bp, Homo sapiens
  source 1..24: mol_type = unassigned DNA
tgaacaatacaaaataataaatca

SEQ ID NO: 1724 - RNA, 28 nt, Homo sapiens
  source 1..28: mol_type = unassigned RNA
ttttaatgtatttttggaaatatgtcat

SEQ ID NO: 1725 - DNA, 28 bp, Homo sapiens
  source 1..28: mol_type = unassigned DNA
ttttaatgtatttttggaaatatgtcat

SEQ ID NO: 1726 - DNA, 28 bp, Homo sapiens
  source 1..28: mol_type = unassigned DNA
atgacatatttccaaaaatacattaaaa

SEQ ID NO: 1727 - RNA, 62 nt, Homo sapiens
  source 1..62: mol_type = unassigned RNA
ttgtatttcagaggcaacttgcttccctttggcctttgttctgctctggtttctgtaaatca

SEQ ID NO: 1728 - DNA, 62 bp, Homo sapiens
  source 1..62: mol_type = unassigned DNA
ttgtatttcagaggcaacttgcttccctttggcctttgttctgctctggtttctgtaaatca

SEQ ID NO: 1729 - DNA, 62 bp, Homo sapiens
  source 1..62: mol_type = unassigned DNA
tgatttacagaaaccagagcagaacaaaggccaaagggaagcaagttgcctctgaaatacaa

SEQ ID NO: 1730 - RNA, 39 nt, Homo sapiens
  source 1..39: mol_type = unassigned RNA
tgatccagcaattccatgagtaggtatctatctgtatgc

SEQ ID NO: 1731 - DNA, 39 bp, Homo sapiens
  source 1..39: mol_type = unassigned DNA
tgatccagcaattccatgagtaggtatctatctgtatgc

SEQ ID NO: 1732 - DNA, 39 bp, Homo sapiens
  source 1..39: mol_type = unassigned DNA
gcatacagatagatacctactcatggaattgctggatca

SEQ ID NO: 1733 - RNA, 27 nt, Homo sapiens
  source 1..27: mol_type = unassigned RNA
gcattaggttatctatgtgtatgaaaa

SEQ ID NO: 1734 - DNA, 27 bp, Homo sapiens
  source 1..27: mol_type = unassigned DNA
gcattaggttatctatgtgtatgaaaa

SEQ ID NO: 1735 - DNA, 27 bp, Homo sapiens
  source 1..27: mol_type = unassigned DNA
ttttcatacacatagataacctaatgc

SEQ ID NO: 1736 - RNA, 67 nt, Homo sapiens
  source 1..67: mol_type = unassigned RNA
tgaacaaattcatgaaaaaatgtccatgagtacgggggtgatttttggttaactagcttatgtaatt

SEQ ID NO: 1737 - DNA, 67 bp, Homo sapiens
  source 1..67: mol_type = unassigned DNA
tgaacaaattcatgaaaaaatgtccatgagtacgggggtgatttttggttaactagcttatgtaatt

SEQ ID NO: 1738 - DNA, 67 bp, Homo sapiens
  source 1..67: mol_type = unassigned DNA
aattacataagctagttaaccaaaaatcacccccgtactcatggacattttttcatgaatttgttca

SEQ ID NO: 1739 - RNA, 63 nt, Homo sapiens
  source 1..63: mol_type = unassigned RNA
tactctcccccttattcactctatttcatcttcattgattttgttgttctttcatgctatcag

SEQ ID NO: 1740 - DNA, 63 bp, Homo sapiens
  source 1..63: mol_type = unassigned DNA
tactctcccccttattcactctatttcatcttcattgattttgttgttctttcatgctatcag

SEQ ID NO: 1741 - DNA, 63 bp, Homo sapiens
  source 1..63: mol_type = unassigned DNA
ctgatagcatgaaagaacaacaaaatcaatgaagatgaaatagagtgaataagggggagagta

SEQ ID NO: 1742 - RNA, 99 nt, Homo sapiens
  source 1..99: mol_type = unassigned RNA
tttcctattcatgtacttcttttattctccgttgccacttcttgcagacttgtggggcaggaaccatttgattcacctttatgtctgctaggagtgaaa

SEQ ID NO: 1743 - DNA, 99 bp, Homo sapiens
  source 1..99: mol_type = unassigned DNA
tttcctattcatgtacttcttttattctccgttgccacttcttgcagacttgtggggcaggaaccatttgattcacctttatgtctgctaggagtgaaa

SEQ ID NO: 1744 - DNA, 99 bp, Homo sapiens
  source 1..99: mol_type = unassigned DNA
tttcactcctagcagacataaaggtgaatcaaatggttcctgccccacaagtctgcaagaagtggcaacggagaataaaagaagtacatgaataggaaa

SEQ ID NO: 1745 - RNA, 24 nt, Homo sapiens
  source 1..24: mol_type = unassigned RNA
tactgtattagtttttttagttta

SEQ ID NO: 1746 - DNA, 24 bp, Homo sapiens
  source 1..24: mol_type = unassigned DNA
tactgtattagtttttttagttta

SEQ ID NO: 1747 - DNA, 24 bp, Homo sapiens
  source 1..24: mol_type = unassigned DNA
taaactaaaaaaactaatacagta

SEQ ID NO: 1748 - RNA, 23 nt, Homo sapiens
  source 1..23: mol_type = unassigned RNA
tagcttttcatgacttacaggga

SEQ ID NO: 1749 - DNA, 23 bp, Homo sapiens
  source 1..23: mol_type = unassigned DNA
tagcttttcatgacttacaggga

SEQ ID NO: 1750 - DNA, 23 bp, Homo sapiens
  source 1..23: mol_type = unassigned DNA
tccctgtaagtcatgaaaagcta

SEQ ID NO: 1751 - RNA, 40 nt, Homo sapiens
  source 1..40: mol_type = unassigned RNA
ttttttcaatgtagaactccccctcaccaccaccacaatg

SEQ ID NO: 1752 - DNA, 40 bp, Homo sapiens
  source 1..40: mol_type = unassigned DNA
ttttttcaatgtagaactccccctcaccaccaccacaatg

SEQ ID NO: 1753 - DNA, 40 bp, Homo sapiens
  source 1..40: mol_type = unassigned DNA
cattgtggtggtggtgagggggagttctacattgaaaaaa

SEQ ID NO: 1754 - RNA, 41 nt, Homo sapiens
  source 1..41: mol_type = unassigned RNA
tagtcaggagaattcgctgagttcttattttgtttgtttgt

SEQ ID NO: 1755 - DNA, 41 bp, Homo sapiens
  source 1..41: mol_type = unassigned DNA
tagtcaggagaattcgctgagttcttattttgtttgtttgt

SEQ ID NO: 1756 - DNA, 41 bp, Homo sapiens
  source 1..41: mol_type = unassigned DNA
acaaacaaacaaaataagaactcagcgaattctcctgacta

SEQ ID NO: 1757 - RNA, 31 nt, Homo sapiens
  source 1..31: mol_type = unassigned RNA
tggtggatgcgtttgggttgtagctaggctt

SEQ ID NO: 1758 - DNA, 31 bp, Homo sapiens
  source 1..31: mol_type = unassigned DNA
tggtggatgcgtttgggttgtagctaggctt

SEQ ID NO: 1759 - DNA, 31 bp, Homo sapiens
  source 1..31: mol_type = unassigned DNA
aagcctagctacaacccaaacgcatccacca

SEQ ID NO: 1760 - RNA, 28 nt, Homo sapiens
  source 1..28: mol_type = unassigned RNA
attattggagccttttgtagtataaata

SEQ ID NO: 1761 - DNA, 28 bp, Homo sapiens
  source 1..28: mol_type = unassigned DNA
attattggagccttttgtagtataaata

SEQ ID NO: 1762 - DNA, 28 bp, Homo sapiens
  source 1..28: mol_type = unassigned DNA
tatttatactacaaaaggctccaataat

SEQ ID NO: 1763 - RNA, 29 nt, Homo sapiens
  source 1..29: mol_type = unassigned RNA
tgagtttttcagtgttagaactcaataaa

SEQ ID NO: 1764 - DNA, 29 bp, Homo sapiens
  source 1..29: mol_type = unassigned DNA
tgagtttttcagtgttagaactcaataaa

SEQ ID NO: 1765 - DNA, 29 bp, Homo sapiens
  source 1..29: mol_type = unassigned DNA
tttattgagttctaacactgaaaaactca

SEQ ID NO: 1766 - RNA, 23 nt, Homo sapiens
  source 1..23: mol_type = unassigned RNA
ttatgtattaatttgtatagatt

SEQ ID NO: 1767 - DNA, 23 bp, Homo sapiens
  source 1..23: mol_type = unassigned DNA
ttatgtattaatttgtatagatt

SEQ ID NO: 1768 - DNA, 23 bp, Homo sapiens
  source 1..23: mol_type = unassigned DNA
aatctatacaaattaatacataa

SEQ ID NO: 1769 - RNA, 25 nt, Homo sapiens
  source 1..25: mol_type = unassigned RNA
gattattgtggccttttggggtatc

SEQ ID NO: 1770 - DNA, 25 bp, Homo sapiens
  source 1..25: mol_type = unassigned DNA
gattattgtggccttttggggtatc

SEQ ID NO: 1771 - DNA, 25 bp, Homo sapiens
  source 1..25: mol_type = unassigned DNA
gataccccaaaaggccacaataatc

SEQ ID NO: 1772 - RNA, 43 nt, Homo sapiens
  source 1..43: mol_type = unassigned RNA
ctcccaagccaaggatttcctgtggttttctaggtgtatgtat

SEQ ID NO: 1773 - DNA, 43 bp, Homo sapiens
  source 1..43: mol_type = unassigned DNA
ctcccaagccaaggatttcctgtggttttctaggtgtatgtat

SEQ ID NO: 1774 - DNA, 43 bp, Homo sapiens
  source 1..43: mol_type = unassigned DNA
atacatacacctagaaaaccacaggaaatccttggcttgggag

SEQ ID NO: 1775 - RNA, 70 nt, Homo sapiens
  source 1..70: mol_type = unassigned RNA
tttttcaatgttaaaactcaagttagataggttgaacacgtttgggctgcaaagatcagtacagaagaaa

SEQ ID NO: 1776 - DNA, 70 bp, Homo sapiens
  source 1..70: mol_type = unassigned DNA
tttttcaatgttaaaactcaagttagataggttgaacacgtttgggctgcaaagatcagtacagaagaaa

SEQ ID NO: 1777 - DNA, 70 bp, Homo sapiens
  source 1..70: mol_type = unassigned DNA
tttcttctgtactgatctttgcagcccaaacgtgttcaacctatctaacttgagttttaacattgaaaaa

SEQ ID NO: 1778 - RNA, 50 nt, Homo sapiens
  source 1..50: mol_type = unassigned RNA
aaaaggacaggtcctaagagactgcatcaagccttcagctcacaaagaat

SEQ ID NO: 1779 - DNA, 50 bp, Homo sapiens
  source 1..50: mol_type = unassigned DNA
aaaaggacaggtcctaagagactgcatcaagccttcagctcacaaagaat

SEQ ID NO: 1780 - DNA, 50 bp, Homo sapiens
  source 1..50: mol_type = unassigned DNA
attctttgtgagctgaaggcttgatgcagtctcttaggacctgtcctttt

SEQ ID NO: 1781 - RNA, 24 nt, Homo sapiens
  source 1..24: mol_type = unassigned RNA
tatgtgtttggtagaattcactgg

SEQ ID NO: 1782 - DNA, 24 bp, Homo sapiens
  source 1..24: mol_type = unassigned DNA
tatgtgtttggtagaattcactgg

SEQ ID NO: 1783 - DNA, 24 bp, Homo sapiens
  source 1..24: mol_type = unassigned DNA
ccagtgaattctaccaaacacata

SEQ ID NO: 1784 - RNA, 37 nt, Homo sapiens
  source 1..37: mol_type = unassigned RNA
attatgtattgtttgtatagttactctgcccaaagct

SEQ ID NO: 1785 - DNA, 37 bp, Homo sapiens
  source 1..37: mol_type = unassigned DNA
attatgtattgtttgtatagttactctgcccaaagct

SEQ ID NO: 1786 - DNA, 37 bp, Homo sapiens
  source 1..37: mol_type = unassigned DNA
agctttgggcagagtaactatacaaacaatacataat

SEQ ID NO: 1787 - RNA, 50 nt, Homo sapiens
  source 1..50: mol_type = unassigned RNA
agcaaagagaggagactctggagtgggcttggagccttttggaggagatg

SEQ ID NO: 1788 - DNA, 50 bp, Homo sapiens
  source 1..50: mol_type = unassigned DNA
agcaaagagaggagactctggagtgggcttggagccttttggaggagatg

SEQ ID NO: 1789 - DNA, 50 bp, Homo sapiens
  source 1..50: mol_type = unassigned DNA
catctcctccaaaaggctccaagcccactccagagtctcctctctttgct

SEQ ID NO: 1790 - RNA, 49 nt, Homo sapiens
  source 1..49: mol_type = unassigned RNA
tatactactgtggactgaattttaattgcactagtagttggatagttta

SEQ ID NO: 1791 - DNA, 49 bp, Homo sapiens
  source 1..49: mol_type = unassigned DNA
tatactactgtggactgaattttaattgcactagtagttggatagttta

SEQ ID NO: 1792 - DNA, 49 bp, Homo sapiens
  source 1..49: mol_type = unassigned DNA
taaactatccaactactagtgcaattaaaattcagtccacagtagtata

SEQ ID NO: 1793 - RNA, 25 nt, Homo sapiens
  source 1..25: mol_type = unassigned RNA
gtaagctattagtttttatagttat

SEQ ID NO: 1794 - DNA, 25 bp, Homo sapiens
  source 1..25: mol_type = unassigned DNA
gtaagctattagtttttatagttat

SEQ ID NO: 1795 - DNA, 25 bp, Homo sapiens
  source 1..25: mol_type = unassigned DNA
ataactataaaaactaatagcttac

SEQ ID NO: 1796 - RNA, 31 nt, Homo sapiens
  source 1..31: mol_type = unassigned RNA
ctttttgttgtttttgatgagtttcatggag

SEQ ID NO: 1797 - DNA, 31 bp, Homo sapiens
  source 1..31: mol_type = unassigned DNA
ctttttgttgtttttgatgagtttcatggag

SEQ ID NO: 1798 - DNA, 31 bp, Homo sapiens
  source 1..31: mol_type = unassigned DNA
ctccatgaaactcatcaaaaacaacaaaaag

SEQ ID NO: 1799 - RNA, 128 nt, Homo sapiens
  source 1..128: mol_type = unassigned RNA
ttttgatgttatcttggaagacaatgagccagtgcctctggaaacttcctacagaatgtttttgtctttttagatctgaaaatactgagaatcaaaacactgaatgaggttttattttgtttcgtttt

SEQ ID NO: 1800 - DNA, 128 bp, Homo sapiens
  source 1..128: mol_type = unassigned DNA
ttttgatgttatcttggaagacaatgagccagtgcctctggaaacttcctacagaatgtttttgtctttttagatctgaaaatactgagaatcaaaacactgaatgaggttttattttgtttcgtttt

SEQ ID NO: 1801 - DNA, 128 bp, Homo sapiens
  source 1..128: mol_type = unassigned DNA
aaaacgaaacaaaataaaacctcattcagtgttttgattctcagtattttcagatctaaaaagacaaaaacattctgtaggaagtttccagaggcactggctcattgtcttccaagataacatcaaaa

SEQ ID NO: 1802 - RNA, 31 nt, Homo sapiens
  source 1..31: mol_type = unassigned RNA
acaggacctgcgtgagcctggacgatggcct

SEQ ID NO: 1803 - DNA, 31 bp, Homo sapiens
  source 1..31: mol_type = unassigned DNA
acaggacctgcgtgagcctggacgatggcct

SEQ ID NO: 1804 - DNA, 31 bp, Homo sapiens
  source 1..31: mol_type = unassigned DNA
aggccatcgtccaggctcacgcaggtcctgt

SEQ ID NO: 1805 - RNA, 31 nt, Homo sapiens
  source 1..31: mol_type = unassigned RNA
tgtcattgttagttagttgattgttagttag

SEQ ID NO: 1806 - DNA, 31 bp, Homo sapiens
  source 1..31: mol_type = unassigned DNA
tgtcattgttagttagttgattgttagttag

SEQ ID NO: 1807 - DNA, 31 bp, Homo sapiens
  source 1..31: mol_type = unassigned DNA
ctaactaacaatcaactaactaacaatgaca

SEQ ID NO: 1808 - RNA, 32 nt, Homo sapiens
  source 1..32: mol_type = unassigned RNA
gagggcctctgaggagtcgatgatgagcgatc

SEQ ID NO: 1809 - DNA, 32 bp, Homo sapiens
  source 1..32: mol_type = unassigned DNA
gagggcctctgaggagtcgatgatgagcgatc

SEQ ID NO: 1810 - DNA, 32 bp, Homo sapiens
  source 1..32: mol_type = unassigned DNA
gatcgctcatcatcgactcctcagaggccctc

SEQ ID NO: 1811 - RNA, 23 nt, Homo sapiens
  source 1..23: mol_type = unassigned RNA
ctcacctttgtacagggtatgaa

SEQ ID NO: 1812 - DNA, 23 bp, Homo sapiens
  source 1..23: mol_type = unassigned DNA
ctcacctttgtacagggtatgaa

SEQ ID NO: 1813 - DNA, 23 bp, Homo sapiens
  source 1..23: mol_type = unassigned DNA
ttcataccctgtacaaaggtgag

SEQ ID NO: 1814 - RNA, 24 nt, Homo sapiens
  source 1..24: mol_type = unassigned RNA
taaaaactgcaattactttcacaa

SEQ ID NO: 1815 - DNA, 24 bp, Homo sapiens
  source 1..24: mol_type = unassigned DNA
taaaaactgcaattactttcacaa

SEQ ID NO: 1816 - DNA, 24 bp, Homo sapiens
  source 1..24: mol_type = unassigned DNA
ttgtgaaagtaattgcagttttta

SEQ ID NO: 1817 - RNA, 32 nt, Homo sapiens
  source 1..32: mol_type = unassigned RNA
acagagggtcttgggttatcttcctgtgtgaa

SEQ ID NO: 1818 - DNA, 32 bp, Homo sapiens
  source 1..32: mol_type = unassigned DNA
acagagggtcttgggttatcttcctgtgtgaa

SEQ ID NO: 1819 - DNA, 32 bp, Homo sapiens
  source 1..32: mol_type = unassigned DNA
ttcacacaggaagataacccaagaccctctgt

SEQ ID NO: 1820 - RNA, 24 nt, Homo sapiens
  source 1..24: mol_type = unassigned RNA
ttttttcaatggtagagcttatga

SEQ ID NO: 1821 - DNA, 24 bp, Homo sapiens
  source 1..24: mol_type = unassigned DNA
ttttttcaatggtagagcttatga

SEQ ID NO: 1822 - DNA, 24 bp, Homo sapiens
  source 1..24: mol_type = unassigned DNA
tcataagctctaccattgaaaaaa

SEQ ID NO: 1823 - RNA, 29 nt, Homo sapiens
  source 1..29: mol_type = unassigned RNA
tcttgggttagctatttgtatgttcttgt

SEQ ID NO: 1824 - DNA, 29 bp, Homo sapiens
  source 1..29: mol_type = unassigned DNA
tcttgggttagctatttgtatgttcttgt

SEQ ID NO: 1825 - DNA, 29 bp, Homo sapiens
  source 1..29: mol_type = unassigned DNA
acaagaacatacaaatagctaacccaaga

SEQ ID NO: 1826 - RNA, 22 nt, Homo sapiens
  source 1..22: mol_type = unassigned RNA
ttctctagtagttttatggttt

SEQ ID NO: 1827 - DNA, 22 bp, Homo sapiens
  source 1..22: mol_type = unassigned DNA
ttctctagtagttttatggttt

SEQ ID NO: 1828 - DNA, 22 bp, Homo sapiens
  source 1..22: mol_type = unassigned DNA
aaaccataaaactactagagaa

SEQ ID NO: 1829 - RNA, 22 nt, Homo sapiens
  source 1..22: mol_type = unassigned RNA
atctttggtttctaggtgttga

SEQ ID NO: 1830 - DNA, 22 bp, Homo sapiens
  source 1..22: mol_type = unassigned DNA
atctttggtttctaggtgttga

SEQ ID NO: 1831 - DNA, 22 bp, Homo sapiens
  source 1..22: mol_type = unassigned DNA
tcaacacctagaaaccaaagat

SEQ ID NO: 1832 - RNA, 105 nt, Homo sapiens
  source 1..105: mol_type = unassigned RNA
ggagggtgaggtgggaggatcacttgagcccaggagttggatgctgcagtgagctatgaccatgccactgtactacagcctggtcaacagagttagaccctgtct

SEQ ID NO: 1833 - DNA, 105 bp, Homo sapiens
  source 1..105: mol_type = unassigned DNA
ggagggtgaggtgggaggatcacttgagcccaggagttggatgctgcagtgagctatgaccatgccactgtactacagcctggtcaacagagttagaccctgtct

SEQ ID NO: 1834 - DNA, 105 bp, Homo sapiens
  source 1..105: mol_type = unassigned DNA
agacagggtctaactctgttgaccaggctgtagtacagtggcatggtcatagctcactgcagcatccaactcctgggctcaagtgatcctcccacctcaccctcc

SEQ ID NO: 1835 - RNA, 29 nt, Homo sapiens
  source 1..29: mol_type = unassigned RNA
tctttggtttttagcagtatgactatagt

SEQ ID NO: 1836 - DNA, 29 bp, Homo sapiens
  source 1..29: mol_type = unassigned DNA
tctttggtttttagcagtatgactatagt

SEQ ID NO: 1837 - DNA, 29 bp, Homo sapiens
  source 1..29: mol_type = unassigned DNA
actatagtcatactgctaaaaaccaaaga

SEQ ID NO: 1838 - RNA, 26 nt, Homo sapiens
  source 1..26: mol_type = unassigned RNA
aaagaaggaaggaaagaagggaaaga

SEQ ID NO: 1839 - DNA, 26 bp, Homo sapiens
  source 1..26: mol_type = unassigned DNA
tctttcccttctttccttccttcttt

SEQ ID NO: 1840 - RNA, 71 nt, Homo sapiens
  source 1..71: mol_type = unassigned RNA
cgttattggcttccttgtttctgaggctcatggatttggactgagccttgctactggcttttctggttgtg

SEQ ID NO: 1841 - DNA, 71 bp, Homo sapiens
  source 1..71: mol_type = unassigned DNA
cgttattggcttccttgtttctgaggctcatggatttggactgagccttgctactggcttttctggttgtg

SEQ ID NO: 1842 - DNA, 71 bp, Homo sapiens
  source 1..71: mol_type = unassigned DNA
cacaaccagaaaagccagtagcaaggctcagtccaaatccatgagcctcagaaacaaggaagccaataacg

SEQ ID NO: 1843 - RNA, 54 nt, Homo sapiens
  source 1..54: mol_type = unassigned RNA
ttggggggctgagtcaggagcccaggagttggatgctgcagtgagctatgatca

SEQ ID NO: 1844 - DNA, 54 bp, Homo sapiens
  source 1..54: mol_type = unassigned DNA
ttggggggctgagtcaggagcccaggagttggatgctgcagtgagctatgatca

SEQ ID NO: 1845 - DNA, 54 bp, Homo sapiens
  source 1..54: mol_type = unassigned DNA
tgatcatagctcactgcagcatccaactcctgggctcctgactcagccccccaa

SEQ ID NO: 1846 - RNA, 120 nt, Homo sapiens
  source 1..120: mol_type = unassigned RNA
gtgttacagctctgcagtgttagcacctctttattgttactgctgccatctctcaccgtctagccaattgttatctcaccatctctgggtatctagctgattgccctctcaccatctctc

SEQ ID NO: 1847 - DNA, 120 bp, Homo sapiens
  source 1..120: mol_type = unassigned DNA
gtgttacagctctgcagtgttagcacctctttattgttactgctgccatctctcaccgtctagccaattgttatctcaccatctctgggtatctagctgattgccctctcaccatctctc

SEQ ID NO: 1848 - DNA, 120 bp, Homo sapiens
  source 1..120: mol_type = unassigned DNA
gagagatggtgagagggcaatcagctagatacccagagatggtgagataacaattggctagacggtgagagatggcagcagtaacaataaagaggtgctaacactgcagagctgtaacac

SEQ ID NO: 1849 - RNA, 25 nt, Homo sapiens
  source 1..25: mol_type = unassigned RNA
atctaggttatctagctgttgacaa

SEQ ID NO: 1850 - DNA, 25 bp, Homo sapiens
  source 1..25: mol_type = unassigned DNA
atctaggttatctagctgttgacaa

SEQ ID NO: 1851 - DNA, 25 bp, Homo sapiens
  source 1..25: mol_type = unassigned DNA
ttgtcaacagctagataacctagat

SEQ ID NO: 1852 - RNA, 28 nt, Homo sapiens
  source 1..28: mol_type = unassigned RNA
ttcttgcagccttttggaggacttcctg

SEQ ID NO: 1853 - DNA, 28 bp, Homo sapiens
  source 1..28: mol_type = unassigned DNA
ttcttgcagccttttggaggacttcctg

SEQ ID NO: 1854 - DNA, 28 bp, Homo sapiens
  source 1..28: mol_type = unassigned DNA
caggaagtcctccaaaaggctgcaagaa

SEQ ID NO: 1855 - RNA, 40 nt, Homo sapiens
  source 1..40: mol_type = unassigned RNA
cttgagcccaggagttggatgctgcagtgagttatgatca

SEQ ID NO: 1856 - DNA, 40 bp, Homo sapiens
  source 1..40: mol_type = unassigned DNA
cttgagcccaggagttggatgctgcagtgagttatgatca

SEQ ID NO: 1857 - DNA, 40 bp, Homo sapiens
  source 1..40: mol_type = unassigned DNA
tgatcataactcactgcagcatccaactcctgggctcaag

SEQ ID NO: 1858 - RNA, 30 nt, Homo sapiens
  source 1..30: mol_type = unassigned RNA
atctttggtttttagctgtttgaccatgtt

SEQ ID NO: 1859 - DNA, 30 bp, Homo sapiens
  source 1..30: mol_type = unassigned DNA
atctttggtttttagctgtttgaccatgtt

SEQ ID NO: 1860 - DNA, 30 bp, Homo sapiens
  source 1..30: mol_type = unassigned DNA
aacatggtcaaacagctaaaaaccaaagat

SEQ ID NO: 1861 - RNA, 105 nt, Homo sapiens
  source 1..105: mol_type = unassigned RNA
catttctttctgttcccattgccttagtgccgattctcatcatctcattagaatcagggcatttaaaaatttttttaagtggtagaactcattttcaaataaact

SEQ ID NO: 1862 - DNA, 105 bp, Homo sapiens
  source 1..105: mol_type = unassigned DNA
catttctttctgttcccattgccttagtgccgattctcatcatctcattagaatcagggcatttaaaaatttttttaagtggtagaactcattttcaaataaact

SEQ ID NO: 1863 - DNA, 105 bp, Homo sapiens
  source 1..105: mol_type = unassigned DNA
agtttatttgaaaatgagttctaccacttaaaaaaatttttaaatgccctgattctaatgagatgatgagaatcggcactaaggcaatgggaacagaaagaaatg

SEQ ID NO: 1864 - RNA, 39 nt, Homo sapiens
  source 1..39: mol_type = unassigned RNA
cacctgagcccaggagttggatgctgcagtgagctatga

SEQ ID NO: 1865 - DNA, 39 bp, Homo sapiens
  source 1..39: mol_type = unassigned DNA
cacctgagcccaggagttggatgctgcagtgagctatga

SEQ ID NO: 1866 - DNA, 39 bp, Homo sapiens
  source 1..39: mol_type = unassigned DNA
tcatagctcactgcagcatccaactcctgggctcaggtg

SEQ ID NO: 1867 - RNA, 38 nt, Homo sapiens
  source 1..38: mol_type = unassigned RNA
tctttgttcagttttctttttttatcttgctttatttt

SEQ ID NO: 1868 - DNA, 38 bp, Homo sapiens
  source 1..38: mol_type = unassigned DNA
tctttgttcagttttctttttttatcttgctttatttt

SEQ ID NO: 1869 - DNA, 38 bp, Homo sapiens
  source 1..38: mol_type = unassigned DNA
aaaataaagcaagataaaaaaagaaaactgaacaaaga

SEQ ID NO: 1870 - RNA, 24 nt, Homo sapiens
  source 1..24: mol_type = unassigned RNA
atctttggttttctagcttaagcc

SEQ ID NO: 1871 - DNA, 24 bp, Homo sapiens
  source 1..24: mol_type = unassigned DNA
atctttggttttctagcttaagcc

SEQ ID NO: 1872 - DNA, 24 bp, Homo sapiens
  source 1..24: mol_type = unassigned DNA
ggcttaagctagaaaaccaaagat

SEQ ID NO: 1873 - RNA, 61 nt, Homo sapiens
  source 1..61: mol_type = unassigned RNA
atctttggtttttagctgtataactatgatgggtctaggcgtgtgtgggttttttttgttt

SEQ ID NO: 1874 - DNA, 61 bp, Homo sapiens
  source 1..61: mol_type = unassigned DNA
atctttggtttttagctgtataactatgatgggtctaggcgtgtgtgggttttttttgttt

SEQ ID NO: 1875 - DNA, 61 bp, Homo sapiens
  source 1..61: mol_type = unassigned DNA
aaacaaaaaaaacccacacacgcctagacccatcatagttatacagctaaaaaccaaagat

SEQ ID NO: 1876 - RNA, 27 nt, Homo sapiens
  source 1..27: mol_type = unassigned RNA
acttttgattatctagctttatggcaa

SEQ ID NO: 1877 - DNA, 27 bp, Homo sapiens
  source 1..27: mol_type = unassigned DNA
acttttgattatctagctttatggcaa

SEQ ID NO: 1878 - DNA, 27 bp, Homo sapiens
  source 1..27: mol_type = unassigned DNA
ttgccataaagctagataatcaaaagt

SEQ ID NO: 1879 - RNA, 40 nt, Homo sapiens
  source 1..40: mol_type = unassigned RNA
ttcactgaagtaatgtttttctatggcagaactcatgggg

SEQ ID NO: 1880 - DNA, 40 bp, Homo sapiens
  source 1..40: mol_type = unassigned DNA
ttcactgaagtaatgtttttctatggcagaactcatgggg

SEQ ID NO: 1881 - DNA, 40 bp, Homo sapiens
  source 1..40: mol_type = unassigned DNA
ccccatgagttctgccatagaaaaacattacttcagtgaa

SEQ ID NO: 1882 - RNA, 50 nt, Homo sapiens
  source 1..50: mol_type = unassigned RNA
aagaaaatgatgagatcgcagctgattcttgattggtgaggacttgctgg

SEQ ID NO: 1883 - DNA, 50 bp, Homo sapiens
  source 1..50: mol_type = unassigned DNA
aagaaaatgatgagatcgcagctgattcttgattggtgaggacttgctgg

SEQ ID NO: 1884 - DNA, 50 bp, Homo sapiens
  source 1..50: mol_type = unassigned DNA
ccagcaagtcctcaccaatcaagaatcagctgcgatctcatcattttctt

SEQ ID NO: 1885 - RNA, 40 nt, Homo sapiens
  source 1..40: mol_type = unassigned RNA
tattggtgatgatttatctttgggtatatagctgtcagtt

SEQ ID NO: 1886 - DNA, 40 bp, Homo sapiens
  source 1..40: mol_type = unassigned DNA
tattggtgatgatttatctttgggtatatagctgtcagtt

SEQ ID NO: 1887 - DNA, 40 bp, Homo sapiens
  source 1..40: mol_type = unassigned DNA
aactgacagctatatacccaaagataaatcatcaccaata

SEQ ID NO: 1888 - RNA, 26 nt, Homo sapiens
  source 1..26: mol_type = unassigned RNA
aatatgcatttttggaaacaggaagc

SEQ ID NO: 1889 - DNA, 26 bp, Homo sapiens
  source 1..26: mol_type = unassigned DNA
aatatgcatttttggaaacaggaagc

SEQ ID NO: 1890 - DNA, 26 bp, Homo sapiens
  source 1..26: mol_type = unassigned DNA
gcttcctgtttccaaaaatgcatatt

SEQ ID NO: 1891 - RNA, 26 nt, Homo sapiens
  source 1..26: mol_type = unassigned RNA
tctgtgggttatctaactgtatatat

SEQ ID NO: 1892 - DNA, 26 bp, Homo sapiens
  source 1..26: mol_type = unassigned DNA
tctgtgggttatctaactgtatatat

SEQ ID NO: 1893 - DNA, 26 bp, Homo sapiens
  source 1..26: mol_type = unassigned DNA
atatatacagttagataacccacaga

SEQ ID NO: 1894 - RNA, 102 nt, Homo sapiens
  source 1..102: mol_type = unassigned RNA
ttttcttctttgctttttagctgtatgacaaaattaacacaaagtcttcaccacaaatcaggaatcctccaagcgatgcagtacagagagccaaagaggtaa

SEQ ID NO: 1895 - DNA, 102 bp, Homo sapiens
  source 1..102: mol_type = unassigned DNA
ttttcttctttgctttttagctgtatgacaaaattaacacaaagtcttcaccacaaatcaggaatcctccaagcgatgcagtacagagagccaaagaggtaa

SEQ ID NO: 1896 - DNA, 102 bp, Homo sapiens
  source 1..102: mol_type = unassigned DNA
ttacctctttggctctctgtactgcatcgcttggaggattcctgatttgtggtgaagactttgtgttaattttgtcatacagctaaaaagcaaagaagaaaa

SEQ ID NO: 1897 - RNA, 87 nt, Homo sapiens
  source 1..87: mol_type = unassigned RNA
gtgatttcactgtagtttgtttaaatggtagactcacagaagtagaatagaatgttggttaccaggggctggaggggtggactggaa

SEQ ID NO: 1898 - DNA, 87 bp, Homo sapiens
  source 1..87: mol_type = unassigned DNA
gtgatttcactgtagtttgtttaaatggtagactcacagaagtagaatagaatgttggttaccaggggctggaggggtggactggaa

SEQ ID NO: 1899 - DNA, 87 bp, Homo sapiens
  source 1..87: mol_type = unassigned DNA
ttccagtccacccctccagcccctggtaaccaacattctattctacttctgtgagtctaccatttaaacaaactacagtgaaatcac

SEQ ID NO: 1900 - RNA, 40 nt, Homo sapiens
  source 1..40: mol_type = unassigned RNA
gctggcgagcaggctgaagatgatctggccagcacgggag

SEQ ID NO: 1901 - DNA, 40 bp, Homo sapiens
  source 1..40: mol_type = unassigned DNA
gctggcgagcaggctgaagatgatctggccagcacgggag

SEQ ID NO: 1902 - DNA, 40 bp, Homo sapiens
  source 1..40: mol_type = unassigned DNA
ctcccgtgctggccagatcatcttcagcctgctcgccagc

SEQ ID NO: 1903 - RNA, 41 nt, Homo sapiens
  source 1..41: mol_type = unassigned RNA
ttaaggttttagtttttatagttaactctgtagcttacatg

SEQ ID NO: 1904 - DNA, 41 bp, Homo sapiens
  source 1..41: mol_type = unassigned DNA
ttaaggttttagtttttatagttaactctgtagcttacatg

SEQ ID NO: 1905 - DNA, 41 bp, Homo sapiens
  source 1..41: mol_type = unassigned DNA
catgtaagctacagagttaactataaaaactaaaaccttaa

SEQ ID NO: 1906 - RNA, 39 nt, Homo sapiens
  source 1..39: mol_type = unassigned RNA
cctactaaaattctttccttatctatctgtatgcatact

SEQ ID NO: 1907 - DNA, 39 bp, Homo sapiens
  source 1..39: mol_type = unassigned DNA
cctactaaaattctttccttatctatctgtatgcatact

SEQ ID NO: 1908 - DNA, 39 bp, Homo sapiens
  source 1..39: mol_type = unassigned DNA
agtatgcatacagatagataaggaaagaattttagtagg

SEQ ID NO: 1909 - RNA, 25 nt, Homo sapiens
  source 1..25: mol_type = unassigned RNA
agtctctcttgctcaattgacaatc

SEQ ID NO: 1910 - DNA, 25 bp, Homo sapiens
  source 1..25: mol_type = unassigned DNA
agtctctcttgctcaattgacaatc

SEQ ID NO: 1911 - DNA, 25 bp, Homo sapiens
  source 1..25: mol_type = unassigned DNA
gattgtcaattgagcaagagagact

SEQ ID NO: 1912 - RNA, 55 nt, Homo sapiens
  source 1..55: mol_type = unassigned RNA
ttggttctgctggtcaaaatgagtccatgtttttgaaaggtagaactcattgtta

SEQ ID NO: 1913 - DNA, 55 bp, Homo sapiens
  source 1..55: mol_type = unassigned DNA
ttggttctgctggtcaaaatgagtccatgtttttgaaaggtagaactcattgtta

SEQ ID NO: 1914 - DNA, 55 bp, Homo sapiens
  source 1..55: mol_type = unassigned DNA
taacaatgagttctacctttcaaaaacatggactcattttgaccagcagaaccaa

SEQ ID NO: 1915 - RNA, 145 nt, Homo sapiens
  source 1..145: mol_type = unassigned RNA
tggtgaggtcgcatcaggtcatttcaggctctgctgtgtcaagtcggggagcggctctttgctcagcttagagaactggaagaggccgcaaccttctgcctgctggaggctggaggatggatggagcctggagcctgggacacta

SEQ ID NO: 1916 - DNA, 145 bp, Homo sapiens
  source 1..145: mol_type = unassigned DNA
tggtgaggtcgcatcaggtcatttcaggctctgctgtgtcaagtcggggagcggctctttgctcagcttagagaactggaagaggccgcaaccttctgcctgctggaggctggaggatggatggagcctggagcctgggacacta

SEQ ID NO: 1917 - DNA, 145 bp, Homo sapiens
  source 1..145: mol_type = unassigned DNA
tagtgtcccaggctccaggctccatccatcctccagcctccagcaggcagaaggttgcggcctcttccagttctctaagctgagcaaagagccgctccccgacttgacacagcagagcctgaaatgacctgatgcgacctcacca

SEQ ID NO: 1918 - RNA, 33 nt, Homo sapiens
  source 1..33: mol_type = unassigned RNA
tacattcatttctgtggttatctaactgcaatt

SEQ ID NO: 1919 - DNA, 33 bp, Homo sapiens
  source 1..33: mol_type = unassigned DNA
tacattcatttctgtggttatctaactgcaatt

SEQ ID NO: 1920 - DNA, 33 bp, Homo sapiens
  source 1..33: mol_type = unassigned DNA
aattgcagttagataaccacagaaatgaatgta

SEQ ID NO: 1921 - RNA, 37 nt, Homo sapiens
  source 1..37: mol_type = unassigned RNA
gcaatcaaatgcttggcttatatagctgtatgtttgg

SEQ ID NO: 1922 - DNA, 37 bp, Homo sapiens
  source 1..37: mol_type = unassigned DNA
gcaatcaaatgcttggcttatatagctgtatgtttgg

SEQ ID NO: 1923 - DNA, 37 bp, Homo sapiens
  source 1..37: mol_type = unassigned DNA
ccaaacatacagctatataagccaagcatttgattgc

SEQ ID NO: 1924 - RNA, 23 nt, Homo sapiens
  source 1..23: mol_type = unassigned RNA
ttctccaatggttgaactaactt

SEQ ID NO: 1925 - DNA, 23 bp, Homo sapiens
  source 1..23: mol_type = unassigned DNA
ttctccaatggttgaactaactt

SEQ ID NO: 1926 - DNA, 23 bp, Homo sapiens
  source 1..23: mol_type = unassigned DNA
aagttagttcaaccattggagaa

SEQ ID NO: 1927 - RNA, 23 nt, Homo sapiens
  source 1..23: mol_type = unassigned RNA
tctttgctaatctagcttatggt

SEQ ID NO: 1928 - DNA, 23 bp, Homo sapiens
  source 1..23: mol_type = unassigned DNA
tctttgctaatctagcttatggt

SEQ ID NO: 1929 - DNA, 23 bp, Homo sapiens
  source 1..23: mol_type = unassigned DNA
accataagctagattagcaaaga

SEQ ID NO: 1930 - RNA, 24 nt, Homo sapiens
  source 1..24: mol_type = unassigned RNA
ttttttcaaaggtagagctcatat

SEQ ID NO: 1931 - DNA, 24 bp, Homo sapiens
  source 1..24: mol_type = unassigned DNA
ttttttcaaaggtagagctcatat

SEQ ID NO: 1932 - DNA, 24 bp, Homo sapiens
  source 1..24: mol_type = unassigned DNA
atatgagctctacctttgaaaaaa

SEQ ID NO: 1933 - RNA, 56 nt, Homo sapiens
  source 1..56: mol_type = unassigned RNA
acaagtaattcgcgatttcactgtagtttgtttaaatggtagactcacagaagtag

SEQ ID NO: 1934 - DNA, 56 bp, Homo sapiens
  source 1..56: mol_type = unassigned DNA
acaagtaattcgcgatttcactgtagtttgtttaaatggtagactcacagaagtag

SEQ ID NO: 1935 - DNA, 56 bp, Homo sapiens
  source 1..56: mol_type = unassigned DNA
ctacttctgtgagtctaccatttaaacaaactacagtgaaatcgcgaattacttgt

SEQ ID NO: 1936 - RNA, 26 nt, Homo sapiens
  source 1..26: mol_type = unassigned RNA
tgcgtattgttatctagctgtatctg

SEQ ID NO: 1937 - DNA, 26 bp, Homo sapiens
  source 1..26: mol_type = unassigned DNA
tgcgtattgttatctagctgtatctg

SEQ ID NO: 1938 - DNA, 26 bp, Homo sapiens
  source 1..26: mol_type = unassigned DNA
cagatacagctagataacaatacgca

SEQ ID NO: 1939 - RNA, 24 nt, Homo sapiens
  source 1..24: mol_type = unassigned RNA
taatgtattaaaatgtatagtttt

SEQ ID NO: 1940 - DNA, 24 bp, Homo sapiens
  source 1..24: mol_type = unassigned DNA
taatgtattaaaatgtatagtttt

SEQ ID NO: 1941 - DNA, 24 bp, Homo sapiens
  source 1..24: mol_type = unassigned DNA
aaaactatacattttaatacatta

SEQ ID NO: 1942 - RNA, 23 nt, Homo sapiens
  source 1..23: mol_type = unassigned RNA
tttttcaaaggtagagctcatat

SEQ ID NO: 1943 - DNA, 23 bp, Homo sapiens
  source 1..23: mol_type = unassigned DNA
tttttcaaaggtagagctcatat

SEQ ID NO: 1944 - DNA, 23 bp, Homo sapiens
  source 1..23: mol_type = unassigned DNA
atatgagctctacctttgaaaaa

SEQ ID NO: 1945 - RNA, 30 nt, Homo sapiens
  source 1..30: mol_type = unassigned RNA
actttggttatctaactttattcctatagt

SEQ ID NO: 1946 - DNA, 30 bp, Homo sapiens
  source 1..30: mol_type = unassigned DNA
actttggttatctaactttattcctatagt

SEQ ID NO: 1947 - DNA, 30 bp, Homo sapiens
  source 1..30: mol_type = unassigned DNA
actataggaataaagttagataaccaaagt

SEQ ID NO: 1948 - RNA, 74 nt, Homo sapiens
  source 1..74: mol_type = unassigned RNA
aacgggagttctgggagcggacctcacacctgggtctggactgagctgcgctacttactctcctcactgtcagt

SEQ ID NO: 1949 - DNA, 74 bp, Homo sapiens
  source 1..74: mol_type = unassigned DNA
aacgggagttctgggagcggacctcacacctgggtctggactgagctgcgctacttactctcctcactgtcagt

SEQ ID NO: 1950 - DNA, 74 bp, Homo sapiens
  source 1..74: mol_type = unassigned DNA
actgacagtgaggagagtaagtagcgcagctcagtccagacccaggtgtgaggtccgctcccagaactcccgtt

SEQ ID NO: 1951 - RNA, 30 nt, Homo sapiens
  source 1..30: mol_type = unassigned RNA
aagtgggttgggttatatagctgcatgagt

SEQ ID NO: 1952 - DNA, 30 bp, Homo sapiens
  source 1..30: mol_type = unassigned DNA
aagtgggttgggttatatagctgcatgagt

SEQ ID NO: 1953 - DNA, 30 bp, Homo sapiens
  source 1..30: mol_type = unassigned DNA
actcatgcagctatataacccaacccactt

SEQ ID NO: 1954 - RNA, 26 nt, Homo sapiens
  source 1..26: mol_type = unassigned RNA
ttataggtacgtctgtgtgtatatat

SEQ ID NO: 1955 - DNA, 26 bp, Homo sapiens
  source 1..26: mol_type = unassigned DNA
ttataggtacgtctgtgtgtatatat

SEQ ID NO: 1956 - DNA, 26 bp, Homo sapiens
  source 1..26: mol_type = unassigned DNA
atatatacacacagacgtacctataa

SEQ ID NO: 1957 - RNA, 26 nt, Homo sapiens
  source 1..26: mol_type = unassigned RNA
aaatttgtgaatctagctgtatgaca

SEQ ID NO: 1958 - DNA, 26 bp, Homo sapiens
  source 1..26: mol_type = unassigned DNA
aaatttgtgaatctagctgtatgaca

SEQ ID NO: 1959 - DNA, 26 bp, Homo sapiens
  source 1..26: mol_type = unassigned DNA
tgtcatacagctagattcacaaattt

SEQ ID NO: 1960 - RNA, 25 nt, Homo sapiens
  source 1..25: mol_type = unassigned RNA
atattaaagggaaagatctctgtat

SEQ ID NO: 1961 - DNA, 25 bp, Homo sapiens
  source 1..25: mol_type = unassigned DNA
atattaaagggaaagatctctgtat

SEQ ID NO: 1962 - DNA, 25 bp, Homo sapiens
  source 1..25: mol_type = unassigned DNA
atacagagatctttccctttaatat

SEQ ID NO: 1963 - RNA, 71 nt, Homo sapiens
  source 1..71: mol_type = unassigned RNA
ccaataacagactctgaattgaggcaataattcatatctaccaaccaaaaaagtccaggaccagatagatt

SEQ ID NO: 1964 - DNA, 71 bp, Homo sapiens
  source 1..71: mol_type = unassigned DNA
ccaataacagactctgaattgaggcaataattcatatctaccaaccaaaaaagtccaggaccagatagatt

SEQ ID NO: 1965 - DNA, 71 bp, Homo sapiens
  source 1..71: mol_type = unassigned DNA
aatctatctggtcctggacttttttggttggtagatatgaattattgcctcaattcagagtctgttattgg

SEQ ID NO: 1966 - RNA, 40 nt, Homo sapiens
  source 1..40: mol_type = unassigned RNA
ttatggcactggtccaactcccctaagcatttgtgacctt

SEQ ID NO: 1967 - DNA, 40 bp, Homo sapiens
  source 1..40: mol_type = unassigned DNA
ttatggcactggtccaactcccctaagcatttgtgacctt

SEQ ID NO: 1968 - DNA, 40 bp, Homo sapiens
  source 1..40: mol_type = unassigned DNA
aaggtcacaaatgcttaggggagttggaccagtgccataa

SEQ ID NO: 1969 - RNA, 50 nt, Homo sapiens
  source 1..50: mol_type = unassigned RNA
actgcttaggagtgtgggtagcctttggagtagaacagtactccagggag

SEQ ID NO: 1970 - DNA, 50 bp, Homo sapiens
  source 1..50: mol_type = unassigned DNA
actgcttaggagtgtgggtagcctttggagtagaacagtactccagggag

SEQ ID NO: 1971 - DNA, 50 bp, Homo sapiens
  source 1..50: mol_type = unassigned DNA
ctccctggagtactgttctactccaaaggctacccacactcctaagcagt

SEQ ID NO: 1972 - RNA, 26 nt, Homo sapiens
  source 1..26: mol_type = unassigned RNA
ccctttggttatctagcagtgaagat

SEQ ID NO: 1973 - DNA, 26 bp, Homo sapiens
  source 1..26: mol_type = unassigned DNA
ccctttggttatctagcagtgaagat

SEQ ID NO: 1974 - DNA, 26 bp, Homo sapiens
  source 1..26: mol_type = unassigned DNA
atcttcactgctagataaccaaaggg

SEQ ID NO: 1975 - RNA, 49 nt, Homo sapiens
  source 1..49: mol_type = unassigned RNA
tatatttatagggcatgggaaagagtcagtgaagggagatgtgagatgg

SEQ ID NO: 1976 - DNA, 49 bp, Homo sapiens
  source 1..49: mol_type = unassigned DNA
tatatttatagggcatgggaaagagtcagtgaagggagatgtgagatgg

SEQ ID NO: 1977 - DNA, 49 bp, Homo sapiens
  source 1..49: mol_type = unassigned DNA
ccatctcacatctcccttcactgactctttcccatgccctataaatata

SEQ ID NO: 1978 - RNA, 24 nt, Homo sapiens
  source 1..24: mol_type = unassigned RNA
gctttggttatctaactatgggaa

SEQ ID NO: 1979 - DNA, 24 bp, Homo sapiens
  source 1..24: mol_type = unassigned DNA
gctttggttatctaactatgggaa

SEQ ID NO: 1980 - DNA, 24 bp, Homo sapiens
  source 1..24: mol_type = unassigned DNA
ttcccatagttagataaccaaagc

SEQ ID NO: 1981 - RNA, 45 nt, Homo sapiens
  source 1..45: mol_type = unassigned RNA
ttctttggtttccagttgtatgaaatatctttttctactcttcac

SEQ ID NO: 1982 - DNA, 45 bp, Homo sapiens
  source 1..45: mol_type = unassigned DNA
ttctttggtttccagttgtatgaaatatctttttctactcttcac

SEQ ID NO: 1983 - DNA, 45 bp, Homo sapiens
  source 1..45: mol_type = unassigned DNA
gtgaagagtagaaaaagatatttcatacaactggaaaccaaagaa

SEQ ID NO: 1984 - RNA, 26 nt, Homo sapiens
  source 1..26: mol_type = unassigned RNA
ttatttcactggtagaatcacaaagt

SEQ ID NO: 1985 - DNA, 26 bp, Homo sapiens
  source 1..26: mol_type = unassigned DNA
ttatttcactggtagaatcacaaagt

SEQ ID NO: 1986 - DNA, 26 bp, Homo sapiens
  source 1..26: mol_type = unassigned DNA
actttgtgattctaccagtgaaataa

SEQ ID NO: 1987 - RNA, 47 nt, Homo sapiens
  source 1..47: mol_type = unassigned RNA
ttcaccatgtctagctgtatgatcttgggtaaataacttaatccagt

SEQ ID NO: 1988 - DNA, 47 bp, Homo sapiens
  source 1..47: mol_type = unassigned DNA
ttcaccatgtctagctgtatgatcttgggtaaataacttaatccagt

SEQ ID NO: 1989 - DNA, 47 bp, Homo sapiens
  source 1..47: mol_type = unassigned DNA
actggattaagttatttacccaagatcatacagctagacatggtgaa

SEQ ID NO: 1990 - RNA, 76 nt, Homo sapiens
  source 1..76: mol_type = unassigned RNA
cccaccaagaaaacaaaactcttttgctatctatctgtctgtctatctatctatctatctatctatctatccatct

SEQ ID NO: 1991 - DNA, 76 bp, Homo sapiens
  source 1..76: mol_type = unassigned DNA
cccaccaagaaaacaaaactcttttgctatctatctgtctgtctatctatctatctatctatctatctatccatct

SEQ ID NO: 1992 - DNA, 76 bp, Homo sapiens
  source 1..76: mol_type = unassigned DNA
agatggatagatagatagatagatagatagatagacagacagatagatagcaaaagagttttgttttcttggtggg

SEQ ID NO: 1993 - RNA, 29 nt, Homo sapiens
  source 1..29: mol_type = unassigned RNA
tacgtggtgggcacagaatctggtaaaga

SEQ ID NO: 1994 - DNA, 29 bp, Homo sapiens
  source 1..29: mol_type = unassigned DNA
tacgtggtgggcacagaatctggtaaaga

SEQ ID NO: 1995 - DNA, 29 bp, Homo sapiens
  source 1..29: mol_type = unassigned DNA
tctttaccagattctgtgcccaccacgta

SEQ ID NO: 1996 - RNA, 23 nt, Homo sapiens
  source 1..23: mol_type = unassigned RNA
tgaggtattattttgtctccaaa

SEQ ID NO: 1997 - DNA, 23 bp, Homo sapiens
  source 1..23: mol_type = unassigned DNA
tgaggtattattttgtctccaaa

SEQ ID NO: 1998 - DNA, 23 bp, Homo sapiens
  source 1..23: mol_type = unassigned DNA
tttggagacaaaataatacctca

SEQ ID NO: 1999 - RNA, 31 nt, Homo sapiens
  source 1..31: mol_type = unassigned RNA
cacatttgctggactgagatgtgctataatt

SEQ ID NO: 2000 - DNA, 31 bp, Homo sapiens
  source 1..31: mol_type = unassigned DNA
cacatttgctggactgagatgtgctataatt

SEQ ID NO: 2001 - DNA, 31 bp, Homo sapiens
  source 1..31: mol_type = unassigned DNA
aattatagcacatctcagtccagcaaatgtg

SEQ ID NO: 2002 - RNA, 24 nt, Homo sapiens
  source 1..24: mol_type = unassigned RNA
tatttcccttttccaggcttgcat

SEQ ID NO: 2003 - DNA, 24 bp, Homo sapiens
  source 1..24: mol_type = unassigned DNA
tatttcccttttccaggcttgcat

SEQ ID NO: 2004 - DNA, 24 bp, Homo sapiens
  source 1..24: mol_type = unassigned DNA
atgcaagcctggaaaagggaaata

SEQ ID NO: 2005 - RNA, 23 nt, Homo sapiens
  source 1..23: mol_type = unassigned RNA
tttgtgggtatctaggtgtatat

SEQ ID NO: 2006 - DNA, 23 bp, Homo sapiens
  source 1..23: mol_type = unassigned DNA
tttgtgggtatctaggtgtatat

SEQ ID NO: 2007 - DNA, 23 bp, Homo sapiens
  source 1..23: mol_type = unassigned DNA
atatacacctagatacccacaaa

SEQ ID NO: 2008 - RNA, 67 nt, Homo sapiens
  source 1..67: mol_type = unassigned RNA
aatataatttctttggttatgtagctgaacttgtaaatgaatgatatgtatatattcttactggaga

SEQ ID NO: 2009 - DNA, 67 bp, Homo sapiens
  source 1..67: mol_type = unassigned DNA
aatataatttctttggttatgtagctgaacttgtaaatgaatgatatgtatatattcttactggaga

SEQ ID NO: 2010 - DNA, 67 bp, Homo sapiens
  source 1..67: mol_type = unassigned DNA
tctccagtaagaatatatacatatcattcatttacaagttcagctacataaccaaagaaattatatt

SEQ ID NO: 2011 - RNA, 34 nt, Homo sapiens
  source 1..34: mol_type = unassigned RNA
ttctttttatgtttcagtttgtatagtttgtatg

SEQ ID NO: 2012 - DNA, 34 bp, Homo sapiens
  source 1..34: mol_type = unassigned DNA
ttctttttatgtttcagtttgtatagtttgtatg

SEQ ID NO: 2013 - DNA, 34 bp, Homo sapiens
  source 1..34: mol_type = unassigned DNA
catacaaactatacaaactgaaacataaaaagaa

SEQ ID NO: 2014 - RNA, 28 nt, Homo sapiens
  source 1..28: mol_type = unassigned RNA
gcattcggtggtcagaggcctgtgcggc

SEQ ID NO: 2015 - DNA, 28 bp, Homo sapiens
  source 1..28: mol_type = unassigned DNA
gcattcggtggtcagaggcctgtgcggc

SEQ ID NO: 2016 - DNA, 28 bp, Homo sapiens
  source 1..28: mol_type = unassigned DNA
gccgcacaggcctctgaccaccgaatgc

SEQ ID NO: 2017 - RNA, 40 nt, Homo sapiens
  source 1..40: mol_type = unassigned RNA
gagtcacttgagcccaggagttggatgctgcagggatcta

SEQ ID NO: 2018 - DNA, 40 bp, Homo sapiens
  source 1..40: mol_type = unassigned DNA
gagtcacttgagcccaggagttggatgctgcagggatcta

SEQ ID NO: 2019 - DNA, 40 bp, Homo sapiens
  source 1..40: mol_type = unassigned DNA
tagatccctgcagcatccaactcctgggctcaagtgactc

SEQ ID NO: 2020 - RNA, 25 nt, Homo sapiens
  source 1..25: mol_type = unassigned RNA
tgatggtaggcttttggagaagtta

SEQ ID NO: 2021 - DNA, 25 bp, Homo sapiens
  source 1..25: mol_type = unassigned DNA
tgatggtaggcttttggagaagtta

SEQ ID NO: 2022 - DNA, 25 bp, Homo sapiens
  source 1..25: mol_type = unassigned DNA
taacttctccaaaagcctaccatca

SEQ ID NO: 2023 - RNA, 31 nt, Homo sapiens
  source 1..31: mol_type = unassigned RNA
tctgtggttatgtgctgtatggatgtcttca

SEQ ID NO: 2024 - DNA, 31 bp, Homo sapiens
  source 1..31: mol_type = unassigned DNA
tctgtggttatgtgctgtatggatgtcttca

SEQ ID NO: 2025 - DNA, 31 bp, Homo sapiens
  source 1..31: mol_type = unassigned DNA
tgaagacatccatacagcacataaccacaga

SEQ ID NO: 2026 - RNA, 78 nt, Homo sapiens
  source 1..78: mol_type = unassigned RNA
ctgtctctcgagggaagcactttctcatcctctttccccatgtacacaagcaagaatctgtcctcctgaacacgagtc

SEQ ID NO: 2027 - DNA, 78 bp, Homo sapiens
  source 1..78: mol_type = unassigned DNA
ctgtctctcgagggaagcactttctcatcctctttccccatgtacacaagcaagaatctgtcctcctgaacacgagtc

SEQ ID NO: 2028 - DNA, 78 bp, Homo sapiens
  source 1..78: mol_type = unassigned DNA
gactcgtgttcaggaggacagattcttgcttgtgtacatggggaaagaggatgagaaagtgcttccctcgagagacag

SEQ ID NO: 2029 - RNA, 36 nt, Homo sapiens
  source 1..36: mol_type = unassigned RNA
agggtctagtctcctttgtttatctgctgtctgagc

SEQ ID NO: 2030 - DNA, 36 bp, Homo sapiens
  source 1..36: mol_type = unassigned DNA
agggtctagtctcctttgtttatctgctgtctgagc

SEQ ID NO: 2031 - DNA, 36 bp, Homo sapiens
  source 1..36: mol_type = unassigned DNA
gctcagacagcagataaacaaaggagactagaccct

SEQ ID NO: 2032 - RNA, 30 nt, Homo sapiens
  source 1..30: mol_type = unassigned RNA
atctttgtttatctctctgaatgcaaggcc

SEQ ID NO: 2033 - DNA, 30 bp, Homo sapiens
  source 1..30: mol_type = unassigned DNA
atctttgtttatctctctgaatgcaaggcc

SEQ ID NO: 2034 - DNA, 30 bp, Homo sapiens
  source 1..30: mol_type = unassigned DNA
ggccttgcattcagagagataaacaaagat

SEQ ID NO: 2035 - RNA, 57 nt, Homo sapiens
  source 1..57: mol_type = unassigned RNA
actgtctctaaatctctccagagggatgcactatctcaatatccaaggctgctgttc

SEQ ID NO: 2036 - DNA, 57 bp, Homo sapiens
  source 1..57: mol_type = unassigned DNA
actgtctctaaatctctccagagggatgcactatctcaatatccaaggctgctgttc

SEQ ID NO: 2037 - DNA, 57 bp, Homo sapiens
  source 1..57: mol_type = unassigned DNA
gaacagcagccttggatattgagatagtgcatccctctggagagatttagagacagt

SEQ ID NO: 2038 - RNA, 76 nt, Homo sapiens
  source 1..76: mol_type = unassigned RNA
aaacgtttttattctagagaggtggactcaactgtgaagttcttccaactttatggattttaaagtggccaagaca

SEQ ID NO: 2039 - DNA, 76 bp, Homo sapiens
  source 1..76: mol_type = unassigned DNA
aaacgtttttattctagagaggtggactcaactgtgaagttcttccaactttatggattttaaagtggccaagaca

SEQ ID NO: 2040 - DNA, 76 bp, Homo sapiens
  source 1..76: mol_type = unassigned DNA
tgtcttggccactttaaaatccataaagttggaagaacttcacagttgagtccacctctctagaataaaaacgttt

SEQ ID NO: 2041 - RNA, 25 nt, Homo sapiens
  source 1..25: mol_type = unassigned RNA
gagagtggctatctagcagtatgaa

SEQ ID NO: 2042 - DNA, 25 bp, Homo sapiens
  source 1..25: mol_type = unassigned DNA
gagagtggctatctagcagtatgaa

SEQ ID NO: 2043 - DNA, 25 bp, Homo sapiens
  source 1..25: mol_type = unassigned DNA
ttcatactgctagatagccactctc

SEQ ID NO: 2044 - RNA, 28 nt, Homo sapiens
  source 1..28: mol_type = unassigned RNA
tgaaacacagaccctaggaccacgcagg

SEQ ID NO: 2045 - DNA, 28 bp, Homo sapiens
  source 1..28: mol_type = unassigned DNA
tgaaacacagaccctaggaccacgcagg

SEQ ID NO: 2046 - DNA, 28 bp, Homo sapiens
  source 1..28: mol_type = unassigned DNA
cctgcgtggtcctagggtctgtgtttca

SEQ ID NO: 2047 - RNA, 59 nt, Homo sapiens
  source 1..59: mol_type = unassigned RNA
tttgatcaatagatgctcctgatggcctggtggctgatgaacttttgcactgaactttc

SEQ ID NO: 2048 - DNA, 59 bp, Homo sapiens
  source 1..59: mol_type = unassigned DNA
tttgatcaatagatgctcctgatggcctggtggctgatgaacttttgcactgaactttc

SEQ ID NO: 2049 - DNA, 59 bp, Homo sapiens
  source 1..59: mol_type = unassigned DNA
gaaagttcagtgcaaaagttcatcagccaccaggccatcaggagcatctattgatcaaa

SEQ ID NO: 2050 - RNA, 43 nt, Homo sapiens
  source 1..43: mol_type = unassigned RNA
tatatctgagattccttgtgtctctagctgtctgaggcattac

SEQ ID NO: 2051 - DNA, 43 bp, Homo sapiens
  source 1..43: mol_type = unassigned DNA
tatatctgagattccttgtgtctctagctgtctgaggcattac

SEQ ID NO: 2052 - DNA, 43 bp, Homo sapiens
  source 1..43: mol_type = unassigned DNA
gtaatgcctcagacagctagagacacaaggaatctcagatata

SEQ ID NO: 2053 - RNA, 23 nt, Homo sapiens
  source 1..23: mol_type = unassigned RNA
tctttgtgtatctagcagtattg

SEQ ID NO: 2054 - DNA, 23 bp, Homo sapiens
  source 1..23: mol_type = unassigned DNA
tctttgtgtatctagcagtattg

SEQ ID NO: 2055 - DNA, 23 bp, Homo sapiens
  source 1..23: mol_type = unassigned DNA
caatactgctagatacacaaaga

SEQ ID NO: 2056 - RNA, 25 nt, Homo sapiens
  source 1..25: mol_type = unassigned RNA
tactcaaactgtgcgggcaagttac

SEQ ID NO: 2057 - DNA, 25 bp, Homo sapiens
  source 1..25: mol_type = unassigned DNA
tactcaaactgtgcgggcaagttac

SEQ ID NO: 2058 - DNA, 25 bp, Homo sapiens
  source 1..25: mol_type = unassigned DNA
gtaacttgcccgcacagtttgagta

SEQ ID NO: 2059 - RNA, 47 nt, Homo sapiens
  source 1..47: mol_type = unassigned RNA
cagatgctctattgaacttcgtactatagagggaagtgctttcttta

SEQ ID NO: 2060 - DNA, 47 bp, Homo sapiens
  source 1..47: mol_type = unassigned DNA
cagatgctctattgaacttcgtactatagagggaagtgctttcttta

SEQ ID NO: 2061 - DNA, 47 bp, Homo sapiens
  source 1..47: mol_type = unassigned DNA
taaagaaagcacttccctctatagtacgaagttcaatagagcatctg

SEQ ID NO: 2062 - RNA, 53 nt, Homo sapiens
  source 1..53: mol_type = unassigned RNA
tggggtctatttggggctgggactctgagtttatctcctgtatgacttgtgta

SEQ ID NO: 2063 - DNA, 53 bp, Homo sapiens
  source 1..53: mol_type = unassigned DNA
tggggtctatttggggctgggactctgagtttatctcctgtatgacttgtgta

SEQ ID NO: 2064 - DNA, 53 bp, Homo sapiens
  source 1..53: mol_type = unassigned DNA
tacacaagtcatacaggagataaactcagagtcccagccccaaatagacccca

SEQ ID NO: 2065 - RNA, 25 nt, Homo sapiens
  source 1..25: mol_type = unassigned RNA
tggtagtatcagactgttgatgaga

SEQ ID NO: 2066 - DNA, 25 bp, Homo sapiens
  source 1..25: mol_type = unassigned DNA
tggtagtatcagactgttgatgaga

SEQ ID NO: 2067 - DNA, 25 bp, Homo sapiens
  source 1..25: mol_type = unassigned DNA
tctcatcaacagtctgatactacca

SEQ ID NO: 2068 - RNA, 165 nt, Homo sapiens
  source 1..165: mol_type = unassigned RNA
ccccttcctttctcttctgcccccatgaggaggaagtgaagtggagcagaaagagcgtgggctatggttgagcccactggagtctgcactccacccagcctccccctggctttctagctgtatgactttaagcaggtggtttcaccccctctccctctccacttt

SEQ ID NO: 2069 - DNA, 165 bp, Homo sapiens
  source 1..165: mol_type = unassigned DNA
ccccttcctttctcttctgcccccatgaggaggaagtgaagtggagcagaaagagcgtgggctatggttgagcccactggagtctgcactccacccagcctccccctggctttctagctgtatgactttaagcaggtggtttcaccccctctccctctccacttt

SEQ ID NO: 2070 - DNA, 165 bp, Homo sapiens
  source 1..165: mol_type = unassigned DNA
aaagtggagagggagagggggtgaaaccacctgcttaaagtcatacagctagaaagccagggggaggctgggtggagtgcagactccagtgggctcaaccatagcccacgctctttctgctccacttcacttcctcctcatgggggcagaagagaaaggaagggg

SEQ ID NO: 2071 - RNA, 44 nt, Homo sapiens
  source 1..44: mol_type = unassigned RNA
caaaaaattcctatagcctagtgctgtcatagctgtggtaacat

SEQ ID NO: 2072 - DNA, 44 bp, Homo sapiens
  source 1..44: mol_type = unassigned DNA
caaaaaattcctatagcctagtgctgtcatagctgtggtaacat

SEQ ID NO: 2073 - DNA, 44 bp, Homo sapiens
  source 1..44: mol_type = unassigned DNA
atgttaccacagctatgacagcactaggctataggaattttttg

SEQ ID NO: 2074 - RNA, 24 nt, Homo sapiens
  source 1..24: mol_type = unassigned RNA
tatttgcttctttagctgtatgtt

SEQ ID NO: 2075 - DNA, 24 bp, Homo sapiens
  source 1..24: mol_type = unassigned DNA
tatttgcttctttagctgtatgtt

SEQ ID NO: 2076 - DNA, 24 bp, Homo sapiens
  source 1..24: mol_type = unassigned DNA
aacatacagctaaagaagcaaata

SEQ ID NO: 2077 - RNA, 86 nt, Homo sapiens
  source 1..86: mol_type = unassigned RNA
ctttgattagtctgagtacatcccaggcaggctccaaccccagactggaaagaaacctgcttccttttagagggtattggtattga

SEQ ID NO: 2078 - DNA, 86 bp, Homo sapiens
  source 1..86: mol_type = unassigned DNA
ctttgattagtctgagtacatcccaggcaggctccaaccccagactggaaagaaacctgcttccttttagagggtattggtattga

SEQ ID NO: 2079 - DNA, 86 bp, Homo sapiens
  source 1..86: mol_type = unassigned DNA
tcaataccaataccctctaaaaggaagcaggtttctttccagtctggggttggagcctgcctgggatgtactcagactaatcaaag

SEQ ID NO: 2080 - RNA, 33 nt, Homo sapiens
  source 1..33: mol_type = unassigned RNA
ctcttgaaggaagcactttgaaggagaggcctt

SEQ ID NO: 2081 - DNA, 33 bp, Homo sapiens
  source 1..33: mol_type = unassigned DNA
ctcttgaaggaagcactttgaaggagaggcctt

SEQ ID NO: 2082 - DNA, 33 bp, Homo sapiens
  source 1..33: mol_type = unassigned DNA
aaggcctctccttcaaagtgcttccttcaagag

SEQ ID NO: 2083 - RNA, 25 nt, Homo sapiens
  source 1..25: mol_type = unassigned RNA
ttctttgttaatctagctgtctatt

SEQ ID NO: 2084 - DNA, 25 bp, Homo sapiens
  source 1..25: mol_type = unassigned DNA
ttctttgttaatctagctgtctatt

SEQ ID NO: 2085 - DNA, 25 bp, Homo sapiens
  source 1..25: mol_type = unassigned DNA
aatagacagctagattaacaaagaa

SEQ ID NO: 2086 - RNA, 65 nt, Homo sapiens
  source 1..65: mol_type = unassigned RNA
ttctgtgtttatcacgctggatgctgcagactgtagctgttcctattcagccatctcggaacaga

SEQ ID NO: 2087 - DNA, 65 bp, Homo sapiens
  source 1..65: mol_type = unassigned DNA
ttctgtgtttatcacgctggatgctgcagactgtagctgttcctattcagccatctcggaacaga

SEQ ID NO: 2088 - DNA, 65 bp, Homo sapiens
  source 1..65: mol_type = unassigned DNA
tctgttccgagatggctgaataggaacagctacagtctgcagcatccagcgtgataaacacagaa

SEQ ID NO: 2089 - RNA, 61 nt, Homo sapiens
  source 1..61: mol_type = unassigned RNA
aaatgtatgtcattgactgtactgcagattttgaaagtctttgggtatttagaagtatgcc

SEQ ID NO: 2090 - DNA, 61 bp, Homo sapiens
  source 1..61: mol_type = unassigned DNA
aaatgtatgtcattgactgtactgcagattttgaaagtctttgggtatttagaagtatgcc

SEQ ID NO: 2091 - DNA, 61 bp, Homo sapiens
  source 1..61: mol_type = unassigned DNA
ggcatacttctaaatacccaaagactttcaaaatctgcagtacagtcaatgacatacattt

SEQ ID NO: 2092 - RNA, 24 nt, Homo sapiens
  source 1..24: mol_type = unassigned RNA
tatttgtttcactagatgtatgga

SEQ ID NO: 2093 - DNA, 24 bp, Homo sapiens
  source 1..24: mol_type = unassigned DNA
tatttgtttcactagatgtatgga

SEQ ID NO: 2094 - DNA, 24 bp, Homo sapiens
  source 1..24: mol_type = unassigned DNA
tccatacatctagtgaaacaaata

SEQ ID NO: 2095 - RNA, 26 nt, Homo sapiens
  source 1..26: mol_type = unassigned RNA
agatttggttctctatttgtatgaag

SEQ ID NO: 2096 - DNA, 26 bp, Homo sapiens
  source 1..26: mol_type = unassigned DNA
agatttggttctctatttgtatgaag

SEQ ID NO: 2097 - DNA, 26 bp, Homo sapiens
  source 1..26: mol_type = unassigned DNA
cttcatacaaatagagaaccaaatct

SEQ ID NO: 2098 - RNA, 24 nt, Homo sapiens
  source 1..24: mol_type = unassigned RNA
tctctaggggaagtgcttaaaata

SEQ ID NO: 2099 - DNA, 24 bp, Homo sapiens
  source 1..24: mol_type = unassigned DNA
tctctaggggaagtgcttaaaata

SEQ ID NO: 2100 - DNA, 24 bp, Homo sapiens
  source 1..24: mol_type = unassigned DNA
tattttaagcacttcccctagaga

SEQ ID NO: 2101 - RNA, 29 nt, Homo sapiens
  source 1..29: mol_type = unassigned RNA
aagagaggaacagtcggaacgcggtggcg

SEQ ID NO: 2102 - DNA, 29 bp, Homo sapiens
  source 1..29: mol_type = unassigned DNA
aagagaggaacagtcggaacgcggtggcg

SEQ ID NO: 2103 - DNA, 29 bp, Homo sapiens
  source 1..29: mol_type = unassigned DNA
cgccaccgcgttccgactgttcctctctt

SEQ ID NO: 2104 - RNA, 25 nt, Homo sapiens
  source 1..25: mol_type = unassigned RNA
gctctagaaggaagcctttcaaaaa

SEQ ID NO: 2105 - DNA, 25 bp, Homo sapiens
  source 1..25: mol_type = unassigned DNA
gctctagaaggaagcctttcaaaaa

SEQ ID NO: 2106 - DNA, 25 bp, Homo sapiens
  source 1..25: mol_type = unassigned DNA
tttttgaaaggcttccttctagagc

SEQ ID NO: 2107 - RNA, 31 nt, Homo sapiens
  source 1..31: mol_type = unassigned RNA
tgtgcacaaccccaactgtgggggcataacc

SEQ ID NO: 2108 - DNA, 31 bp, Homo sapiens
  source 1..31: mol_type = unassigned DNA
tgtgcacaaccccaactgtgggggcataacc

SEQ ID NO: 2109 - DNA, 31 bp, Homo sapiens
  source 1..31: mol_type = unassigned DNA
ggttatgcccccacagttggggttgtgcaca

SEQ ID NO: 2110 - RNA, 45 nt, Homo sapiens
  source 1..45: mol_type = unassigned RNA
atctttgcttctctatatgtatggtatctttccctctggcttttt

SEQ ID NO: 2111 - DNA, 45 bp, Homo sapiens
  source 1..45: mol_type = unassigned DNA
atctttgcttctctatatgtatggtatctttccctctggcttttt

SEQ ID NO: 2112 - DNA, 45 bp, Homo sapiens
  source 1..45: mol_type = unassigned DNA
aaaaagccagagggaaagataccatacatatagagaagcaaagat

SEQ ID NO: 2113 - RNA, 45 nt, Homo sapiens
  source 1..45: mol_type = unassigned RNA
ccaactggctccttctctttggctctctagcagaatgaagacaac

SEQ ID NO: 2114 - DNA, 45 bp, Homo sapiens
  source 1..45: mol_type = unassigned DNA
ccaactggctccttctctttggctctctagcagaatgaagacaac

SEQ ID NO: 2115 - DNA, 45 bp, Homo sapiens
  source 1..45: mol_type = unassigned DNA
gttgtcttcattctgctagagagccaaagagaaggagccagttgg

SEQ ID NO: 2116 - RNA, 24 nt, Homo sapiens
  source 1..24: mol_type = unassigned RNA
ctacagagggaagtacttttagag

SEQ ID NO: 2117 - DNA, 24 bp, Homo sapiens
  source 1..24: mol_type = unassigned DNA
ctacagagggaagtacttttagag

SEQ ID NO: 2118 - DNA, 24 bp, Homo sapiens
  source 1..24: mol_type = unassigned DNA
ctctaaaagtacttccctctgtag

SEQ ID NO: 2119 - RNA, 35 nt, Homo sapiens
  source 1..35: mol_type = unassigned RNA
cttgcaagagctcctgagggaagcactataaatat

SEQ ID NO: 2120 - DNA, 35 bp, Homo sapiens
  source 1..35: mol_type = unassigned DNA
cttgcaagagctcctgagggaagcactataaatat

SEQ ID NO: 2121 - DNA, 35 bp, Homo sapiens
  source 1..35: mol_type = unassigned DNA
atatttatagtgcttccctcaggagctcttgcaag

SEQ ID NO: 2122 - RNA, 26 nt, Homo sapiens
  source 1..26: mol_type = unassigned RNA
tgatttggttctctagttgtctgata

SEQ ID NO: 2123 - DNA, 26 bp, Homo sapiens
  source 1..26: mol_type = unassigned DNA
tgatttggttctctagttgtctgata

SEQ ID NO: 2124 - DNA, 26 bp, Homo sapiens
  source 1..26: mol_type = unassigned DNA
tatcagacaactagagaaccaaatca

SEQ ID NO: 2125 - RNA, 30 nt, Homo sapiens
  source 1..30: mol_type = unassigned RNA
ctcagaaattgttgaccagctggaggtgga

SEQ ID NO: 2126 - DNA, 30 bp, Homo sapiens
  source 1..30: mol_type = unassigned DNA
ctcagaaattgttgaccagctggaggtgga

SEQ ID NO: 2127 - DNA, 30 bp, Homo sapiens
  source 1..30: mol_type = unassigned DNA
tccacctccagctggtcaacaatttctgag

SEQ ID NO: 2128 - RNA, 47 nt, Homo sapiens
  source 1..47: mol_type = unassigned RNA
gatagtatcagccctgatgttgaataatgatctctgctattattaag

SEQ ID NO: 2129 - DNA, 47 bp, Homo sapiens
  source 1..47: mol_type = unassigned DNA
gatagtatcagccctgatgttgaataatgatctctgctattattaag

SEQ ID NO: 2130 - DNA, 47 bp, Homo sapiens
  source 1..47: mol_type = unassigned DNA
cttaataatagcagagatcattattcaacatcagggctgatactatc

SEQ ID NO: 2131 - RNA, 37 nt, Homo sapiens
  source 1..37: mol_type = unassigned RNA
gatctttgtgtatcaggctgtatgagatcagggaaag

SEQ ID NO: 2132 - DNA, 37 bp, Homo sapiens
  source 1..37: mol_type = unassigned DNA
gatctttgtgtatcaggctgtatgagatcagggaaag

SEQ ID NO: 2133 - DNA, 37 bp, Homo sapiens
  source 1..37: mol_type = unassigned DNA
ctttccctgatctcatacagcctgatacacaaagatc

SEQ ID NO: 2134 - RNA, 82 nt, Homo sapiens
  source 1..82: mol_type = unassigned RNA
cttcctgctctgtctcctgctctttttttctctagctctatggtagtttactagggctgctggaatgaagtaccgtaagctt

SEQ ID NO: 2135 - DNA, 82 bp, Homo sapiens
  source 1..82: mol_type = unassigned DNA
cttcctgctctgtctcctgctctttttttctctagctctatggtagtttactagggctgctggaatgaagtaccgtaagctt

SEQ ID NO: 2136 - DNA, 82 bp, Homo sapiens
  source 1..82: mol_type = unassigned DNA
aagcttacggtacttcattccagcagccctagtaaactaccatagagctagagaaaaaaagagcaggagacagagcaggaag

SEQ ID NO: 2137 - RNA, 24 nt, Homo sapiens
  source 1..24: mol_type = unassigned RNA
acagtgagaggactagccttagag

SEQ ID NO: 2138 - DNA, 24 bp, Homo sapiens
  source 1..24: mol_type = unassigned DNA
acagtgagaggactagccttagag

SEQ ID NO: 2139 - DNA, 24 bp, Homo sapiens
  source 1..24: mol_type = unassigned DNA
ctctaaggctagtcctctcactgt

SEQ ID NO: 2140 - RNA, 26 nt, Homo sapiens
  source 1..26: mol_type = unassigned RNA
ggggtggggatatgggacagagaata

SEQ ID NO: 2141 - DNA, 26 bp, Homo sapiens
  source 1..26: mol_type = unassigned DNA
ggggtggggatatgggacagagaata

SEQ ID NO: 2142 - DNA, 26 bp, Homo sapiens
  source 1..26: mol_type = unassigned DNA
tattctctgtcccatatccccacccc

SEQ ID NO: 2143 - RNA, 105 nt, Homo sapiens
  source 1..105: mol_type = unassigned RNA
gtacaaagtgcttctctttagagaaatgtactcccaaggctctgccaaggaaagactgctggagcagagcgctgtcagttatcatggaactttgttgaaggaaac

SEQ ID NO: 2144 - DNA, 105 bp, Homo sapiens
  source 1..105: mol_type = unassigned DNA
gtacaaagtgcttctctttagagaaatgtactcccaaggctctgccaaggaaagactgctggagcagagcgctgtcagttatcatggaactttgttgaaggaaac

SEQ ID NO: 2145 - DNA, 105 bp, Homo sapiens
  source 1..105: mol_type = unassigned DNA
gtttccttcaacaaagttccatgataactgacagcgctctgctccagcagtctttccttggcagagccttgggagtacatttctctaaagagaagcactttgtac

SEQ ID NO: 2146 - RNA, 49 nt, Homo sapiens
  source 1..49: mol_type = unassigned RNA
ctccttcacaaagccttccctagcatctccagagggaagtgcttaggga

SEQ ID NO: 2147 - DNA, 49 bp, Homo sapiens
  source 1..49: mol_type = unassigned DNA
ctccttcacaaagccttccctagcatctccagagggaagtgcttaggga

SEQ ID NO: 2148 - DNA, 49 bp, Homo sapiens
  source 1..49: mol_type = unassigned DNA
tccctaagcacttccctctggagatgctagggaaggctttgtgaaggag

SEQ ID NO: 2149 - RNA, 30 nt, Homo sapiens
  source 1..30: mol_type = unassigned RNA
aagtgttatcatagctgaggaatagaaaat

SEQ ID NO: 2150 - DNA, 30 bp, Homo sapiens
  source 1..30: mol_type = unassigned DNA
aagtgttatcatagctgaggaatagaaaat

SEQ ID NO: 2151 - DNA, 30 bp, Homo sapiens
  source 1..30: mol_type = unassigned DNA
attttctattcctcagctatgataacactt

SEQ ID NO: 2152 - RNA, 25 nt, Homo sapiens
  source 1..25: mol_type = unassigned RNA
tcggtaatatcagaatgattttgaa

SEQ ID NO: 2153 - DNA, 25 bp, Homo sapiens
  source 1..25: mol_type = unassigned DNA
tcggtaatatcagaatgattttgaa

SEQ ID NO: 2154 - DNA, 25 bp, Homo sapiens
  source 1..25: mol_type = unassigned DNA
ttcaaaatcattctgatattaccga

SEQ ID NO: 2155 - RNA, 23 nt, Homo sapiens
  source 1..23: mol_type = unassigned RNA
ctccagtgggaagaactttaaat

SEQ ID NO: 2156 - DNA, 23 bp, Homo sapiens
  source 1..23: mol_type = unassigned DNA
ctccagtgggaagaactttaaat

SEQ ID NO: 2157 - DNA, 23 bp, Homo sapiens
  source 1..23: mol_type = unassigned DNA
atttaaagttcttcccactggag

SEQ ID NO: 2158 - RNA, 28 nt, Homo sapiens
  source 1..28: mol_type = unassigned RNA
gctagtatcagactgaatgtggaaaacc

SEQ ID NO: 2159 - DNA, 28 bp, Homo sapiens
  source 1..28: mol_type = unassigned DNA
gctagtatcagactgaatgtggaaaacc

SEQ ID NO: 2160 - DNA, 28 bp, Homo sapiens
  source 1..28: mol_type = unassigned DNA
ggttttccacattcagtctgatactagc

SEQ ID NO: 2161 - RNA, 93 nt, Homo sapiens
  source 1..93: mol_type = unassigned RNA
ctgttcattactgagtggtatctcactgtatgaatttgccacaatgtgtttatcaatgtattgttgggcattggttatttccagtttttggct

SEQ ID NO: 2162 - DNA, 93 bp, Homo sapiens
  source 1..93: mol_type = unassigned DNA
ctgttcattactgagtggtatctcactgtatgaatttgccacaatgtgtttatcaatgtattgttgggcattggttatttccagtttttggct

SEQ ID NO: 2163 - DNA, 93 bp, Homo sapiens
  source 1..93: mol_type = unassigned DNA
agccaaaaactggaaataaccaatgcccaacaatacattgataaacacattgtggcaaattcatacagtgagataccactcagtaatgaacag

SEQ ID NO: 2164 - RNA, 24 nt, Homo sapiens
  source 1..24: mol_type = unassigned RNA
gtgagagagggaagagctttcttt

SEQ ID NO: 2165 - DNA, 24 bp, Homo sapiens
  source 1..24: mol_type = unassigned DNA
gtgagagagggaagagctttcttt

SEQ ID NO: 2166 - DNA, 24 bp, Homo sapiens
  source 1..24: mol_type = unassigned DNA
aaagaaagctcttccctctctcac

SEQ ID NO: 2167 - RNA, 23 nt, Homo sapiens
  source 1..23: mol_type = unassigned RNA
gcttctgttgcccaatggattgc

SEQ ID NO: 2168 - DNA, 23 bp, Homo sapiens
  source 1..23: mol_type = unassigned DNA
gcttctgttgcccaatggattgc

SEQ ID NO: 2169 - DNA, 23 bp, Homo sapiens
  source 1..23: mol_type = unassigned DNA
gcaatccattgggcaacagaagc

SEQ ID NO: 2170 - RNA, 38 nt, Homo sapiens
  source 1..38: mol_type = unassigned RNA
ttctctgcttttcctccagagggatacactttattaaa

SEQ ID NO: 2171 - DNA, 38 bp, Homo sapiens
  source 1..38: mol_type = unassigned DNA
ttctctgcttttcctccagagggatacactttattaaa

SEQ ID NO: 2172 - DNA, 38 bp, Homo sapiens
  source 1..38: mol_type = unassigned DNA
tttaataaagtgtatccctctggaggaaaagcagagaa

SEQ ID NO: 2173 - RNA, 35 nt, Homo sapiens
  source 1..35: mol_type = unassigned RNA
ttcctcctgagagaatctgaccgtggagatctcca

SEQ ID NO: 2174 - DNA, 35 bp, Homo sapiens
  source 1..35: mol_type = unassigned DNA
ttcctcctgagagaatctgaccgtggagatctcca

SEQ ID NO: 2175 - DNA, 35 bp, Homo sapiens
  source 1..35: mol_type = unassigned DNA
tggagatctccacggtcagattctctcaggaggaa

SEQ ID NO: 2176 - RNA, 32 nt, Homo sapiens
  source 1..32: mol_type = unassigned RNA
tcaggagattgggagtctgaacttggaagcca

SEQ ID NO: 2177 - DNA, 32 bp, Homo sapiens
  source 1..32: mol_type = unassigned DNA
tcaggagattgggagtctgaacttggaagcca

SEQ ID NO: 2178 - DNA, 32 bp, Homo sapiens
  source 1..32: mol_type = unassigned DNA
tggcttccaagttcagactcccaatctcctga

SEQ ID NO: 2179 - RNA, 45 nt, Homo sapiens
  source 1..45: mol_type = unassigned RNA
ccccaaaaggacatttggcaattatctgatgatgttgactgtcac

SEQ ID NO: 2180 - DNA, 45 bp, Homo sapiens
  source 1..45: mol_type = unassigned DNA
ccccaaaaggacatttggcaattatctgatgatgttgactgtcac

SEQ ID NO: 2181 - DNA, 45 bp, Homo sapiens
  source 1..45: mol_type = unassigned DNA
gtgacagtcaacatcatcagataattgccaaatgtccttttgggg

SEQ ID NO: 2182 - RNA, 33 nt, Homo sapiens
  source 1..33: mol_type = unassigned RNA
taactcacacggtattgactggagtactccaaa

SEQ ID NO: 2183 - DNA, 33 bp, Homo sapiens
  source 1..33: mol_type = unassigned DNA
taactcacacggtattgactggagtactccaaa

SEQ ID NO: 2184 - DNA, 33 bp, Homo sapiens
  source 1..33: mol_type = unassigned DNA
tttggagtactccagtcaataccgtgtgagtta

SEQ ID NO: 2185 - RNA, 43 nt, Homo sapiens
  source 1..43: mol_type = unassigned RNA
gatccacatggcctctcttgctctcactggtagaatacagtgc

SEQ ID NO: 2186 - DNA, 43 bp, Homo sapiens
  source 1..43: mol_type = unassigned DNA
gatccacatggcctctcttgctctcactggtagaatacagtgc

SEQ ID NO: 2187 - DNA, 43 bp, Homo sapiens
  source 1..43: mol_type = unassigned DNA
gcactgtattctaccagtgagagcaagagaggccatgtggatc

SEQ ID NO: 2188 - RNA, 48 nt, Homo sapiens
  source 1..48: mol_type = unassigned RNA
tctcccctggtctcatcaaccctatttcgctttccctgcctgtgggcc

SEQ ID NO: 2189 - DNA, 48 bp, Homo sapiens
  source 1..48: mol_type = unassigned DNA
tctcccctggtctcatcaaccctatttcgctttccctgcctgtgggcc

SEQ ID NO: 2190 - DNA, 48 bp, Homo sapiens
  source 1..48: mol_type = unassigned DNA
ggcccacaggcagggaaagcgaaatagggttgatgagaccaggggaga

SEQ ID NO: 2191 - RNA, 29 nt, Homo sapiens
  source 1..29: mol_type = unassigned RNA
aaaaatgcttcgattttggggaaaaaaaa

SEQ ID NO: 2192 - DNA, 29 bp, Homo sapiens
  source 1..29: mol_type = unassigned DNA
aaaaatgcttcgattttggggaaaaaaaa

SEQ ID NO: 2193 - DNA, 29 bp, Homo sapiens
  source 1..29: mol_type = unassigned DNA
ttttttttccccaaaatcgaagcattttt

SEQ ID NO: 2194 - RNA, 37 nt, Homo sapiens
  source 1..37: mol_type = unassigned RNA
ctgagtctttgtttccatatctgtatgatgcccctgc

SEQ ID NO: 2195 - DNA, 37 bp, Homo sapiens
  source 1..37: mol_type = unassigned DNA
ctgagtctttgtttccatatctgtatgatgcccctgc

SEQ ID NO: 2196 - DNA, 37 bp, Homo sapiens
  source 1..37: mol_type = unassigned DNA
gcaggggcatcatacagatatggaaacaaagactcag

SEQ ID NO: 2197 - RNA, 40 nt, Homo sapiens
  source 1..40: mol_type = unassigned RNA
catattgtcactcatttagtttatctgcactgatgatgat

SEQ ID NO: 2198 - DNA, 40 bp, Homo sapiens
  source 1..40: mol_type = unassigned DNA
catattgtcactcatttagtttatctgcactgatgatgat

SEQ ID NO: 2199 - DNA, 40 bp, Homo sapiens
  source 1..40: mol_type = unassigned DNA
atcatcatcagtgcagataaactaaatgagtgacaatatg

SEQ ID NO: 2200 - RNA, 87 nt, Homo sapiens
  source 1..87: mol_type = unassigned RNA
gagacttagttctagtcctagtactggtattaaccagctctgagactagagcaaagcccttaatatttctaagcctcttttttgctc

SEQ ID NO: 2201 - DNA, 87 bp, Homo sapiens
  source 1..87: mol_type = unassigned DNA
gagacttagttctagtcctagtactggtattaaccagctctgagactagagcaaagcccttaatatttctaagcctcttttttgctc

SEQ ID NO: 2202 - DNA, 87 bp, Homo sapiens
  source 1..87: mol_type = unassigned DNA
gagcaaaaaagaggcttagaaatattaagggctttgctctagtctcagagctggttaataccagtactaggactagaactaagtctc

SEQ ID NO: 2203 - RNA, 57 nt, Homo sapiens
  source 1..57: mol_type = unassigned RNA
ccatttgcagatcaggaaaccgaggtccagagactggagctgacttgtgcaactggc

SEQ ID NO: 2204 - DNA, 57 bp, Homo sapiens
  source 1..57: mol_type = unassigned DNA
ccatttgcagatcaggaaaccgaggtccagagactggagctgacttgtgcaactggc

SEQ ID NO: 2205 - DNA, 57 bp, Homo sapiens
  source 1..57: mol_type = unassigned DNA
gccagttgcacaagtcagctccagtctctggacctcggtttcctgatctgcaaatgg

SEQ ID NO: 2206 - RNA, 25 nt, Homo sapiens
  source 1..25: mol_type = unassigned RNA
ttctttgattatctaggagtatgag

SEQ ID NO: 2207 - DNA, 25 bp, Homo sapiens
  source 1..25: mol_type = unassigned DNA
ttctttgattatctaggagtatgag

SEQ ID NO: 2208 - DNA, 25 bp, Homo sapiens
  source 1..25: mol_type = unassigned DNA
ctcatactcctagataatcaaagaa

SEQ ID NO: 2209 - RNA, 23 nt, Homo sapiens
  source 1..23: mol_type = unassigned RNA
tctctagagggagtgcttaaagt

SEQ ID NO: 2210 - DNA, 23 bp, Homo sapiens
  source 1..23: mol_type = unassigned DNA
tctctagagggagtgcttaaagt

SEQ ID NO: 2211 - DNA, 23 bp, Homo sapiens
  source 1..23: mol_type = unassigned DNA
actttaagcactccctctagaga

SEQ ID NO: 2212 - RNA, 31 nt, Homo sapiens
  source 1..31: mol_type = unassigned RNA
ccctatgtggtcgctccagacttgggaaact

SEQ ID NO: 2213 - DNA, 31 bp, Homo sapiens
  source 1..31: mol_type = unassigned DNA
ccctatgtggtcgctccagacttgggaaact

SEQ ID NO: 2214 - DNA, 31 bp, Homo sapiens
  source 1..31: mol_type = unassigned DNA
agtttcccaagtctggagcgaccacataggg

SEQ ID NO: 2215 - RNA, 30 nt, Homo sapiens
  source 1..30: mol_type = unassigned RNA
atatcttattatacttattttgaagtttgt

SEQ ID NO: 2216 - DNA, 30 bp, Homo sapiens
  source 1..30: mol_type = unassigned DNA
atatcttattatacttattttgaagtttgt

SEQ ID NO: 2217 - DNA, 30 bp, Homo sapiens
  source 1..30: mol_type = unassigned DNA
acaaacttcaaaataagtataataagatat

SEQ ID NO: 2218 - RNA, 26 nt, Homo sapiens
  source 1..26: mol_type = unassigned RNA
caaatttatcaaaactgatgttgact

SEQ ID NO: 2219 - DNA, 26 bp, Homo sapiens
  source 1..26: mol_type = unassigned DNA
caaatttatcaaaactgatgttgact

SEQ ID NO: 2220 - DNA, 26 bp, Homo sapiens
  source 1..26: mol_type = unassigned DNA
agtcaacatcagttttgataaatttg

SEQ ID NO: 2221 - RNA, 32 nt, Homo sapiens
  source 1..32: mol_type = unassigned RNA
ctaaaagagctcttgagggaagcgctaaacat

SEQ ID NO: 2222 - DNA, 32 bp, Homo sapiens
  source 1..32: mol_type = unassigned DNA
ctaaaagagctcttgagggaagcgctaaacat

SEQ ID NO: 2223 - DNA, 32 bp, Homo sapiens
  source 1..32: mol_type = unassigned DNA
atgtttagcgcttccctcaagagctcttttag

SEQ ID NO: 2224 - RNA, 24 nt, Homo sapiens
  source 1..24: mol_type = unassigned RNA
tagtgctgtcaagctgaggaaaat

SEQ ID NO: 2225 - DNA, 24 bp, Homo sapiens
  source 1..24: mol_type = unassigned DNA
tagtgctgtcaagctgaggaaaat

SEQ ID NO: 2226 - DNA, 24 bp, Homo sapiens
  source 1..24: mol_type = unassigned DNA
attttcctcagcttgacagcacta

SEQ ID NO: 2227 - RNA, 60 nt, Homo sapiens
  source 1..60: mol_type = unassigned RNA
tcaccagatggatgcactttaaagtagctgattaacagtggtattgatctaagccacaga

SEQ ID NO: 2228 - DNA, 60 bp, Homo sapiens
  source 1..60: mol_type = unassigned DNA
tcaccagatggatgcactttaaagtagctgattaacagtggtattgatctaagccacaga

SEQ ID NO: 2229 - DNA, 60 bp, Homo sapiens
  source 1..60: mol_type = unassigned DNA
tctgtggcttagatcaataccactgttaatcagctactttaaagtgcatccatctggtga

SEQ ID NO: 2230 - RNA, 29 nt, Homo sapiens
  source 1..29: mol_type = unassigned RNA
tgttgcacaggtagatctcaaactcctgg

SEQ ID NO: 2231 - DNA, 29 bp, Homo sapiens
  source 1..29: mol_type = unassigned DNA
tgttgcacaggtagatctcaaactcctgg

SEQ ID NO: 2232 - DNA, 29 bp, Homo sapiens
  source 1..29: mol_type = unassigned DNA
ccaggagtttgagatctacctgtgcaaca

SEQ ID NO: 2233 - RNA, 30 nt, Homo sapiens
  source 1..30: mol_type = unassigned RNA
ttctatgtttaccttgctgtatgtctaaaa

SEQ ID NO: 2234 - DNA, 30 bp, Homo sapiens
  source 1..30: mol_type = unassigned DNA
ttctatgtttaccttgctgtatgtctaaaa

SEQ ID NO: 2235 - DNA, 30 bp, Homo sapiens
  source 1..30: mol_type = unassigned DNA
ttttagacatacagcaaggtaaacatagaa

SEQ ID NO: 2236 - RNA, 43 nt, Homo sapiens
  source 1..43: mol_type = unassigned RNA
agaggatcgcttgagcccaggaactggaggctgcagtgagttg

SEQ ID NO: 2237 - DNA, 43 bp, Homo sapiens
  source 1..43: mol_type = unassigned DNA
agaggatcgcttgagcccaggaactggaggctgcagtgagttg

SEQ ID NO: 2238 - DNA, 43 bp, Homo sapiens
  source 1..43: mol_type = unassigned DNA
caactcactgcagcctccagttcctgggctcaagcgatcctct

SEQ ID NO: 2239 - RNA, 101 nt, Homo sapiens
  source 1..101: mol_type = unassigned RNA
aaaaattggccaggcatggtggtgcatgcctgtggtcccagctgttcaagaggctgaggcacggggaatcccttgagcccaggaactggaggctgcagtga

SEQ ID NO: 2240 - DNA, 101 bp, Homo sapiens
  source 1..101: mol_type = unassigned DNA
aaaaattggccaggcatggtggtgcatgcctgtggtcccagctgttcaagaggctgaggcacggggaatcccttgagcccaggaactggaggctgcagtga

SEQ ID NO: 2241 - DNA, 101 bp, Homo sapiens
  source 1..101: mol_type = unassigned DNA
tcactgcagcctccagttcctgggctcaagggattccccgtgcctcagcctcttgaacagctgggaccacaggcatgcaccaccatgcctggccaattttt

SEQ ID NO: 2242 - RNA, 37 nt, Homo sapiens
  source 1..37: mol_type = unassigned RNA
gtggtctaagcaggccgagcctatgcatgagagccca

SEQ ID NO: 2243 - DNA, 37 bp, Homo sapiens
  source 1..37: mol_type = unassigned DNA
gtggtctaagcaggccgagcctatgcatgagagccca

SEQ ID NO: 2244 - DNA, 37 bp, Homo sapiens
  source 1..37: mol_type = unassigned DNA
tgggctctcatgcataggctcggcctgcttagaccac

SEQ ID NO: 2245 - RNA, 40 nt, Homo sapiens
  source 1..40: mol_type = unassigned RNA
gtcctggctgtgctgagccatgctaatgggacagggacac

SEQ ID NO: 2246 - DNA, 40 bp, Homo sapiens
  source 1..40: mol_type = unassigned DNA
gtcctggctgtgctgagccatgctaatgggacagggacac

SEQ ID NO: 2247 - DNA, 40 bp, Homo sapiens
  source 1..40: mol_type = unassigned DNA
gtgtccctgtcccattagcatggctcagcacagccaggac

SEQ ID NO: 2248 - RNA, 24 nt, Homo sapiens
  source 1..24: mol_type = unassigned RNA
ctctacagggaaggactttaaaat

SEQ ID NO: 2249 - DNA, 24 bp, Homo sapiens
  source 1..24: mol_type = unassigned DNA
ctctacagggaaggactttaaaat

SEQ ID NO: 2250 - DNA, 24 bp, Homo sapiens
  source 1..24: mol_type = unassigned DNA
attttaaagtccttccctgtagag

SEQ ID NO: 2251 - RNA, 32 nt, Homo sapiens
  source 1..32: mol_type = unassigned RNA
atttcatgggactaaatgaactaatgaggata

SEQ ID NO: 2252 - DNA, 32 bp, Homo sapiens
  source 1..32: mol_type = unassigned DNA
atttcatgggactaaatgaactaatgaggata

SEQ ID NO: 2253 - DNA, 32 bp, Homo sapiens
  source 1..32: mol_type = unassigned DNA
tatcctcattagttcatttagtcccatgaaat

SEQ ID NO: 2254 - RNA, 53 nt, Homo sapiens
  source 1..53: mol_type = unassigned RNA
gaaatcttttgagggaagcactttgatagagatcactggagtggataaatcat

SEQ ID NO: 2255 - DNA, 53 bp, Homo sapiens
  source 1..53: mol_type = unassigned DNA
gaaatcttttgagggaagcactttgatagagatcactggagtggataaatcat

SEQ ID NO: 2256 - DNA, 53 bp, Homo sapiens
  source 1..53: mol_type = unassigned DNA
atgatttatccactccagtgatctctatcaaagtgcttccctcaaaagatttc

SEQ ID NO: 2257 - RNA, 29 nt, Homo sapiens
  source 1..29: mol_type = unassigned RNA
atttttttttatctaactgtatgtttgta

SEQ ID NO: 2258 - DNA, 29 bp, Homo sapiens
  source 1..29: mol_type = unassigned DNA
atttttttttatctaactgtatgtttgta

SEQ ID NO: 2259 - DNA, 29 bp, Homo sapiens
  source 1..29: mol_type = unassigned DNA
tacaaacatacagttagataaaaaaaaat

SEQ ID NO: 2260 - RNA, 26 nt, Homo sapiens
  source 1..26: mol_type = unassigned RNA
tccctatttatctagctgaatgaata

SEQ ID NO: 2261 - DNA, 26 bp, Homo sapiens
  source 1..26: mol_type = unassigned DNA
tccctatttatctagctgaatgaata

SEQ ID NO: 2262 - DNA, 26 bp, Homo sapiens
  source 1..26: mol_type = unassigned DNA
tattcattcagctagataaataggga

SEQ ID NO: 2263 - RNA, 52 nt, Homo sapiens
  source 1..52: mol_type = unassigned RNA
aaaagagctctagaaggaagcgctaaacatggaaaggaacaaccagtaccag

SEQ ID NO: 2264 - DNA, 52 bp, Homo sapiens
  source 1..52: mol_type = unassigned DNA
aaaagagctctagaaggaagcgctaaacatggaaaggaacaaccagtaccag

SEQ ID NO: 2265 - DNA, 52 bp, Homo sapiens
  source 1..52: mol_type = unassigned DNA
ctggtactggttgttcctttccatgtttagcgcttccttctagagctctttt

SEQ ID NO: 2266 - RNA, 26 nt, Homo sapiens
  source 1..26: mol_type = unassigned RNA
agaggagactgggagaattcactcaa

SEQ ID NO: 2267 - DNA, 26 bp, Homo sapiens
  source 1..26: mol_type = unassigned DNA
agaggagactgggagaattcactcaa

SEQ ID NO: 2268 - DNA, 26 bp, Homo sapiens
  source 1..26: mol_type = unassigned DNA
ttgagtgaattctcccagtctcctct

SEQ ID NO: 2269 - RNA, 83 nt, Homo sapiens
  source 1..83: mol_type = unassigned RNA
actttaattgtccacttaaaactttgtagctttgcagtactgctgtttcttttctggaatgctgttctcccttgtccttccct

SEQ ID NO: 2270 - DNA, 83 bp, Homo sapiens
  source 1..83: mol_type = unassigned DNA
actttaattgtccacttaaaactttgtagctttgcagtactgctgtttcttttctggaatgctgttctcccttgtccttccct

SEQ ID NO: 2271 - DNA, 83 bp, Homo sapiens
  source 1..83: mol_type = unassigned DNA
agggaaggacaagggagaacagcattccagaaaagaaacagcagtactgcaaagctacaaagttttaagtggacaattaaagt

SEQ ID NO: 2272 - RNA, 30 nt, Homo sapiens
  source 1..30: mol_type = unassigned RNA
gtgacagaccccagcgccgactgagcctct

SEQ ID NO: 2273 - DNA, 30 bp, Homo sapiens
  source 1..30: mol_type = unassigned DNA
gtgacagaccccagcgccgactgagcctct

SEQ ID NO: 2274 - DNA, 30 bp, Homo sapiens
  source 1..30: mol_type = unassigned DNA
agaggctcagtcggcgctggggtctgtcac

SEQ ID NO: 2275 - RNA, 26 nt, Homo sapiens
  source 1..26: mol_type = unassigned RNA
aagtgcttcatagatgaggaaagaaa

SEQ ID NO: 2276 - DNA, 26 bp, Homo sapiens
  source 1..26: mol_type = unassigned DNA
aagtgcttcatagatgaggaaagaaa

SEQ ID NO: 2277 - DNA, 26 bp, Homo sapiens
  source 1..26: mol_type = unassigned DNA
tttctttcctcatctatgaagcactt

SEQ ID NO: 2278 - RNA, 28 nt, Homo sapiens
  source 1..28: mol_type = unassigned RNA
tacctcagagattgtatagttcagccct

SEQ ID NO: 2279 - DNA, 28 bp, Homo sapiens
  source 1..28: mol_type = unassigned DNA
tacctcagagattgtatagttcagccct

SEQ ID NO: 2280 - DNA, 28 bp, Homo sapiens
  source 1..28: mol_type = unassigned DNA
agggctgaactatacaatctctgaggta

SEQ ID NO: 2281 - RNA, 41 nt, Homo sapiens
  source 1..41: mol_type = unassigned RNA
ctgccatgatgatcccttctgggctgagctgttcttattca

SEQ ID NO: 2282 - DNA, 41 bp, Homo sapiens
  source 1..41: mol_type = unassigned DNA
ctgccatgatgatcccttctgggctgagctgttcttattca

SEQ ID NO: 2283 - DNA, 41 bp, Homo sapiens
  source 1..41: mol_type = unassigned DNA
tgaataagaacagctcagcccagaagggatcatcatggcag

SEQ ID NO: 2284 - RNA, 24 nt, Homo sapiens
  source 1..24: mol_type = unassigned RNA
ctgtacttagcctgctcctgaaat

SEQ ID NO: 2285 - DNA, 24 bp, Homo sapiens
  source 1..24: mol_type = unassigned DNA
ctgtacttagcctgctcctgaaat

SEQ ID NO: 2286 - DNA, 24 bp, Homo sapiens
  source 1..24: mol_type = unassigned DNA
atttcaggagcaggctaagtacag

SEQ ID NO: 2287 - RNA, 38 nt, Homo sapiens
  source 1..38: mol_type = unassigned RNA
tttacattattttttgtttgttcatctagctgtctgtc

SEQ ID NO: 2288 - DNA, 38 bp, Homo sapiens
  source 1..38: mol_type = unassigned DNA
tttacattattttttgtttgttcatctagctgtctgtc

SEQ ID NO: 2289 - DNA, 38 bp, Homo sapiens
  source 1..38: mol_type = unassigned DNA
gacagacagctagatgaacaaacaaaaaataatgtaaa

SEQ ID NO: 2290 - RNA, 35 nt, Homo sapiens
  source 1..35: mol_type = unassigned RNA
tctctagaggcaagcactaaaaagtctgacataaa

SEQ ID NO: 2291 - DNA, 35 bp, Homo sapiens
  source 1..35: mol_type = unassigned DNA
tctctagaggcaagcactaaaaagtctgacataaa

SEQ ID NO: 2292 - DNA, 35 bp, Homo sapiens
  source 1..35: mol_type = unassigned DNA
tttatgtcagactttttagtgcttgcctctagaga

SEQ ID NO: 2293 - RNA, 25 nt, Homo sapiens
  source 1..25: mol_type = unassigned RNA
ctctccagagggaaatactttatca

SEQ ID NO: 2294 - DNA, 25 bp, Homo sapiens
  source 1..25: mol_type = unassigned DNA
ctctccagagggaaatactttatca

SEQ ID NO: 2295 - DNA, 25 bp, Homo sapiens
  source 1..25: mol_type = unassigned DNA
tgataaagtatttccctctggagag

SEQ ID NO: 2296 - RNA, 30 nt, Homo sapiens
  source 1..30: mol_type = unassigned RNA
ggtgacagaccccagcgccgactgagcctc

SEQ ID NO: 2297 - DNA, 30 bp, Homo sapiens
  source 1..30: mol_type = unassigned DNA
ggtgacagaccccagcgccgactgagcctc

SEQ ID NO: 2298 - DNA, 30 bp, Homo sapiens
  source 1..30: mol_type = unassigned DNA
gaggctcagtcggcgctggggtctgtcacc

SEQ ID NO: 2299 - RNA, 44 nt, Homo sapiens
  source 1..44: mol_type = unassigned RNA
ctgtccatgatgagattgcctgagatggtgcacatttggttact

SEQ ID NO: 2300 - DNA, 44 bp, Homo sapiens
  source 1..44: mol_type = unassigned DNA
ctgtccatgatgagattgcctgagatggtgcacatttggttact

SEQ ID NO: 2301 - DNA, 44 bp, Homo sapiens
  source 1..44: mol_type = unassigned DNA
agtaaccaaatgtgcaccatctcaggcaatctcatcatggacag

SEQ ID NO: 2302 - RNA, 23 nt, Homo sapiens
  source 1..23: mol_type = unassigned RNA
tatttctcttttcctggcctttg

SEQ ID NO: 2303 - DNA, 23 bp, Homo sapiens
  source 1..23: mol_type = unassigned DNA
tatttctcttttcctggcctttg

SEQ ID NO: 2304 - DNA, 23 bp, Homo sapiens
  source 1..23: mol_type = unassigned DNA
caaaggccaggaaaagagaaata

SEQ ID NO: 2305 - RNA, 31 nt, Homo sapiens
  source 1..31: mol_type = unassigned RNA
ggaataaattatacttggtgtgttgtataat

SEQ ID NO: 2306 - DNA, 31 bp, Homo sapiens
  source 1..31: mol_type = unassigned DNA
ggaataaattatacttggtgtgttgtataat

SEQ ID NO: 2307 - DNA, 31 bp, Homo sapiens
  source 1..31: mol_type = unassigned DNA
attatacaacacaccaagtataatttattcc

SEQ ID NO: 2308 - RNA, 30 nt, Homo sapiens
  source 1..30: mol_type = unassigned RNA
tctctgcaagatagaactcacagtcttaaa

SEQ ID NO: 2309 - DNA, 30 bp, Homo sapiens
  source 1..30: mol_type = unassigned DNA
tctctgcaagatagaactcacagtcttaaa

SEQ ID NO: 2310 - DNA, 30 bp, Homo sapiens
  source 1..30: mol_type = unassigned DNA
tttaagactgtgagttctatcttgcagaga

SEQ ID NO: 2311 - RNA, 92 nt, Homo sapiens
  source 1..92: mol_type = unassigned RNA
atgtactggagacctcaggacttgaagaatgatatgggagtgagatcccagggttttctttttatctgccctatatcccagactgtgggcta

SEQ ID NO: 2312 - DNA, 92 bp, Homo sapiens
  source 1..92: mol_type = unassigned DNA
atgtactggagacctcaggacttgaagaatgatatgggagtgagatcccagggttttctttttatctgccctatatcccagactgtgggcta

SEQ ID NO: 2313 - DNA, 92 bp, Homo sapiens
  source 1..92: mol_type = unassigned DNA
tagcccacagtctgggatatagggcagataaaaagaaaaccctgggatctcactcccatatcattcttcaagtcctgaggtctccagtacat

SEQ ID NO: 2314 - RNA, 54 nt, Homo sapiens
  source 1..54: mol_type = unassigned RNA
ttgctaatgttgtcctgaattttggctctttcttgtttatttaggtgtatgaat

SEQ ID NO: 2315 - DNA, 54 bp, Homo sapiens
  source 1..54: mol_type = unassigned DNA
ttgctaatgttgtcctgaattttggctctttcttgtttatttaggtgtatgaat

SEQ ID NO: 2316 - DNA, 54 bp, Homo sapiens
  source 1..54: mol_type = unassigned DNA
attcatacacctaaataaacaagaaagagccaaaattcaggacaacattagcaa

SEQ ID NO: 2317 - RNA, 19 nt, Homo sapiens
  source 1..19: mol_type = unassigned RNA
atagatatgggagtgagag

SEQ ID NO: 2318 - DNA, 19 bp, Homo sapiens
  source 1..19: mol_type = unassigned DNA
atagatatgggagtgagag

SEQ ID NO: 2319 - DNA, 19 bp, Homo sapiens
  source 1..19: mol_type = unassigned DNA
ctctcactcccatatctat

SEQ ID NO: 2320 - RNA, 26 nt, Homo sapiens
  source 1..26: mol_type = unassigned RNA
aagcccaggtgatatgggagtgagaa

SEQ ID NO: 2321 - DNA, 26 bp, Homo sapiens
  source 1..26: mol_type = unassigned DNA
aagcccaggtgatatgggagtgagaa

SEQ ID NO: 2322 - DNA, 26 bp, Homo sapiens
  source 1..26: mol_type = unassigned DNA
ttctcactcccatatcacctgggctt

SEQ ID NO: 2323 - RNA, 26 nt, Homo sapiens
  source 1..26: mol_type = unassigned RNA
aacacaggctcagactcctgtggcag

SEQ ID NO: 2324 - DNA, 26 bp, Homo sapiens
  source 1..26: mol_type = unassigned DNA
aacacaggctcagactcctgtggcag

SEQ ID NO: 2325 - DNA, 26 bp, Homo sapiens
  source 1..26: mol_type = unassigned DNA
ctgccacaggagtctgagcctgtgtt

SEQ ID NO: 2326 - RNA, 42 nt, Homo sapiens
  source 1..42: mol_type = unassigned RNA
tgtgtgtgtgtgtgtgtgtgtgtatctagtgtatgactataa

SEQ ID NO: 2327 - DNA, 42 bp, Homo sapiens
  source 1..42: mol_type = unassigned DNA
tgtgtgtgtgtgtgtgtgtgtgtatctagtgtatgactataa

SEQ ID NO: 2328 - DNA, 42 bp, Homo sapiens
  source 1..42: mol_type = unassigned DNA
ttatagtcatacactagatacacacacacacacacacacaca

SEQ ID NO: 2329 - RNA, 24 nt, Homo sapiens
  source 1..24: mol_type = unassigned RNA
ttatacaatggtaaaaccacactt

SEQ ID NO: 2330 - DNA, 24 bp, Homo sapiens
  source 1..24: mol_type = unassigned DNA
ttatacaatggtaaaaccacactt

SEQ ID NO: 2331 - DNA, 24 bp, Homo sapiens
  source 1..24: mol_type = unassigned DNA
aagtgtggttttaccattgtataa

SEQ ID NO: 2332 - RNA, 39 nt, Homo sapiens
  source 1..39: mol_type = unassigned RNA
gtgtttggtagtctagatgtatgagacattcacttatta

SEQ ID NO: 2333 - DNA, 39 bp, Homo sapiens
  source 1..39: mol_type = unassigned DNA
gtgtttggtagtctagatgtatgagacattcacttatta

SEQ ID NO: 2334 - DNA, 39 bp, Homo sapiens
  source 1..39: mol_type = unassigned DNA
taataagtgaatgtctcatacatctagactaccaaacac

SEQ ID NO: 2335 - RNA, 30 nt, Homo sapiens
  source 1..30: mol_type = unassigned RNA
ttctttgtatatgtagctgtataagaaaaa

SEQ ID NO: 2336 - DNA, 30 bp, Homo sapiens
  source 1..30: mol_type = unassigned DNA
ttctttgtatatgtagctgtataagaaaaa

SEQ ID NO: 2337 - DNA, 30 bp, Homo sapiens
  source 1..30: mol_type = unassigned DNA
tttttcttatacagctacatatacaaagaa

SEQ ID NO: 2338 - RNA, 23 nt, Homo sapiens
  source 1..23: mol_type = unassigned RNA
ttctctagtaaattgtaaagtgt

SEQ ID NO: 2339 - DNA, 23 bp, Homo sapiens
  source 1..23: mol_type = unassigned DNA
ttctctagtaaattgtaaagtgt

SEQ ID NO: 2340 - DNA, 23 bp, Homo sapiens
  source 1..23: mol_type = unassigned DNA
acactttacaatttactagagaa

SEQ ID NO: 2341 - RNA, 23 nt, Homo sapiens
  source 1..23: mol_type = unassigned RNA
gctctactgagccgtgctgcatt

SEQ ID NO: 2342 - DNA, 23 bp, Homo sapiens
  source 1..23: mol_type = unassigned DNA
gctctactgagccgtgctgcatt

SEQ ID NO: 2343 - DNA, 23 bp, Homo sapiens
  source 1..23: mol_type = unassigned DNA
aatgcagcacggctcagtagagc

SEQ ID NO: 2344 - RNA, 26 nt, Homo sapiens
  source 1..26: mol_type = unassigned RNA
tacaattgatttttgtaaatagaagg

SEQ ID NO: 2345 - DNA, 26 bp, Homo sapiens
  source 1..26: mol_type = unassigned DNA
tacaattgatttttgtaaatagaagg

SEQ ID NO: 2346 - DNA, 26 bp, Homo sapiens
  source 1..26: mol_type = unassigned DNA
ccttctatttacaaaaatcaattgta

SEQ ID NO: 2347 - RNA, 31 nt, Homo sapiens
  source 1..31: mol_type = unassigned RNA
attagaaagcaccaggccgtgggagcagtga

SEQ ID NO: 2348 - DNA, 31 bp, Homo sapiens
  source 1..31: mol_type = unassigned DNA
attagaaagcaccaggccgtgggagcagtga

SEQ ID NO: 2349 - DNA, 31 bp, Homo sapiens
  source 1..31: mol_type = unassigned DNA
tcactgctcccacggcctggtgctttctaat

SEQ ID NO: 2350 - RNA, 34 nt, Homo sapiens
  source 1..34: mol_type = unassigned RNA
tattttatgagagtgatgagacctgactcataat

SEQ ID NO: 2351 - DNA, 34 bp, Homo sapiens
  source 1..34: mol_type = unassigned DNA
tattttatgagagtgatgagacctgactcataat

SEQ ID NO: 2352 - DNA, 34 bp, Homo sapiens
  source 1..34: mol_type = unassigned DNA
attatgagtcaggtctcatcactctcataaaata

SEQ ID NO: 2353 - RNA, 70 nt, Homo sapiens
  source 1..70: mol_type = unassigned RNA
ctttctgccttctctccttccttctccagagggatgctccttctagagacagcaggtgtcctggaagaga

SEQ ID NO: 2354 - DNA, 70 bp, Homo sapiens
  source 1..70: mol_type = unassigned DNA
ctttctgccttctctccttccttctccagagggatgctccttctagagacagcaggtgtcctggaagaga

SEQ ID NO: 2355 - DNA, 70 bp, Homo sapiens
  source 1..70: mol_type = unassigned DNA
tctcttccaggacacctgctgtctctagaaggagcatccctctggagaaggaaggagagaaggcagaaag

SEQ ID NO: 2356 - RNA, 40 nt, Homo sapiens
  source 1..40: mol_type = unassigned RNA
ctcccaggaaaggagactctagagggaaccgccttcttgc

SEQ ID NO: 2357 - DNA, 40 bp, Homo sapiens
  source 1..40: mol_type = unassigned DNA
ctcccaggaaaggagactctagagggaaccgccttcttgc

SEQ ID NO: 2358 - DNA, 40 bp, Homo sapiens
  source 1..40: mol_type = unassigned DNA
gcaagaaggcggttccctctagagtctcctttcctgggag

SEQ ID NO: 2359 - RNA, 195 nt, Homo sapiens
  source 1..195: mol_type = unassigned RNA
ctctccagcaccggaggagcgtgagccccagggggcacggacttgtgtttttttctgctgtgtcactgatgaggaaactgaggcccagcagtgagaaactggcatgaggtggcagagaaccaggaggcctcctgggctctcggccccacacaccagggtgtctggcctgtaaggtaagtgggagtcactgagtgg

SEQ ID NO: 2360 - DNA, 195 bp, Homo sapiens
  source 1..195: mol_type = unassigned DNA
ctctccagcaccggaggagcgtgagccccagggggcacggacttgtgtttttttctgctgtgtcactgatgaggaaactgaggcccagcagtgagaaactggcatgaggtggcagagaaccaggaggcctcctgggctctcggccccacacaccagggtgtctggcctgtaaggtaagtgggagtcactgagtgg

SEQ ID NO: 2361 - DNA, 195 bp, Homo sapiens
  source 1..195: mol_type = unassigned DNA
ccactcagtgactcccacttaccttacaggccagacaccctggtgtgtggggccgagagcccaggaggcctcctggttctctgccacctcatgccagtttctcactgctgggcctcagtttcctcatcagtgacacagcagaaaaaaacacaagtccgtgccccctggggctcacgctcctccggtgctggagag

SEQ ID NO: 2362 - RNA, 30 nt, Homo sapiens
  source 1..30: mol_type = unassigned RNA
tctcctggggttagctagctggatggggca

SEQ ID NO: 2363 - DNA, 30 bp, Homo sapiens
  source 1..30: mol_type = unassigned DNA
tctcctggggttagctagctggatggggca

SEQ ID NO: 2364 - DNA, 30 bp, Homo sapiens
  source 1..30: mol_type = unassigned DNA
tgccccatccagctagctaaccccaggaga

SEQ ID NO: 2365 - RNA, 38 nt, Homo sapiens
  source 1..38: mol_type = unassigned RNA
taatccttccttgtgatgctggagctggaccctgtaaa

SEQ ID NO: 2366 - DNA, 38 bp, Homo sapiens
  source 1..38: mol_type = unassigned DNA
taatccttccttgtgatgctggagctggaccctgtaaa

SEQ ID NO: 2367 - DNA, 38 bp, Homo sapiens
  source 1..38: mol_type = unassigned DNA
tttacagggtccagctccagcatcacaaggaaggatta

SEQ ID NO: 2368 - RNA, 37 nt, Homo sapiens
  source 1..37: mol_type = unassigned RNA
tgagtcattccaccagattcggctcctaatcgaaaca

SEQ ID NO: 2369 - DNA, 37 bp, Homo sapiens
  source 1..37: mol_type = unassigned DNA
tgagtcattccaccagattcggctcctaatcgaaaca

SEQ ID NO: 2370 - DNA, 37 bp, Homo sapiens
  source 1..37: mol_type = unassigned DNA
tgtttcgattaggagccgaatctggtggaatgactca

SEQ ID NO: 2371 - RNA, 25 nt, Homo sapiens
  source 1..25: mol_type = unassigned RNA
gaccttccttgtggtataaataata

SEQ ID NO: 2372 - DNA, 25 bp, Homo sapiens
  source 1..25: mol_type = unassigned DNA
gaccttccttgtggtataaataata

SEQ ID NO: 2373 - DNA, 25 bp, Homo sapiens
  source 1..25: mol_type = unassigned DNA
tattatttataccacaaggaaggtc

SEQ ID NO: 2374 - RNA, 40 nt, Homo sapiens
  source 1..40: mol_type = unassigned RNA
ttctacgtcatgctgcactggctctggggcccaatggaca

SEQ ID NO: 2375 - DNA, 40 bp, Homo sapiens
  source 1..40: mol_type = unassigned DNA
ttctacgtcatgctgcactggctctggggcccaatggaca

SEQ ID NO: 2376 - DNA, 40 bp, Homo sapiens
  source 1..40: mol_type = unassigned DNA
tgtccattgggccccagagccagtgcagcatgacgtagaa

SEQ ID NO: 2377 - RNA, 117 nt, Homo sapiens
  source 1..117: mol_type = unassigned RNA
ggggatgtaagtccttggcctcttcctcctcccagtcccgaagtcctgggcctcaggtctctacaggagccgtcctcccttctccgcatctcccgttccctgccacctccaccacca

SEQ ID NO: 2378 - DNA, 117 bp, Homo sapiens
  source 1..117: mol_type = unassigned DNA
ggggatgtaagtccttggcctcttcctcctcccagtcccgaagtcctgggcctcaggtctctacaggagccgtcctcccttctccgcatctcccgttccctgccacctccaccacca

SEQ ID NO: 2379 - DNA, 117 bp, Homo sapiens
  source 1..117: mol_type = unassigned DNA
tggtggtggaggtggcagggaacgggagatgcggagaagggaggacggctcctgtagagacctgaggcccaggacttcgggactgggaggaggaagaggccaaggacttacatcccc

SEQ ID NO: 2380 - RNA, 166 nt, Homo sapiens
  source 1..166: mol_type = unassigned RNA
ccagcaaacaaagacctttgtcctgcctctcccagaccagagaccactgggaagctggaaggggtaagtggcgcactggaagcagggggccggtcagtggctgagaagccaggtcctaggccaaggaaagggctcctggggtggggaaggaggaggcagaacaggc

SEQ ID NO: 2381 - DNA, 166 bp, Homo sapiens
  source 1..166: mol_type = unassigned DNA
ccagcaaacaaagacctttgtcctgcctctcccagaccagagaccactgggaagctggaaggggtaagtggcgcactggaagcagggggccggtcagtggctgagaagccaggtcctaggccaaggaaagggctcctggggtggggaaggaggaggcagaacaggc

SEQ ID NO: 2382 - DNA, 166 bp, Homo sapiens
  source 1..166: mol_type = unassigned DNA
gcctgttctgcctcctccttccccaccccaggagccctttccttggcctaggacctggcttctcagccactgaccggccccctgcttccagtgcgccacttaccccttccagcttcccagtggtctctggtctgggagaggcaggacaaaggtctttgtttgctgg

SEQ ID NO: 2383 - RNA, 32 nt, Homo sapiens
  source 1..32: mol_type = unassigned RNA
actccccagatccccgcgcggccccagaccca

SEQ ID NO: 2384 - DNA, 32 bp, Homo sapiens
  source 1..32: mol_type = unassigned DNA
actccccagatccccgcgcggccccagaccca

SEQ ID NO: 2385 - DNA, 32 bp, Homo sapiens
  source 1..32: mol_type = unassigned DNA
tgggtctggggccgcgcggggatctggggagt

SEQ ID NO: 2386 - RNA, 32 nt, Homo sapiens
  source 1..32: mol_type = unassigned RNA
acagctctgtggcaactccaggcagatggctt

SEQ ID NO: 2387 - DNA, 32 bp, Homo sapiens
  source 1..32: mol_type = unassigned DNA
acagctctgtggcaactccaggcagatggctt

SEQ ID NO: 2388 - DNA, 32 bp, Homo sapiens
  source 1..32: mol_type = unassigned DNA
aagccatctgcctggagttgccacagagctgt

SEQ ID NO: 2389 - RNA, 30 nt, Homo sapiens
  source 1..30: mol_type = unassigned RNA
gcgccttttggaccagctcagggacagccg

SEQ ID NO: 2390 - DNA, 30 bp, Homo sapiens
  source 1..30: mol_type = unassigned DNA
gcgccttttggaccagctcagggacagccg

SEQ ID NO: 2391 - DNA, 30 bp, Homo sapiens
  source 1..30: mol_type = unassigned DNA
cggctgtccctgagctggtccaaaaggcgc

SEQ ID NO: 2392 - RNA, 47 nt, Homo sapiens
  source 1..47: mol_type = unassigned RNA
ctcagtcattccacagagactgagcactgacagagccctgcctgcag

SEQ ID NO: 2393 - DNA, 47 bp, Homo sapiens
  source 1..47: mol_type = unassigned DNA
ctcagtcattccacagagactgagcactgacagagccctgcctgcag

SEQ ID NO: 2394 - DNA, 47 bp, Homo sapiens
  source 1..47: mol_type = unassigned DNA
ctgcaggcagggctctgtcagtgctcagtctctgtggaatgactgag

SEQ ID NO: 2395 - RNA, 25 nt, Homo sapiens
  source 1..25: mol_type = unassigned RNA
ggcatctgtggcccaatggagattg

SEQ ID NO: 2396 - DNA, 25 bp, Homo sapiens
  source 1..25: mol_type = unassigned DNA
ggcatctgtggcccaatggagattg

SEQ ID NO: 2397 - DNA, 25 bp, Homo sapiens
  source 1..25: mol_type = unassigned DNA
caatctccattgggccacagatgcc

SEQ ID NO: 2398 - RNA, 23 nt, Homo sapiens
  source 1..23: mol_type = unassigned RNA
tctgtgtttattagctgcctgat

SEQ ID NO: 2399 - DNA, 23 bp, Homo sapiens
  source 1..23: mol_type = unassigned DNA
tctgtgtttattagctgcctgat

SEQ ID NO: 2400 - DNA, 23 bp, Homo sapiens
  source 1..23: mol_type = unassigned DNA
atcaggcagctaataaacacaga

SEQ ID NO: 2401 - RNA, 22 nt, Homo sapiens
  source 1..22: mol_type = unassigned RNA
tttggcaaaggtctaactcctc

SEQ ID NO: 2402 - DNA, 22 bp, Homo sapiens
  source 1..22: mol_type = unassigned DNA
tttggcaaaggtctaactcctc

SEQ ID NO: 2403 - DNA, 22 bp, Homo sapiens
  source 1..22: mol_type = unassigned DNA
gaggagttagacctttgccaaa

SEQ ID NO: 2404 - RNA, 25 nt, Homo sapiens
  source 1..25: mol_type = unassigned RNA
tctcttgtttcctactagatggagg

SEQ ID NO: 2405 - DNA, 25 bp, Homo sapiens
  source 1..25: mol_type = unassigned DNA
tctcttgtttcctactagatggagg

SEQ ID NO: 2406 - DNA, 25 bp, Homo sapiens
  source 1..25: mol_type = unassigned DNA
cctccatctagtaggaaacaagaga

SEQ ID NO: 2407 - RNA, 34 nt, Homo sapiens
  source 1..34: mol_type = unassigned RNA
agacagatgatgatctctgatgacctccccaaag

SEQ ID NO: 2408 - DNA, 34 bp, Homo sapiens
  source 1..34: mol_type = unassigned DNA
agacagatgatgatctctgatgacctccccaaag

SEQ ID NO: 2409 - DNA, 34 bp, Homo sapiens
  source 1..34: mol_type = unassigned DNA
ctttggggaggtcatcagagatcatcatctgtct

SEQ ID NO: 2410 - RNA, 30 nt, Homo sapiens
  source 1..30: mol_type = unassigned RNA
ctccttcactgttccctctggcttcccata

SEQ ID NO: 2411 - DNA, 30 bp, Homo sapiens
  source 1..30: mol_type = unassigned DNA
ctccttcactgttccctctggcttcccata

SEQ ID NO: 2412 - DNA, 30 bp, Homo sapiens
  source 1..30: mol_type = unassigned DNA
tatgggaagccagagggaacagtgaaggag

SEQ ID NO: 2413 - RNA, 40 nt, Homo sapiens
  source 1..40: mol_type = unassigned RNA
tttcttgtttcctactttttgtgggactgatcaactttct

SEQ ID NO: 2414 - DNA, 40 bp, Homo sapiens
  source 1..40: mol_type = unassigned DNA
tttcttgtttcctactttttgtgggactgatcaactttct

SEQ ID NO: 2415 - DNA, 40 bp, Homo sapiens
  source 1..40: mol_type = unassigned DNA
agaaagttgatcagtcccacaaaaagtaggaaacaagaaa

SEQ ID NO: 2416 - RNA, 44 nt, Homo sapiens
  source 1..44: mol_type = unassigned RNA
agtggatcctcatggttatgtttgaggttgtgtagtttatgctt

SEQ ID NO: 2417 - DNA, 44 bp, Homo sapiens
  source 1..44: mol_type = unassigned DNA
agtggatcctcatggttatgtttgaggttgtgtagtttatgctt

SEQ ID NO: 2418 - DNA, 44 bp, Homo sapiens
  source 1..44: mol_type = unassigned DNA
aagcataaactacacaacctcaaacataaccatgaggatccact

SEQ ID NO: 2419 - RNA, 32 nt, Homo sapiens
  source 1..32: mol_type = unassigned RNA
gttttggggaagtcctcattgacacacatctc

SEQ ID NO: 2420 - DNA, 32 bp, Homo sapiens
  source 1..32: mol_type = unassigned DNA
gttttggggaagtcctcattgacacacatctc

SEQ ID NO: 2421 - DNA, 32 bp, Homo sapiens
  source 1..32: mol_type = unassigned DNA
gagatgtgtgtcaatgaggacttccccaaaac

SEQ ID NO: 2422 - RNA, 41 nt, Homo sapiens
  source 1..41: mol_type = unassigned RNA
taaccatcaggaatattgttgagttctagtttgtagagttt

SEQ ID NO: 2423 - DNA, 41 bp, Homo sapiens
  source 1..41: mol_type = unassigned DNA
taaccatcaggaatattgttgagttctagtttgtagagttt

SEQ ID NO: 2424 - DNA, 41 bp, Homo sapiens
  source 1..41: mol_type = unassigned DNA
aaactctacaaactagaactcaacaatattcctgatggtta

SEQ ID NO: 2425 - RNA, 34 nt, Homo sapiens
  source 1..34: mol_type = unassigned RNA
aagcgttaacactctgaagggaagcgctttcttt

SEQ ID NO: 2426 - DNA, 34 bp, Homo sapiens
  source 1..34: mol_type = unassigned DNA
aagcgttaacactctgaagggaagcgctttcttt

SEQ ID NO: 2427 - DNA, 34 bp, Homo sapiens
  source 1..34: mol_type = unassigned DNA
aaagaaagcgcttcccttcagagtgttaacgctt

SEQ ID NO: 2428 - RNA, 48 nt, Homo sapiens
  source 1..48: mol_type = unassigned RNA
cctttccctttgccatacctgtctgtagtttctcagctgctgtttcct

SEQ ID NO: 2429 - DNA, 48 bp, Homo sapiens
  source 1..48: mol_type = unassigned DNA
cctttccctttgccatacctgtctgtagtttctcagctgctgtttcct

SEQ ID NO: 2430 - DNA, 48 bp, Homo sapiens
  source 1..48: mol_type = unassigned DNA
aggaaacagcagctgagaaactacagacaggtatggcaaagggaaagg

SEQ ID NO: 2431 - RNA, 31 nt, Homo sapiens
  source 1..31: mol_type = unassigned RNA
gggatacagatctcagggctcgggagccatg

SEQ ID NO: 2432 - DNA, 31 bp, Homo sapiens
  source 1..31: mol_type = unassigned DNA
gggatacagatctcagggctcgggagccatg

SEQ ID NO: 2433 - DNA, 31 bp, Homo sapiens
  source 1..31: mol_type = unassigned DNA
catggctcccgagccctgagatctgtatccc

SEQ ID NO: 2434 - RNA, 29 nt, Homo sapiens
  source 1..29: mol_type = unassigned RNA
tatgaaattgatttttgcaaatagaaaat

SEQ ID NO: 2435 - DNA, 29 bp, Homo sapiens
  source 1..29: mol_type = unassigned DNA
tatgaaattgatttttgcaaatagaaaat

SEQ ID NO: 2436 - DNA, 29 bp, Homo sapiens
  source 1..29: mol_type = unassigned DNA
attttctatttgcaaaaatcaatttcata

SEQ ID NO: 2437 - RNA, 28 nt, Homo sapiens
  source 1..28: mol_type = unassigned RNA
gtttctgttgcgtgatggactttttgtt

SEQ ID NO: 2438 - DNA, 28 bp, Homo sapiens
  source 1..28: mol_type = unassigned DNA
gtttctgttgcgtgatggactttttgtt

SEQ ID NO: 2439 - DNA, 28 bp, Homo sapiens
  source 1..28: mol_type = unassigned DNA
aacaaaaagtccatcacgcaacagaaac

SEQ ID NO: 2440 - RNA, 43 nt, Homo sapiens
  source 1..43: mol_type = unassigned RNA
tgtttcctatggtagaactcagccagaagacacaggacaaggg

SEQ ID NO: 2441 - DNA, 43 bp, Homo sapiens
  source 1..43: mol_type = unassigned DNA
tgtttcctatggtagaactcagccagaagacacaggacaaggg

SEQ ID NO: 2442 - DNA, 43 bp, Homo sapiens
  source 1..43: mol_type = unassigned DNA
cccttgtcctgtgtcttctggctgagttctaccataggaaaca

SEQ ID NO: 2443 - RNA, 174 nt, Homo sapiens
  source 1..174: mol_type = unassigned RNA
aagcctgggcaatggcgggcgcccctcccccagcctcgctgccgccttgcagtttgatctcagactgctgtgctagtaatcagcgagactccgtgggcgtaggaccgtacaagccaggtgcgggatataatcttgtggcgcgccccttttttaagccggtcggaaaagcgcagt

SEQ ID NO: 2444 - DNA, 174 bp, Homo sapiens
  source 1..174: mol_type = unassigned DNA
aagcctgggcaatggcgggcgcccctcccccagcctcgctgccgccttgcagtttgatctcagactgctgtgctagtaatcagcgagactccgtgggcgtaggaccgtacaagccaggtgcgggatataatcttgtggcgcgccccttttttaagccggtcggaaaagcgcagt

SEQ ID NO: 2445 - DNA, 174 bp, Homo sapiens
  source 1..174: mol_type = unassigned DNA
actgcgcttttccgaccggcttaaaaaaggggcgcgccacaagattatatcccgcacctggcttgtacggtcctacgcccacggagtctcgctgattactagcacagcagtctgagatcaaactgcaaggcggcagcgaggctgggggaggggcgcccgccattgcccaggctt

SEQ ID NO: 2446 - RNA, 30 nt, Homo sapiens
  source 1..30: mol_type = unassigned RNA
ttatttagtaggattgtggttaatgatttg

SEQ ID NO: 2447 - DNA, 30 bp, Homo sapiens
  source 1..30: mol_type = unassigned DNA
ttatttagtaggattgtggttaatgatttg

SEQ ID NO: 2448 - DNA, 30 bp, Homo sapiens
  source 1..30: mol_type = unassigned DNA
caaatcattaaccacaatcctactaaataa

SEQ ID NO: 2449 - RNA, 24 nt, Homo sapiens
  source 1..24: mol_type = unassigned RNA
taattgatttttagaaatagcaaa

SEQ ID NO: 2450 - DNA, 24 bp, Homo sapiens
  source 1..24: mol_type = unassigned DNA
taattgatttttagaaatagcaaa

SEQ ID NO: 2451 - DNA, 24 bp, Homo sapiens
  source 1..24: mol_type = unassigned DNA
tttgctatttctaaaaatcaatta

SEQ ID NO: 2452 - RNA, 44 nt, Homo sapiens
  source 1..44: mol_type = unassigned RNA
ttgtgagatttctccactgagaattcactgtattttcctttcca

SEQ ID NO: 2453 - DNA, 44 bp, Homo sapiens
  source 1..44: mol_type = unassigned DNA
ttgtgagatttctccactgagaattcactgtattttcctttcca

SEQ ID NO: 2454 - DNA, 44 bp, Homo sapiens
  source 1..44: mol_type = unassigned DNA
tggaaaggaaaatacagtgaattctcagtggagaaatctcacaa

SEQ ID NO: 2455 - RNA, 37 nt, Homo sapiens
  source 1..37: mol_type = unassigned RNA
attcttgttttctactttatgctctacctttttccta

SEQ ID NO: 2456 - DNA, 37 bp, Homo sapiens
  source 1..37: mol_type = unassigned DNA
attcttgttttctactttatgctctacctttttccta

SEQ ID NO: 2457 - DNA, 37 bp, Homo sapiens
  source 1..37: mol_type = unassigned DNA
taggaaaaaggtagagcataaagtagaaaacaagaat

SEQ ID NO: 2458 - RNA, 55 nt, Homo sapiens
  source 1..55: mol_type = unassigned RNA
ctaatcctgtctctttttaactagctgtttgaccttggagagacctctaaattgc

SEQ ID NO: 2459 - DNA, 55 bp, Homo sapiens
  source 1..55: mol_type = unassigned DNA
ctaatcctgtctctttttaactagctgtttgaccttggagagacctctaaattgc

SEQ ID NO: 2460 - DNA, 55 bp, Homo sapiens
  source 1..55: mol_type = unassigned DNA
gcaatttagaggtctctccaaggtcaaacagctagttaaaaagagacaggattag

SEQ ID NO: 2461 - RNA, 22 nt, Homo sapiens
  source 1..22: mol_type = unassigned RNA
gtttctgttgagcaaaggacat

SEQ ID NO: 2462 - DNA, 22 bp, Homo sapiens
  source 1..22: mol_type = unassigned DNA
gtttctgttgagcaaaggacat

SEQ ID NO: 2463 - DNA, 22 bp, Homo sapiens
  source 1..22: mol_type = unassigned DNA
atgtcctttgctcaacagaaac

SEQ ID NO: 2464 - RNA, 53 nt, Homo sapiens
  source 1..53: mol_type = unassigned RNA
ttaatgcatttttggaaatcgatcactagagggcggcattgcaaagactatga

SEQ ID NO: 2465 - DNA, 53 bp, Homo sapiens
  source 1..53: mol_type = unassigned DNA
ttaatgcatttttggaaatcgatcactagagggcggcattgcaaagactatga

SEQ ID NO: 2466 - DNA, 53 bp, Homo sapiens
  source 1..53: mol_type = unassigned DNA
tcatagtctttgcaatgccgccctctagtgatcgatttccaaaaatgcattaa

SEQ ID NO: 2467 - RNA, 38 nt, Homo sapiens
  source 1..38: mol_type = unassigned RNA
ccattttctgttcctctgtgtatctatctgtatgatgc

SEQ ID NO: 2468 - DNA, 38 bp, Homo sapiens
  source 1..38: mol_type = unassigned DNA
ccattttctgttcctctgtgtatctatctgtatgatgc

SEQ ID NO: 2469 - DNA, 38 bp, Homo sapiens
  source 1..38: mol_type = unassigned DNA
gcatcatacagatagatacacagaggaacagaaaatgg

SEQ ID NO: 2470 - RNA, 106 nt, Homo sapiens
  source 1..106: mol_type = unassigned RNA
tgcgtcccagattcactcccccagagcagctgaacacagcagggggccgcccaacgaggcaggcaggcttgaaatgggaggtcgaggcactggtggaaggaaaaaa

SEQ ID NO: 2471 - DNA, 106 bp, Homo sapiens
  source 1..106: mol_type = unassigned DNA
tgcgtcccagattcactcccccagagcagctgaacacagcagggggccgcccaacgaggcaggcaggcttgaaatgggaggtcgaggcactggtggaaggaaaaaa

SEQ ID NO: 2472 - DNA, 106 bp, Homo sapiens
  source 1..106: mol_type = unassigned DNA
ttttttccttccaccagtgcctcgacctcccatttcaagcctgcctgcctcgttgggcggccccctgctgtgttcagctgctctgggggagtgaatctgggacgca

SEQ ID NO: 2473 - RNA, 25 nt, Homo sapiens
  source 1..25: mol_type = unassigned RNA
cgccagaactgtactctccgagagg

SEQ ID NO: 2474 - DNA, 25 bp, Homo sapiens
  source 1..25: mol_type = unassigned DNA
cgccagaactgtactctccgagagg

SEQ ID NO: 2475 - DNA, 25 bp, Homo sapiens
  source 1..25: mol_type = unassigned DNA
cctctcggagagtacagttctggcg

SEQ ID NO: 2476 - RNA, 55 nt, Homo sapiens
  source 1..55: mol_type = unassigned RNA
gaagatgactgaagaaaaactggcagaggcagagagagttggactacacaaagtc

SEQ ID NO: 2477 - DNA, 55 bp, Homo sapiens
  source 1..55: mol_type = unassigned DNA
gaagatgactgaagaaaaactggcagaggcagagagagttggactacacaaagtc

SEQ ID NO: 2478 - DNA, 55 bp, Homo sapiens
  source 1..55: mol_type = unassigned DNA
gactttgtgtagtccaactctctctgcctctgccagtttttcttcagtcatcttc

SEQ ID NO: 2479 - RNA, 69 nt, Homo sapiens
  source 1..69: mol_type = unassigned RNA
cttgggctgagccatgctactgttttcctaggttctccagcttgaagacagcattttgtaggacttttc

SEQ ID NO: 2480 - DNA, 69 bp, Homo sapiens
  source 1..69: mol_type = unassigned DNA
cttgggctgagccatgctactgttttcctaggttctccagcttgaagacagcattttgtaggacttttc

SEQ ID NO: 2481 - DNA, 69 bp, Homo sapiens
  source 1..69: mol_type = unassigned DNA
gaaaagtcctacaaaatgctgtcttcaagctggagaacctaggaaaacagtagcatggctcagcccaag

SEQ ID NO: 2482 - RNA, 104 nt, Homo sapiens
  source 1..104: mol_type = unassigned RNA
gagcaggacaaggtgcccagccagcaggttgtgggaacgaggggcctaatggatgtggctgggtggggagcggatgcctcattgatcgcccagtggctatattt

SEQ ID NO: 2483 - DNA, 104 bp, Homo sapiens
  source 1..104: mol_type = unassigned DNA
gagcaggacaaggtgcccagccagcaggttgtgggaacgaggggcctaatggatgtggctgggtggggagcggatgcctcattgatcgcccagtggctatattt

SEQ ID NO: 2484 - DNA, 104 bp, Homo sapiens
  source 1..104: mol_type = unassigned DNA
aaatatagccactgggcgatcaatgaggcatccgctccccacccagccacatccattaggcccctcgttcccacaacctgctggctgggcaccttgtcctgctc

SEQ ID NO: 2485 - RNA, 101 nt, Homo sapiens
  source 1..101: mol_type = unassigned RNA
ctcgaagctgggcagggggagctgcggttcccagccccgatgattttgccaactgtgcaatgatgtgagtgttctgagctgaaggtaggtgaggctaagct

SEQ ID NO: 2486 - DNA, 101 bp, Homo sapiens
  source 1..101: mol_type = unassigned DNA
ctcgaagctgggcagggggagctgcggttcccagccccgatgattttgccaactgtgcaatgatgtgagtgttctgagctgaaggtaggtgaggctaagct

SEQ ID NO: 2487 - DNA, 101 bp, Homo sapiens
  source 1..101: mol_type = unassigned DNA
agcttagcctcacctaccttcagctcagaacactcacatcattgcacagttggcaaaatcatcggggctgggaaccgcagctccccctgcccagcttcgag

SEQ ID NO: 2488 - RNA, 43 nt, Homo sapiens
  source 1..43: mol_type = unassigned RNA
agcgctctatggttttgtaggttgtttggtttctcgccttgta

SEQ ID NO: 2489 - DNA, 43 bp, Homo sapiens
  source 1..43: mol_type = unassigned DNA
agcgctctatggttttgtaggttgtttggtttctcgccttgta

SEQ ID NO: 2490 - DNA, 43 bp, Homo sapiens
  source 1..43: mol_type = unassigned DNA
tacaaggcgagaaaccaaacaacctacaaaaccatagagcgct

SEQ ID NO: 2491 - RNA, 28 nt, Homo sapiens
  source 1..28: mol_type = unassigned RNA
tatttgtggcacggtaggactcaaaatt

SEQ ID NO: 2492 - DNA, 28 bp, Homo sapiens
  source 1..28: mol_type = unassigned DNA
tatttgtggcacggtaggactcaaaatt

SEQ ID NO: 2493 - DNA, 28 bp, Homo sapiens
  source 1..28: mol_type = unassigned DNA
aattttgagtcctaccgtgccacaaata

SEQ ID NO: 2494 - RNA, 24 nt, Homo sapiens
  source 1..24: mol_type = unassigned RNA
tgctctagtaggtttgttgtggta

SEQ ID NO: 2495 - DNA, 24 bp, Homo sapiens
  source 1..24: mol_type = unassigned DNA
tgctctagtaggtttgttgtggta

SEQ ID NO: 2496 - DNA, 24 bp, Homo sapiens
  source 1..24: mol_type = unassigned DNA
taccacaacaaacctactagagca

SEQ ID NO: 2497 - RNA, 29 nt, Homo sapiens
  source 1..29: mol_type = unassigned RNA
tgtcacacctggtgctctcggcttcatga

SEQ ID NO: 2498 - DNA, 29 bp, Homo sapiens
  source 1..29: mol_type = unassigned DNA
tgtcacacctggtgctctcggcttcatga

SEQ ID NO: 2499 - DNA, 29 bp, Homo sapiens
  source 1..29: mol_type = unassigned DNA
tcatgaagccgagagcaccaggtgtgaca

SEQ ID NO: 2500 - RNA, 193 nt, Homo sapiens
  source 1..193: mol_type = unassigned RNA
taattagaaaccaggaagactgagaaggaatcaaatttgcagcagctcagtaagtggtagactgggaacaagaagccagttctctgggctcttgaagcaaggccctgccacgttgtctttccccaggagaggaggtatgacagataaaggtcttaggttgattttttaaaactgtgtgactatcagtgtctgg

SEQ ID NO: 2501 - DNA, 193 bp, Homo sapiens
  source 1..193: mol_type = unassigned DNA
taattagaaaccaggaagactgagaaggaatcaaatttgcagcagctcagtaagtggtagactgggaacaagaagccagttctctgggctcttgaagcaaggccctgccacgttgtctttccccaggagaggaggtatgacagataaaggtcttaggttgattttttaaaactgtgtgactatcagtgtctgg

SEQ ID NO: 2502 - DNA, 193 bp, Homo sapiens
  source 1..193: mol_type = unassigned DNA
ccagacactgatagtcacacagttttaaaaaatcaacctaagacctttatctgtcatacctcctctcctggggaaagacaacgtggcagggccttgcttcaagagcccagagaactggcttcttgttcccagtctaccacttactgagctgctgcaaatttgattccttctcagtcttcctggtttctaatta

SEQ ID NO: 2503 - RNA, 24 nt, Homo sapiens
  source 1..24: mol_type = unassigned RNA
tttaattgatctttggaaatagtc

SEQ ID NO: 2504 - DNA, 24 bp, Homo sapiens
  source 1..24: mol_type = unassigned DNA
tttaattgatctttggaaatagtc

SEQ ID NO: 2505 - DNA, 24 bp, Homo sapiens
  source 1..24: mol_type = unassigned DNA
gactatttccaaagatcaattaaa

SEQ ID NO: 2506 - RNA, 48 nt, Homo sapiens
  source 1..48: mol_type = unassigned RNA
ttatatatgagtttgtatagtatgccaccttggaacaagaagatgtat

SEQ ID NO: 2507 - DNA, 48 bp, Homo sapiens
  source 1..48: mol_type = unassigned DNA
ttatatatgagtttgtatagtatgccaccttggaacaagaagatgtat

SEQ ID NO: 2508 - DNA, 48 bp, Homo sapiens
  source 1..48: mol_type = unassigned DNA
atacatcttcttgttccaaggtggcatactatacaaactcatatataa

SEQ ID NO: 2509 - RNA, 77 nt, Homo sapiens
  source 1..77: mol_type = unassigned RNA
gcaagatccttgcttcaatgggacctcagatttggacattcagggtaagccacatcctctcaaggctgtttagggcc

SEQ ID NO: 2510 - DNA, 77 bp, Homo sapiens
  source 1..77: mol_type = unassigned DNA
gcaagatccttgcttcaatgggacctcagatttggacattcagggtaagccacatcctctcaaggctgtttagggcc

SEQ ID NO: 2511 - DNA, 77 bp, Homo sapiens
  source 1..77: mol_type = unassigned DNA
ggccctaaacagccttgagaggatgtggcttaccctgaatgtccaaatctgaggtcccattgaagcaaggatcttgc

SEQ ID NO: 2512 - RNA, 32 nt, Homo sapiens
  source 1..32: mol_type = unassigned RNA
cacacatgctgccgagctctggaaaaacccca

SEQ ID NO: 2513 - DNA, 32 bp, Homo sapiens
  source 1..32: mol_type = unassigned DNA
cacacatgctgccgagctctggaaaaacccca

SEQ ID NO: 2514 - DNA, 32 bp, Homo sapiens
  source 1..32: mol_type = unassigned DNA
tggggtttttccagagctcggcagcatgtgtg

SEQ ID NO: 2515 - RNA, 26 nt, Homo sapiens
  source 1..26: mol_type = unassigned RNA
ttctctagtagtttgtgatctaatgg

SEQ ID NO: 2516 - DNA, 26 bp, Homo sapiens
  source 1..26: mol_type = unassigned DNA
ttctctagtagtttgtgatctaatgg

SEQ ID NO: 2517 - DNA, 26 bp, Homo sapiens
  source 1..26: mol_type = unassigned DNA
ccattagatcacaaactactagagaa

SEQ ID NO: 2518 - RNA, 25 nt, Homo sapiens
  source 1..25: mol_type = unassigned RNA
aatgtaactgatataattcactaca

SEQ ID NO: 2519 - DNA, 25 bp, Homo sapiens
  source 1..25: mol_type = unassigned DNA
aatgtaactgatataattcactaca

SEQ ID NO: 2520 - DNA, 25 bp, Homo sapiens
  source 1..25: mol_type = unassigned DNA
tgtagtgaattatatcagttacatt

SEQ ID NO: 2521 - RNA, 135 nt, Homo sapiens
  source 1..135: mol_type = unassigned RNA
gctggtggcagcacagttgtaggtgtttaatgtgggatcctgttggctgttgcagtagggatactaagtagccacctggctgccactcactctgagtcattctgggtggggcaggtgccagggagcggagagtgg

SEQ ID NO: 2522 - DNA, 135 bp, Homo sapiens
  source 1..135: mol_type = unassigned DNA
gctggtggcagcacagttgtaggtgtttaatgtgggatcctgttggctgttgcagtagggatactaagtagccacctggctgccactcactctgagtcattctgggtggggcaggtgccagggagcggagagtgg

SEQ ID NO: 2523 - DNA, 135 bp, Homo sapiens
  source 1..135: mol_type = unassigned DNA
ccactctccgctccctggcacctgccccacccagaatgactcagagtgagtggcagccaggtggctacttagtatccctactgcaacagccaacaggatcccacattaaacacctacaactgtgctgccaccagc

SEQ ID NO: 2524 - RNA, 65 nt, Homo sapiens
  source 1..65: mol_type = unassigned RNA
ttctaattaaaaggttggaaaatgagatacatctctgacatattagtttatatagttggccttcc

SEQ ID NO: 2525 - DNA, 65 bp, Homo sapiens
  source 1..65: mol_type = unassigned DNA
ttctaattaaaaggttggaaaatgagatacatctctgacatattagtttatatagttggccttcc

SEQ ID NO: 2526 - DNA, 65 bp, Homo sapiens
  source 1..65: mol_type = unassigned DNA
ggaaggccaactatataaactaatatgtcagagatgtatctcattttccaaccttttaattagaa

SEQ ID NO: 2527 - RNA, 31 nt, Homo sapiens
  source 1..31: mol_type = unassigned RNA
cgactactagtttgtgatacctttcatggag

SEQ ID NO: 2528 - DNA, 31 bp, Homo sapiens
  source 1..31: mol_type = unassigned DNA
cgactactagtttgtgatacctttcatggag

SEQ ID NO: 2529 - DNA, 31 bp, Homo sapiens
  source 1..31: mol_type = unassigned DNA
ctccatgaaaggtatcacaaactagtagtcg

SEQ ID NO: 2530 - RNA, 33 nt, Homo sapiens
  source 1..33: mol_type = unassigned RNA
ttggctgcctgtctctgtcccccaatggacttg

SEQ ID NO: 2531 - DNA, 33 bp, Homo sapiens
  source 1..33: mol_type = unassigned DNA
ttggctgcctgtctctgtcccccaatggacttg

SEQ ID NO: 2532 - DNA, 33 bp, Homo sapiens
  source 1..33: mol_type = unassigned DNA
caagtccattgggggacagagacaggcagccaa

SEQ ID NO: 2533 - RNA, 63 nt, Homo sapiens
  source 1..63: mol_type = unassigned RNA
agccaatcaaagactgaaagaagacttgttaggggttggacctggaaagggaagaactgaaga

SEQ ID NO: 2534 - DNA, 63 bp, Homo sapiens
  source 1..63: mol_type = unassigned DNA
agccaatcaaagactgaaagaagacttgttaggggttggacctggaaagggaagaactgaaga

SEQ ID NO: 2535 - DNA, 63 bp, Homo sapiens
  source 1..63: mol_type = unassigned DNA
tcttcagttcttccctttccaggtccaacccctaacaagtcttctttcagtctttgattggct

SEQ ID NO: 2536 - RNA, 41 nt, Homo sapiens
  source 1..41: mol_type = unassigned RNA
agttttgattgtgagttcttctggtccttggttttcgtaag

SEQ ID NO: 2537 - DNA, 41 bp, Homo sapiens
  source 1..41: mol_type = unassigned DNA
agttttgattgtgagttcttctggtccttggttttcgtaag

SEQ ID NO: 2538 - DNA, 41 bp, Homo sapiens
  source 1..41: mol_type = unassigned DNA
cttacgaaaaccaaggaccagaagaactcacaatcaaaact

SEQ ID NO: 2539 - RNA, 93 nt, Homo sapiens
  source 1..93: mol_type = unassigned RNA
gagctacctaggcaaagagtatagatggtgggcggtagaattgggtccgtgaagccaacttgaccagccccatgattcctttggggcttttga

SEQ ID NO: 2540 - DNA, 93 bp, Homo sapiens
  source 1..93: mol_type = unassigned DNA
gagctacctaggcaaagagtatagatggtgggcggtagaattgggtccgtgaagccaacttgaccagccccatgattcctttggggcttttga

SEQ ID NO: 2541 - DNA, 93 bp, Homo sapiens
  source 1..93: mol_type = unassigned DNA
tcaaaagccccaaaggaatcatggggctggtcaagttggcttcacggacccaattctaccgcccaccatctatactctttgcctaggtagctc

SEQ ID NO: 2542 - RNA, 163 nt, Homo sapiens
  source 1..163: mol_type = unassigned RNA
ctctgggttccaattggtttatctctaaacaagttgaagggattagaccaatggctccctggagggcccatcctgctgtcagatcattcaaagatgttcattgccagttctttgcaccatgaggaacatatttggacttttagacaggctctgacttctcaga

SEQ ID NO: 2543 - DNA, 163 bp, Homo sapiens
  source 1..163: mol_type = unassigned DNA
ctctgggttccaattggtttatctctaaacaagttgaagggattagaccaatggctccctggagggcccatcctgctgtcagatcattcaaagatgttcattgccagttctttgcaccatgaggaacatatttggacttttagacaggctctgacttctcaga

SEQ ID NO: 2544 - DNA, 163 bp, Homo sapiens
  source 1..163: mol_type = unassigned DNA
tctgagaagtcagagcctgtctaaaagtccaaatatgttcctcatggtgcaaagaactggcaatgaacatctttgaatgatctgacagcaggatgggccctccagggagccattggtctaatcccttcaacttgtttagagataaaccaattggaacccagag

SEQ ID NO: 2545 - RNA, 62 nt, Homo sapiens
  source 1..62: mol_type = unassigned RNA
ctctaaaaggaagcacttgcttttctttctgaccacagaaagcgcttccctttagagggtca

SEQ ID NO: 2546 - DNA, 62 bp, Homo sapiens
  source 1..62: mol_type = unassigned DNA
ctctaaaaggaagcacttgcttttctttctgaccacagaaagcgcttccctttagagggtca

SEQ ID NO: 2547 - DNA, 62 bp, Homo sapiens
  source 1..62: mol_type = unassigned DNA
tgaccctctaaagggaagcgctttctgtggtcagaaagaaaagcaagtgcttccttttagag

SEQ ID NO: 2548 - RNA, 35 nt, Homo sapiens
  source 1..35: mol_type = unassigned RNA
ctgtccatgttctgttagttactcctgatggcctc

SEQ ID NO: 2549 - DNA, 35 bp, Homo sapiens
  source 1..35: mol_type = unassigned DNA
ctgtccatgttctgttagttactcctgatggcctc

SEQ ID NO: 2550 - DNA, 35 bp, Homo sapiens
  source 1..35: mol_type = unassigned DNA
gaggccatcaggagtaactaacagaacatggacag

SEQ ID NO: 2551 - RNA, 36 nt, Homo sapiens
  source 1..36: mol_type = unassigned RNA
ggcccttggccttggactgagccatgctactggctt

SEQ ID NO: 2552 - DNA, 36 bp, Homo sapiens
  source 1..36: mol_type = unassigned DNA
ggcccttggccttggactgagccatgctactggctt

SEQ ID NO: 2553 - DNA, 36 bp, Homo sapiens
  source 1..36: mol_type = unassigned DNA
aagccagtagcatggctcagtccaaggccaagggcc

SEQ ID NO: 2554 - RNA, 51 nt, Homo sapiens
  source 1..51: mol_type = unassigned RNA
attctccagagggaaggtctttaaggtcacagactgagacagtggtggata

SEQ ID NO: 2555 - DNA, 51 bp, Homo sapiens
  source 1..51: mol_type = unassigned DNA
attctccagagggaaggtctttaaggtcacagactgagacagtggtggata

SEQ ID NO: 2556 - DNA, 51 bp, Homo sapiens
  source 1..51: mol_type = unassigned DNA
tatccaccactgtctcagtctgtgaccttaaagaccttccctctggagaat

SEQ ID NO: 2557 - RNA, 30 nt, Homo sapiens
  source 1..30: mol_type = unassigned RNA
ctgcgaatagaccgtggctgcttagacaga

SEQ ID NO: 2558 - DNA, 30 bp, Homo sapiens
  source 1..30: mol_type = unassigned DNA
ctgcgaatagaccgtggctgcttagacaga

SEQ ID NO: 2559 - DNA, 30 bp, Homo sapiens
  source 1..30: mol_type = unassigned DNA
tctgtctaagcagccacggtctattcgcag

SEQ ID NO: 2560 - RNA, 26 nt, Homo sapiens
  source 1..26: mol_type = unassigned RNA
attctggagggaagtactttaaaact

SEQ ID NO: 2561 - DNA, 26 bp, Homo sapiens
  source 1..26: mol_type = unassigned DNA
attctggagggaagtactttaaaact

SEQ ID NO: 2562 - DNA, 26 bp, Homo sapiens
  source 1..26: mol_type = unassigned DNA
agttttaaagtacttccctccagaat

SEQ ID NO: 2563 - RNA, 24 nt, Homo sapiens
  source 1..24: mol_type = unassigned RNA
tgattattacatgggcaatctttc

SEQ ID NO: 2564 - DNA, 24 bp, Homo sapiens
  source 1..24: mol_type = unassigned DNA
tgattattacatgggcaatctttc

SEQ ID NO: 2565 - DNA, 24 bp, Homo sapiens
  source 1..24: mol_type = unassigned DNA
gaaagattgcccatgtaataatca

SEQ ID NO: 2566 - RNA, 142 nt, Homo sapiens
  source 1..142: mol_type = unassigned RNA
tgtttttctgcactgagtttggctgccaagcgagaaattgcttcttcaccagtgcaatataaccctaacattgcagggattttcatagcattatgtactagtttttccagatttttaattcccttccttaagagttcaggac

SEQ ID NO: 2567 - DNA, 142 bp, Homo sapiens
  source 1..142: mol_type = unassigned DNA
tgtttttctgcactgagtttggctgccaagcgagaaattgcttcttcaccagtgcaatataaccctaacattgcagggattttcatagcattatgtactagtttttccagatttttaattcccttccttaagagttcaggac

SEQ ID NO: 2568 - DNA, 142 bp, Homo sapiens
  source 1..142: mol_type = unassigned DNA
gtcctgaactcttaaggaagggaattaaaaatctggaaaaactagtacataatgctatgaaaatccctgcaatgttagggttatattgcactggtgaagaagcaatttctcgcttggcagccaaactcagtgcagaaaaaca

SEQ ID NO: 2569 - RNA, 22 nt, Homo sapiens
  source 1..22: mol_type = unassigned RNA
tcagccattcccggagtctgtg

SEQ ID NO: 2570 - DNA, 22 bp, Homo sapiens
  source 1..22: mol_type = unassigned DNA
tcagccattcccggagtctgtg

SEQ ID NO: 2571 - DNA, 22 bp, Homo sapiens
  source 1..22: mol_type = unassigned DNA
cacagactccgggaatggctga

SEQ ID NO: 2572 - RNA, 146 nt, Homo sapiens
  source 1..146: mol_type = unassigned RNA
ctagtgtggccctggttacgcctcctctggctcagtcacacagcagccttgtaggtgactggaggtgttcgctgatgtggccccaaccctacctccctccccaccccatgatgttagaagaatctcgacagaataaattggcagca

SEQ ID NO: 2573 - DNA, 146 bp, Homo sapiens
  source 1..146: mol_type = unassigned DNA
ctagtgtggccctggttacgcctcctctggctcagtcacacagcagccttgtaggtgactggaggtgttcgctgatgtggccccaaccctacctccctccccaccccatgatgttagaagaatctcgacagaataaattggcagca

SEQ ID NO: 2574 - DNA, 146 bp, Homo sapiens
  source 1..146: mol_type = unassigned DNA
tgctgccaatttattctgtcgagattcttctaacatcatggggtggggagggaggtagggttggggccacatcagcgaacacctccagtcacctacaaggctgctgtgtgactgagccagaggaggcgtaaccagggccacactag

SEQ ID NO: 2575 - RNA, 80 nt, Homo sapiens
  source 1..80: mol_type = unassigned RNA
cagtgaagttctggtggtggcgttctcaccgcactctcctcccttcctcccctcatgctctccccttctccctgcctgca

SEQ ID NO: 2576 - DNA, 80 bp, Homo sapiens
  source 1..80: mol_type = unassigned DNA
cagtgaagttctggtggtggcgttctcaccgcactctcctcccttcctcccctcatgctctccccttctccctgcctgca

SEQ ID NO: 2577 - DNA, 80 bp, Homo sapiens
  source 1..80: mol_type = unassigned DNA
tgcaggcagggagaaggggagagcatgaggggaggaagggaggagagtgcggtgagaacgccaccaccagaacttcactg

SEQ ID NO: 2578 - RNA, 100 nt, Homo sapiens
  source 1..100: mol_type = unassigned RNA
ctcctcttcccgtgtggaacccagggttcaaatggctgagcgggaagcgctctagtagggactctggcaactctgttttctccttctcttccttttcacc

SEQ ID NO: 2579 - DNA, 100 bp, Homo sapiens
  source 1..100: mol_type = unassigned DNA
ctcctcttcccgtgtggaacccagggttcaaatggctgagcgggaagcgctctagtagggactctggcaactctgttttctccttctcttccttttcacc

SEQ ID NO: 2580 - DNA, 100 bp, Homo sapiens
  source 1..100: mol_type = unassigned DNA
ggtgaaaaggaagagaaggagaaaacagagttgccagagtccctactagagcgcttcccgctcagccatttgaaccctgggttccacacgggaagaggag

SEQ ID NO: 2581 - RNA, 36 nt, Homo sapiens
  source 1..36: mol_type = unassigned RNA
ccaagactgatgatttaaattctgacctgccctttg

SEQ ID NO: 2582 - DNA, 36 bp, Homo sapiens
  source 1..36: mol_type = unassigned DNA
ccaagactgatgatttaaattctgacctgccctttg

SEQ ID NO: 2583 - DNA, 36 bp, Homo sapiens
  source 1..36: mol_type = unassigned DNA
caaagggcaggtcagaatttaaatcatcagtcttgg

SEQ ID NO: 2584 - RNA, 189 nt, Homo sapiens
  source 1..189: mol_type = unassigned RNA
ttctctctttttttttaattgctagcctgtaaatgaaaatatgcaagtcaacaaaataaagaaaaatgaagatgctaagaaaagactgtctgttgaaagaatctatcaaaagaaaacacaattggaacatattttgctccgcccagacacctacattggttctgtggaattagtgacccaggtaaaatc

SEQ ID NO: 2585 - DNA, 189 bp, Homo sapiens
  source 1..189: mol_type = unassigned DNA
ttctctctttttttttaattgctagcctgtaaatgaaaatatgcaagtcaacaaaataaagaaaaatgaagatgctaagaaaagactgtctgttgaaagaatctatcaaaagaaaacacaattggaacatattttgctccgcccagacacctacattggttctgtggaattagtgacccaggtaaaatc

SEQ ID NO: 2586 - DNA, 189 bp, Homo sapiens
  source 1..189: mol_type = unassigned DNA
gattttacctgggtcactaattccacagaaccaatgtaggtgtctgggcggagcaaaatatgttccaattgtgttttcttttgatagattctttcaacagacagtcttttcttagcatcttcatttttctttattttgttgacttgcatattttcatttacaggctagcaattaaaaaaaaagagagaa

SEQ ID NO: 2587 - RNA, 52 nt, Homo sapiens
  source 1..52: mol_type = unassigned RNA
atttttcagacttggactgagccatgctactggcttctctctttctccagct

SEQ ID NO: 2588 - DNA, 52 bp, Homo sapiens
  source 1..52: mol_type = unassigned DNA
atttttcagacttggactgagccatgctactggcttctctctttctccagct

SEQ ID NO: 2589 - DNA, 52 bp, Homo sapiens
  source 1..52: mol_type = unassigned DNA
agctggagaaagagagaagccagtagcatggctcagtccaagtctgaaaaat

SEQ ID NO: 2590 - RNA, 25 nt, Homo sapiens
  source 1..25: mol_type = unassigned RNA
acaatactgctgtgtaaggatggct

SEQ ID NO: 2591 - DNA, 25 bp, Homo sapiens
  source 1..25: mol_type = unassigned DNA
acaatactgctgtgtaaggatggct

SEQ ID NO: 2592 - DNA, 25 bp, Homo sapiens
  source 1..25: mol_type = unassigned DNA
agccatccttacacagcagtattgt

SEQ ID NO: 2593 - RNA, 87 nt, Homo sapiens
  source 1..87: mol_type = unassigned RNA
ttgggcacttggcctcagactgttatgctgtcagcttccctggttttgaggctttcagacttggactgagccatgctactggcttgt

SEQ ID NO: 2594 - DNA, 87 bp, Homo sapiens
  source 1..87: mol_type = unassigned DNA
ttgggcacttggcctcagactgttatgctgtcagcttccctggttttgaggctttcagacttggactgagccatgctactggcttgt

SEQ ID NO: 2595 - DNA, 87 bp, Homo sapiens
  source 1..87: mol_type = unassigned DNA
acaagccagtagcatggctcagtccaagtctgaaagcctcaaaaccagggaagctgacagcataacagtctgaggccaagtgcccaa

SEQ ID NO: 2596 - RNA, 97 nt, Homo sapiens
  source 1..97: mol_type = unassigned RNA
aaagactggagtctcgctgttttgctcaggctggccttgggactcctgagctccagtgatcctcccaccccagccccctgagtagctgggactacag

SEQ ID NO: 2597 - DNA, 97 bp, Homo sapiens
  source 1..97: mol_type = unassigned DNA
aaagactggagtctcgctgttttgctcaggctggccttgggactcctgagctccagtgatcctcccaccccagccccctgagtagctgggactacag

SEQ ID NO: 2598 - DNA, 97 bp, Homo sapiens
  source 1..97: mol_type = unassigned DNA
ctgtagtcccagctactcagggggctggggtgggaggatcactggagctcaggagtcccaaggccagcctgagcaaaacagcgagactccagtcttt

SEQ ID NO: 2599 - RNA, 35 nt, Homo sapiens
  source 1..35: mol_type = unassigned RNA
tctcatggaactcatgagtaccacgtggagaccat

SEQ ID NO: 2600 - DNA, 35 bp, Homo sapiens
  source 1..35: mol_type = unassigned DNA
tctcatggaactcatgagtaccacgtggagaccat

SEQ ID NO: 2601 - DNA, 35 bp, Homo sapiens
  source 1..35: mol_type = unassigned DNA
atggtctccacgtggtactcatgagttccatgaga

SEQ ID NO: 2602 - RNA, 37 nt, Homo sapiens
  source 1..37: mol_type = unassigned RNA
tgagttatccgagttcttgttgtggtctttctcatct

SEQ ID NO: 2603 - DNA, 37 bp, Homo sapiens
  source 1..37: mol_type = unassigned DNA
tgagttatccgagttcttgttgtggtctttctcatct

SEQ ID NO: 2604 - DNA, 37 bp, Homo sapiens
  source 1..37: mol_type = unassigned DNA
agatgagaaagaccacaacaagaactcggataactca

SEQ ID NO: 2605 - RNA, 35 nt, Homo sapiens
  source 1..35: mol_type = unassigned RNA
aaagatactccaatgctcagattcctggggatgag

SEQ ID NO: 2606 - DNA, 35 bp, Homo sapiens
  source 1..35: mol_type = unassigned DNA
aaagatactccaatgctcagattcctggggatgag

SEQ ID NO: 2607 - DNA, 35 bp, Homo sapiens
  source 1..35: mol_type = unassigned DNA
ctcatccccaggaatctgagcattggagtatcttt

SEQ ID NO: 2608 - RNA, 67 nt, Homo sapiens
  source 1..67: mol_type = unassigned RNA
tcctccagagggaagctctttaggccagtcaaaaggccagtgggtcggtccaggggtcctcggtaga

SEQ ID NO: 2609 - DNA, 67 bp, Homo sapiens
  source 1..67: mol_type = unassigned DNA
tcctccagagggaagctctttaggccagtcaaaaggccagtgggtcggtccaggggtcctcggtaga

SEQ ID NO: 2610 - DNA, 67 bp, Homo sapiens
  source 1..67: mol_type = unassigned DNA
tctaccgaggacccctggaccgacccactggccttttgactggcctaaagagcttccctctggagga

SEQ ID NO: 2611 - RNA, 34 nt, Homo sapiens
  source 1..34: mol_type = unassigned RNA
tcctttccctactgaactttttttgtctgctaga

SEQ ID NO: 2612 - DNA, 34 bp, Homo sapiens
  source 1..34: mol_type = unassigned DNA
tcctttccctactgaactttttttgtctgctaga

SEQ ID NO: 2613 - DNA, 34 bp, Homo sapiens
  source 1..34: mol_type = unassigned DNA
tctagcagacaaaaaaagttcagtagggaaagga

SEQ ID NO: 2614 - RNA, 36 nt, Homo sapiens
  source 1..36: mol_type = unassigned RNA
tctgcctttaactagctgtatgaacttgaacgaatc

SEQ ID NO: 2615 - DNA, 36 bp, Homo sapiens
  source 1..36: mol_type = unassigned DNA
tctgcctttaactagctgtatgaacttgaacgaatc

SEQ ID NO: 2616 - DNA, 36 bp, Homo sapiens
  source 1..36: mol_type = unassigned DNA
gattcgttcaagttcatacagctagttaaaggcaga

SEQ ID NO: 2617 - RNA, 34 nt, Homo sapiens
  source 1..34: mol_type = unassigned RNA
gttacttattagaatgtatagttaaggccagggg

SEQ ID NO: 2618 - DNA, 34 bp, Homo sapiens
  source 1..34: mol_type = unassigned DNA
gttacttattagaatgtatagttaaggccagggg

SEQ ID NO: 2619 - DNA, 34 bp, Homo sapiens
  source 1..34: mol_type = unassigned DNA
cccctggccttaactatacattctaataagtaac

SEQ ID NO: 2620 - RNA, 46 nt, Homo sapiens
  source 1..46: mol_type = unassigned RNA
ttcttgtttttctagctctatgaagtgggatattaggttgttaatt

SEQ ID NO: 2621 - DNA, 46 bp, Homo sapiens
  source 1..46: mol_type = unassigned DNA
ttcttgtttttctagctctatgaagtgggatattaggttgttaatt

SEQ ID NO: 2622 - DNA, 46 bp, Homo sapiens
  source 1..46: mol_type = unassigned DNA
aattaacaacctaatatcccacttcatagagctagaaaaacaagaa

SEQ ID NO: 2623 - RNA, 28 nt, Homo sapiens
  source 1..28: mol_type = unassigned RNA
tgggctggatcgaggctgcaggcaggcg

SEQ ID NO: 2624 - DNA, 28 bp, Homo sapiens
  source 1..28: mol_type = unassigned DNA
tgggctggatcgaggctgcaggcaggcg

SEQ ID NO: 2625 - DNA, 28 bp, Homo sapiens
  source 1..28: mol_type = unassigned DNA
cgcctgcctgcagcctcgatccagccca

SEQ ID NO: 2626 - RNA, 24 nt, Homo sapiens
  source 1..24: mol_type = unassigned RNA
gttaaattcttcagaccactagtt

SEQ ID NO: 2627 - DNA, 24 bp, Homo sapiens
  source 1..24: mol_type = unassigned DNA
gttaaattcttcagaccactagtt

SEQ ID NO: 2628 - DNA, 24 bp, Homo sapiens
  source 1..24: mol_type = unassigned DNA
aactagtggtctgaagaatttaac

SEQ ID NO: 2629 - RNA, 23 nt, Homo sapiens
  source 1..23: mol_type = unassigned RNA
ttctctagtagtgtgtggtattt

SEQ ID NO: 2630 - DNA, 23 bp, Homo sapiens
  source 1..23: mol_type = unassigned DNA
ttctctagtagtgtgtggtattt

SEQ ID NO: 2631 - DNA, 23 bp, Homo sapiens
  source 1..23: mol_type = unassigned DNA
aaataccacacactactagagaa

SEQ ID NO: 2632 - RNA, 67 nt, Homo sapiens
  source 1..67: mol_type = unassigned RNA
cttaaggaagagtagtagtagtatcagatggatgttgaagcgatctgtgagcagggggaagctggtt

SEQ ID NO: 2633 - DNA, 67 bp, Homo sapiens
  source 1..67: mol_type = unassigned DNA
cttaaggaagagtagtagtagtatcagatggatgttgaagcgatctgtgagcagggggaagctggtt

SEQ ID NO: 2634 - DNA, 67 bp, Homo sapiens
  source 1..67: mol_type = unassigned DNA
aaccagcttccccctgctcacagatcgcttcaacatccatctgatactactactactcttccttaag

SEQ ID NO: 2635 - RNA, 64 nt, Homo sapiens
  source 1..64: mol_type = unassigned RNA
gccaccacacccagcctgatcccatcttgacctcctctgctaccatcctgcccaagccaccatc

SEQ ID NO: 2636 - DNA, 64 bp, Homo sapiens
  source 1..64: mol_type = unassigned DNA
gccaccacacccagcctgatcccatcttgacctcctctgctaccatcctgcccaagccaccatc

SEQ ID NO: 2637 - DNA, 64 bp, Homo sapiens
  source 1..64: mol_type = unassigned DNA
gatggtggcttgggcaggatggtagcagaggaggtcaagatgggatcaggctgggtgtggtggc

SEQ ID NO: 2638 - RNA, 68 nt, Homo sapiens
  source 1..68: mol_type = unassigned RNA
attatgtacagtgatgtcagacctgagtttgaaccgtgattctgtcctccactgtagctgtgttacta

SEQ ID NO: 2639 - DNA, 68 bp, Homo sapiens
  source 1..68: mol_type = unassigned DNA
attatgtacagtgatgtcagacctgagtttgaaccgtgattctgtcctccactgtagctgtgttacta

SEQ ID NO: 2640 - DNA, 68 bp, Homo sapiens
  source 1..68: mol_type = unassigned DNA
tagtaacacagctacagtggaggacagaatcacggttcaaactcaggtctgacatcactgtacataat

SEQ ID NO: 2641 - RNA, 24 nt, Homo sapiens
  source 1..24: mol_type = unassigned RNA
atcaaaagtgaggggcatttaact

SEQ ID NO: 2642 - DNA, 24 bp, Homo sapiens
  source 1..24: mol_type = unassigned DNA
atcaaaagtgaggggcatttaact

SEQ ID NO: 2643 - DNA, 24 bp, Homo sapiens
  source 1..24: mol_type = unassigned DNA
agttaaatgcccctcacttttgat

SEQ ID NO: 2644 - RNA, 24 nt, Homo sapiens
  source 1..24: mol_type = unassigned RNA
ttttctagtagatttatagttaaa

SEQ ID NO: 2645 - DNA, 24 bp, Homo sapiens
  source 1..24: mol_type = unassigned DNA
ttttctagtagatttatagttaaa

SEQ ID NO: 2646 - DNA, 24 bp, Homo sapiens
  source 1..24: mol_type = unassigned DNA
tttaactataaatctactagaaaa

SEQ ID NO: 2647 - RNA, 21 nt, Homo sapiens
  source 1..21: mol_type = unassigned RNA
aagcgggagtggaaaaaatgt

SEQ ID NO: 2648 - DNA, 21 bp, Homo sapiens
  source 1..21: mol_type = unassigned DNA
aagcgggagtggaaaaaatgt

SEQ ID NO: 2649 - DNA, 21 bp, Homo sapiens
  source 1..21: mol_type = unassigned DNA
acattttttccactcccgctt

SEQ ID NO: 2650 - RNA, 53 nt, Homo sapiens
  source 1..53: mol_type = unassigned RNA
ttcagggagttctgtctgtctgacatatggctaagcattttcagggatatgaa

SEQ ID NO: 2651 - DNA, 53 bp, Homo sapiens
  source 1..53: mol_type = unassigned DNA
ttcagggagttctgtctgtctgacatatggctaagcattttcagggatatgaa

SEQ ID NO: 2652 - DNA, 53 bp, Homo sapiens
  source 1..53: mol_type = unassigned DNA
ttcatatccctgaaaatgcttagccatatgtcagacagacagaactccctgaa

SEQ ID NO: 2653 - RNA, 26 nt, Homo sapiens
  source 1..26: mol_type = unassigned RNA
ctctctggagggaaacattttaaaac

SEQ ID NO: 2654 - DNA, 26 bp, Homo sapiens
  source 1..26: mol_type = unassigned DNA
ctctctggagggaaacattttaaaac

SEQ ID NO: 2655 - DNA, 26 bp, Homo sapiens
  source 1..26: mol_type = unassigned DNA
gttttaaaatgtttccctccagagag

SEQ ID NO: 2656 - RNA, 44 nt, Homo sapiens
  source 1..44: mol_type = unassigned RNA
tcttcagagggaagtacttgaactcctcatcttcccccaggaaa

SEQ ID NO: 2657 - DNA, 44 bp, Homo sapiens
  source 1..44: mol_type = unassigned DNA
tcttcagagggaagtacttgaactcctcatcttcccccaggaaa

SEQ ID NO: 2658 - DNA, 44 bp, Homo sapiens
  source 1..44: mol_type = unassigned DNA
tttcctgggggaagatgaggagttcaagtacttccctctgaaga

SEQ ID NO: 2659 - RNA, 80 nt, Homo sapiens
  source 1..80: mol_type = unassigned RNA
gctacctaggcaaagagtatagatggtgggctgtagaattgggtccgtgaagcaaacttgaccagccccatgatttcttt

SEQ ID NO: 2660 - DNA, 80 bp, Homo sapiens
  source 1..80: mol_type = unassigned DNA
gctacctaggcaaagagtatagatggtgggctgtagaattgggtccgtgaagcaaacttgaccagccccatgatttcttt

SEQ ID NO: 2661 - DNA, 80 bp, Homo sapiens
  source 1..80: mol_type = unassigned DNA
aaagaaatcatggggctggtcaagtttgcttcacggacccaattctacagcccaccatctatactctttgcctaggtagc

SEQ ID NO: 2662 - RNA, 34 nt, Homo sapiens
  source 1..34: mol_type = unassigned RNA
atcatagatttttggaattagggaatgctagggc

SEQ ID NO: 2663 - DNA, 34 bp, Homo sapiens
  source 1..34: mol_type = unassigned DNA
atcatagatttttggaattagggaatgctagggc

SEQ ID NO: 2664 - DNA, 34 bp, Homo sapiens
  source 1..34: mol_type = unassigned DNA
gccctagcattccctaattccaaaaatctatgat

SEQ ID NO: 2665 - RNA, 36 nt, Homo sapiens
  source 1..36: mol_type = unassigned RNA
tatctactgagccatgcttctggtgtaacagggaga

SEQ ID NO: 2666 - DNA, 36 bp, Homo sapiens
  source 1..36: mol_type = unassigned DNA
tatctactgagccatgcttctggtgtaacagggaga

SEQ ID NO: 2667 - DNA, 36 bp, Homo sapiens
  source 1..36: mol_type = unassigned DNA
tctccctgttacaccagaagcatggctcagtagata

SEQ ID NO: 2668 - RNA, 29 nt, Homo sapiens
  source 1..29: mol_type = unassigned RNA
acagttatcctgtttgctcacaatgatct

SEQ ID NO: 2669 - DNA, 29 bp, Homo sapiens
  source 1..29: mol_type = unassigned DNA
acagttatcctgtttgctcacaatgatct

SEQ ID NO: 2670 - DNA, 29 bp, Homo sapiens
  source 1..29: mol_type = unassigned DNA
agatcattgtgagcaaacaggataactgt

SEQ ID NO: 2671 - RNA, 132 nt, Homo sapiens
  source 1..132: mol_type = unassigned RNA
aacagccagtgttccttgaaaaactccacctcccagaacctgaaggaaatatagctatggtcttttgaccatttctatgatgaaagttgtatcttctgagatacttgttttatgttggaaagtcagtaaagt

SEQ ID NO: 2672 - DNA, 132 bp, Homo sapiens
  source 1..132: mol_type = unassigned DNA
aacagccagtgttccttgaaaaactccacctcccagaacctgaaggaaatatagctatggtcttttgaccatttctatgatgaaagttgtatcttctgagatacttgttttatgttggaaagtcagtaaagt

SEQ ID NO: 2673 - DNA, 132 bp, Homo sapiens
  source 1..132: mol_type = unassigned DNA
actttactgactttccaacataaaacaagtatctcagaagatacaactttcatcatagaaatggtcaaaagaccatagctatatttccttcaggttctgggaggtggagtttttcaaggaacactggctgtt

SEQ ID NO: 2674 - RNA, 68 nt, Homo sapiens
  source 1..68: mol_type = unassigned RNA
actaggtgtcaggccctgtggacacagtgatgaacaagacagacctgatgtgtccccgttttctttgg

SEQ ID NO: 2675 - DNA, 68 bp, Homo sapiens
  source 1..68: mol_type = unassigned DNA
actaggtgtcaggccctgtggacacagtgatgaacaagacagacctgatgtgtccccgttttctttgg

SEQ ID NO: 2676 - DNA, 68 bp, Homo sapiens
  source 1..68: mol_type = unassigned DNA
ccaaagaaaacggggacacatcaggtctgtcttgttcatcactgtgtccacagggcctgacacctagt

SEQ ID NO: 2677 - RNA, 25 nt, Homo sapiens
  source 1..25: mol_type = unassigned RNA
tttctccactggtagaaatcataca

SEQ ID NO: 2678 - DNA, 25 bp, Homo sapiens
  source 1..25: mol_type = unassigned DNA
tttctccactggtagaaatcataca

SEQ ID NO: 2679 - DNA, 25 bp, Homo sapiens
  source 1..25: mol_type = unassigned DNA
tgtatgatttctaccagtggagaaa

SEQ ID NO: 2680 - RNA, 110 nt, Homo sapiens
  source 1..110: mol_type = unassigned RNA
ctctggctcagtcacacagcagccttgtaggtgactggaggtgttcgctgatgtggccccaaccctacctccctccccaccccatgatgttagaagaatctcgacagaat

SEQ ID NO: 2681 - DNA, 110 bp, Homo sapiens
  source 1..110: mol_type = unassigned DNA
ctctggctcagtcacacagcagccttgtaggtgactggaggtgttcgctgatgtggccccaaccctacctccctccccaccccatgatgttagaagaatctcgacagaat

SEQ ID NO: 2682 - DNA, 110 bp, Homo sapiens
  source 1..110: mol_type = unassigned DNA
attctgtcgagattcttctaacatcatggggtggggagggaggtagggttggggccacatcagcgaacacctccagtcacctacaaggctgctgtgtgactgagccagag

SEQ ID NO: 2683 - RNA, 54 nt, Homo sapiens
  source 1..54: mol_type = unassigned RNA
aaaagggagcggagggtagcatggcaaactggaggctgcagactctgccaacag

SEQ ID NO: 2684 - DNA, 54 bp, Homo sapiens
  source 1..54: mol_type = unassigned DNA
aaaagggagcggagggtagcatggcaaactggaggctgcagactctgccaacag

SEQ ID NO: 2685 - DNA, 54 bp, Homo sapiens
  source 1..54: mol_type = unassigned DNA
ctgttggcagagtctgcagcctccagtttgccatgctaccctccgctccctttt

SEQ ID NO: 2686 - RNA, 29 nt, Homo sapiens
  source 1..29: mol_type = unassigned RNA
cctagagagcgtctgggaaatctgtgccg

SEQ ID NO: 2687 - DNA, 29 bp, Homo sapiens
  source 1..29: mol_type = unassigned DNA
cctagagagcgtctgggaaatctgtgccg

SEQ ID NO: 2688 - DNA, 29 bp, Homo sapiens
  source 1..29: mol_type = unassigned DNA
cggcacagatttcccagacgctctctagg

SEQ ID NO: 2689 - RNA, 24 nt, Homo sapiens
  source 1..24: mol_type = unassigned RNA
ttggtgaccagttggaatgtaaga

SEQ ID NO: 2690 - DNA, 24 bp, Homo sapiens
  source 1..24: mol_type = unassigned DNA
ttggtgaccagttggaatgtaaga

SEQ ID NO: 2691 - DNA, 24 bp, Homo sapiens
  source 1..24: mol_type = unassigned DNA
tcttacattccaactggtcaccaa

SEQ ID NO: 2692 - RNA, 36 nt, Homo sapiens
  source 1..36: mol_type = unassigned RNA
gaagtcaatggtataactcacgctgtaactcaagga

SEQ ID NO: 2693 - DNA, 36 bp, Homo sapiens
  source 1..36: mol_type = unassigned DNA
gaagtcaatggtataactcacgctgtaactcaagga

SEQ ID NO: 2694 - DNA, 36 bp, Homo sapiens
  source 1..36: mol_type = unassigned DNA
tccttgagttacagcgtgagttataccattgacttc

SEQ ID NO: 2695 - RNA, 37 nt, Homo sapiens
  source 1..37: mol_type = unassigned RNA
gtaacacatggagagcagcttcctatgactcaagaaa

SEQ ID NO: 2696 - DNA, 37 bp, Homo sapiens
  source 1..37: mol_type = unassigned DNA
gtaacacatggagagcagcttcctatgactcaagaaa

SEQ ID NO: 2697 - DNA, 37 bp, Homo sapiens
  source 1..37: mol_type = unassigned DNA
tttcttgagtcataggaagctgctctccatgtgttac

SEQ ID NO: 2698 - RNA, 33 nt, Homo sapiens
  source 1..33: mol_type = unassigned RNA
cattaactctttctgaccactagagaacatggc

SEQ ID NO: 2699 - DNA, 33 bp, Homo sapiens
  source 1..33: mol_type = unassigned DNA
cattaactctttctgaccactagagaacatggc

SEQ ID NO: 2700 - DNA, 33 bp, Homo sapiens
  source 1..33: mol_type = unassigned DNA
gccatgttctctagtggtcagaaagagttaatg

SEQ ID NO: 2701 - RNA, 56 nt, Homo sapiens
  source 1..56: mol_type = unassigned RNA
accaattttagtgtgcttatttgagaccctttgtgtctctagctgtctgatgtaac

SEQ ID NO: 2702 - DNA, 56 bp, Homo sapiens
  source 1..56: mol_type = unassigned DNA
accaattttagtgtgcttatttgagaccctttgtgtctctagctgtctgatgtaac

SEQ ID NO: 2703 - DNA, 56 bp, Homo sapiens
  source 1..56: mol_type = unassigned DNA
gttacatcagacagctagagacacaaagggtctcaaataagcacactaaaattggt

SEQ ID NO: 2704 - RNA, 75 nt, Homo sapiens
  source 1..75: mol_type = unassigned RNA
ctcagactgagggctgcactgttggcttccttggttgtgaggcttttggagatggactgagccatgctaccaact

SEQ ID NO: 2705 - DNA, 75 bp, Homo sapiens
  source 1..75: mol_type = unassigned DNA
ctcagactgagggctgcactgttggcttccttggttgtgaggcttttggagatggactgagccatgctaccaact

SEQ ID NO: 2706 - DNA, 75 bp, Homo sapiens
  source 1..75: mol_type = unassigned DNA
agttggtagcatggctcagtccatctccaaaagcctcacaaccaaggaagccaacagtgcagccctcagtctgag

SEQ ID NO: 2707 - RNA, 25 nt, Homo sapiens
  source 1..25: mol_type = unassigned RNA
gtgttcctggttgacagagggcagg

SEQ ID NO: 2708 - DNA, 25 bp, Homo sapiens
  source 1..25: mol_type = unassigned DNA
gtgttcctggttgacagagggcagg

SEQ ID NO: 2709 - DNA, 25 bp, Homo sapiens
  source 1..25: mol_type = unassigned DNA
cctgccctctgtcaaccaggaacac

SEQ ID NO: 2710 - RNA, 79 nt, Homo sapiens
  source 1..79: mol_type = unassigned RNA
tttcttgtcagtattgggtccgggcatgccctcagactctgcctttccccatgatgttgactgaggtttccggggtccc

SEQ ID NO: 2711 - DNA, 79 bp, Homo sapiens
  source 1..79: mol_type = unassigned DNA
tttcttgtcagtattgggtccgggcatgccctcagactctgcctttccccatgatgttgactgaggtttccggggtccc

SEQ ID NO: 2712 - DNA, 79 bp, Homo sapiens
  source 1..79: mol_type = unassigned DNA
gggaccccggaaacctcagtcaacatcatggggaaaggcagagtctgagggcatgcccggacccaatactgacaagaaa

SEQ ID NO: 2713 - RNA, 61 nt, Homo sapiens
  source 1..61: mol_type = unassigned RNA
aatacgctcctggttccccagctctgattatttagctgtatgcaaatccagtatcattttc

SEQ ID NO: 2714 - DNA, 61 bp, Homo sapiens
  source 1..61: mol_type = unassigned DNA
aatacgctcctggttccccagctctgattatttagctgtatgcaaatccagtatcattttc

SEQ ID NO: 2715 - DNA, 61 bp, Homo sapiens
  source 1..61: mol_type = unassigned DNA
gaaaatgatactggatttgcatacagctaaataatcagagctggggaaccaggagcgtatt

SEQ ID NO: 2716 - RNA, 29 nt, Homo sapiens
  source 1..29: mol_type = unassigned RNA
ctctttgtttatgtatatgtatgtatgtg

SEQ ID NO: 2717 - DNA, 29 bp, Homo sapiens
  source 1..29: mol_type = unassigned DNA
ctctttgtttatgtatatgtatgtatgtg

SEQ ID NO: 2718 - DNA, 29 bp, Homo sapiens
  source 1..29: mol_type = unassigned DNA
cacatacatacatatacataaacaaagag

SEQ ID NO: 2719 - RNA, 31 nt, Homo sapiens
  source 1..31: mol_type = unassigned RNA
gttaggcactgagggctctggacgggctcca

SEQ ID NO: 2720 - DNA, 31 bp, Homo sapiens
  source 1..31: mol_type = unassigned DNA
gttaggcactgagggctctggacgggctcca

SEQ ID NO: 2721 - DNA, 31 bp, Homo sapiens
  source 1..31: mol_type = unassigned DNA
tggagcccgtccagagccctcagtgcctaac

SEQ ID NO: 2722 - RNA, 75 nt, Homo sapiens
  source 1..75: mol_type = unassigned RNA
ggagtgttttccctgtggtcctctctctgtcccaggccccttctctgtagtttgtgctgtggggggtgaaccaaa

SEQ ID NO: 2723 - DNA, 75 bp, Homo sapiens
  source 1..75: mol_type = unassigned DNA
ggagtgttttccctgtggtcctctctctgtcccaggccccttctctgtagtttgtgctgtggggggtgaaccaaa

SEQ ID NO: 2724 - DNA, 75 bp, Homo sapiens
  source 1..75: mol_type = unassigned DNA
tttggttcaccccccacagcacaaactacagagaaggggcctgggacagagagaggaccacagggaaaacactcc

SEQ ID NO: 2725 - RNA, 52 nt, Homo sapiens
  source 1..52: mol_type = unassigned RNA
ctttggagtagcgttcttctaggttctctagctgaatgcaggactccaaagc

SEQ ID NO: 2726 - DNA, 52 bp, Homo sapiens
  source 1..52: mol_type = unassigned DNA
ctttggagtagcgttcttctaggttctctagctgaatgcaggactccaaagc

SEQ ID NO: 2727 - DNA, 52 bp, Homo sapiens
  source 1..52: mol_type = unassigned DNA
gctttggagtcctgcattcagctagagaacctagaagaacgctactccaaag

SEQ ID NO: 2728 - RNA, 92 nt, Homo sapiens
  source 1..92: mol_type = unassigned RNA
aagcaggcagttgaattctagtggttgggttctaatggattctggcctggagaaataaatttgaacgtatcagactgaattgaagagactgc

SEQ ID NO: 2729 - DNA, 92 bp, Homo sapiens
  source 1..92: mol_type = unassigned DNA
aagcaggcagttgaattctagtggttgggttctaatggattctggcctggagaaataaatttgaacgtatcagactgaattgaagagactgc

SEQ ID NO: 2730 - DNA, 92 bp, Homo sapiens
  source 1..92: mol_type = unassigned DNA
gcagtctcttcaattcagtctgatacgttcaaatttatttctccaggccagaatccattagaacccaaccactagaattcaactgcctgctt

SEQ ID NO: 2731 - RNA, 24 nt, Homo sapiens
  source 1..24: mol_type = unassigned RNA
ttctgctctgggtttgtggaagtt

SEQ ID NO: 2732 - DNA, 24 bp, Homo sapiens
  source 1..24: mol_type = unassigned DNA
ttctgctctgggtttgtggaagtt

SEQ ID NO: 2733 - DNA, 24 bp, Homo sapiens
  source 1..24: mol_type = unassigned DNA
aacttccacaaacccagagcagaa

SEQ ID NO: 2734 - RNA, 23 nt, Homo sapiens
  source 1..23: mol_type = unassigned RNA
ctcactgctgtgctgcaggtagg

SEQ ID NO: 2735 - DNA, 23 bp, Homo sapiens
  source 1..23: mol_type = unassigned DNA
ctcactgctgtgctgcaggtagg

SEQ ID NO: 2736 - DNA, 23 bp, Homo sapiens
  source 1..23: mol_type = unassigned DNA
cctacctgcagcacagcagtgag

SEQ ID NO: 2737 - RNA, 31 nt, Homo sapiens
  source 1..31: mol_type = unassigned RNA
aggtggccggtttgttagggagtcgtgtacg

SEQ ID NO: 2738 - DNA, 31 bp, Homo sapiens
  source 1..31: mol_type = unassigned DNA
aggtggccggtttgttagggagtcgtgtacg

SEQ ID NO: 2739 - DNA, 31 bp, Homo sapiens
  source 1..31: mol_type = unassigned DNA
cgtacacgactccctaacaaaccggccacct

SEQ ID NO: 2740 - RNA, 78 nt, Homo sapiens
  source 1..78: mol_type = unassigned RNA
gtttctgtgatgtgttctgagctgcaggaagcagaggccctgggagactgtgggcttctctggtgtacctgggcctgt

SEQ ID NO: 2741 - DNA, 78 bp, Homo sapiens
  source 1..78: mol_type = unassigned DNA
gtttctgtgatgtgttctgagctgcaggaagcagaggccctgggagactgtgggcttctctggtgtacctgggcctgt

SEQ ID NO: 2742 - DNA, 78 bp, Homo sapiens
  source 1..78: mol_type = unassigned DNA
acaggcccaggtacaccagagaagcccacagtctcccagggcctctgcttcctgcagctcagaacacatcacagaaac

SEQ ID NO: 2743 - RNA, 32 nt, Homo sapiens
  source 1..32: mol_type = unassigned RNA
gctgccatcacatcggacatattggaggccct

SEQ ID NO: 2744 - DNA, 32 bp, Homo sapiens
  source 1..32: mol_type = unassigned DNA
gctgccatcacatcggacatattggaggccct

SEQ ID NO: 2745 - DNA, 32 bp, Homo sapiens
  source 1..32: mol_type = unassigned DNA
agggcctccaatatgtccgatgtgatggcagc

SEQ ID NO: 2746 - RNA, 30 nt, Homo sapiens
  source 1..30: mol_type = unassigned RNA
gctgttgatcgttaggatagatcgcagctc

SEQ ID NO: 2747 - DNA, 30 bp, Homo sapiens
  source 1..30: mol_type = unassigned DNA
gctgttgatcgttaggatagatcgcagctc

SEQ ID NO: 2748 - DNA, 30 bp, Homo sapiens
  source 1..30: mol_type = unassigned DNA
gagctgcgatctatcctaacgatcaacagc

SEQ ID NO: 2749 - RNA, 40 nt, Homo sapiens
  source 1..40: mol_type = unassigned RNA
tgctcagtgacagcgcagctgtgaaatgacagccagtttt

SEQ ID NO: 2750 - DNA, 40 bp, Homo sapiens
  source 1..40: mol_type = unassigned DNA
tgctcagtgacagcgcagctgtgaaatgacagccagtttt

SEQ ID NO: 2751 - DNA, 40 bp, Homo sapiens
  source 1..40: mol_type = unassigned DNA
aaaactggctgtcatttcacagctgcgctgtcactgagca

SEQ ID NO: 2752 - RNA, 32 nt, Homo sapiens
  source 1..32: mol_type = unassigned RNA
aatgtaagtggtagaattgactttgatagacc

SEQ ID NO: 2753 - DNA, 32 bp, Homo sapiens
  source 1..32: mol_type = unassigned DNA
aatgtaagtggtagaattgactttgatagacc

SEQ ID NO: 2754 - DNA, 32 bp, Homo sapiens
  source 1..32: mol_type = unassigned DNA
ggtctatcaaagtcaattctaccacttacatt

SEQ ID NO: 2755 - RNA, 79 nt, Homo sapiens
  source 1..79: mol_type = unassigned RNA
ctggcacaccgggctggaaggtcttggagctgcacgagccgtgctaaaaactctgtgattcatctcgtagccaatgagg

SEQ ID NO: 2756 - DNA, 79 bp, Homo sapiens
  source 1..79: mol_type = unassigned DNA
ctggcacaccgggctggaaggtcttggagctgcacgagccgtgctaaaaactctgtgattcatctcgtagccaatgagg

SEQ ID NO: 2757 - DNA, 79 bp, Homo sapiens
  source 1..79: mol_type = unassigned DNA
cctcattggctacgagatgaatcacagagtttttagcacggctcgtgcagctccaagaccttccagcccggtgtgccag

SEQ ID NO: 2758 - RNA, 42 nt, Homo sapiens
  source 1..42: mol_type = unassigned RNA
ctgagagcctcaaggccctttcactgtcccggccagtataat

SEQ ID NO: 2759 - DNA, 42 bp, Homo sapiens
  source 1..42: mol_type = unassigned DNA
ctgagagcctcaaggccctttcactgtcccggccagtataat

SEQ ID NO: 2760 - DNA, 42 bp, Homo sapiens
  source 1..42: mol_type = unassigned DNA
attatactggccgggacagtgaaagggccttgaggctctcag

SEQ ID NO: 2761 - RNA, 25 nt, Homo sapiens
  source 1..25: mol_type = unassigned RNA
atctattatcctactactgtttcct

SEQ ID NO: 2762 - DNA, 25 bp, Homo sapiens
  source 1..25: mol_type = unassigned DNA
atctattatcctactactgtttcct

SEQ ID NO: 2763 - DNA, 25 bp, Homo sapiens
  source 1..25: mol_type = unassigned DNA
aggaaacagtagtaggataatagat

SEQ ID NO: 2764 - RNA, 179 nt, Homo sapiens
  source 1..179: mol_type = unassigned RNA
tccagtcggtaaaaatcaagctgtgaacaaatgacaaagtgaatgatagagcagtatattagaaattgggcagatggaagcccagtagaaaaggctgtgtttgagctagactctgaggataaatagggtttgaacgattggaaaccatctctgttgggccatggacaaagatatcaaat

SEQ ID NO: 2765 - DNA, 179 bp, Homo sapiens
  source 1..179: mol_type = unassigned DNA
tccagtcggtaaaaatcaagctgtgaacaaatgacaaagtgaatgatagagcagtatattagaaattgggcagatggaagcccagtagaaaaggctgtgtttgagctagactctgaggataaatagggtttgaacgattggaaaccatctctgttgggccatggacaaagatatcaaat

SEQ ID NO: 2766 - DNA, 179 bp, Homo sapiens
  source 1..179: mol_type = unassigned DNA
atttgatatctttgtccatggcccaacagagatggtttccaatcgttcaaaccctatttatcctcagagtctagctcaaacacagccttttctactgggcttccatctgcccaatttctaatatactgctctatcattcactttgtcatttgttcacagcttgatttttaccgactgga

SEQ ID NO: 2767 - RNA, 65 nt, Homo sapiens
  source 1..65: mol_type = unassigned RNA
tggctcttgctgaactccagagggaagcacttatttggctttgatgaagatctcaatcctcattt

SEQ ID NO: 2768 - DNA, 65 bp, Homo sapiens
  source 1..65: mol_type = unassigned DNA
tggctcttgctgaactccagagggaagcacttatttggctttgatgaagatctcaatcctcattt

SEQ ID NO: 2769 - DNA, 65 bp, Homo sapiens
  source 1..65: mol_type = unassigned DNA
aaatgaggattgagatcttcatcaaagccaaataagtgcttccctctggagttcagcaagagcca

SEQ ID NO: 2770 - RNA, 30 nt, Homo sapiens
  source 1..30: mol_type = unassigned RNA
tgtctatgatggaattctgaggaaagcata

SEQ ID NO: 2771 - DNA, 30 bp, Homo sapiens
  source 1..30: mol_type = unassigned DNA
tgtctatgatggaattctgaggaaagcata

SEQ ID NO: 2772 - DNA, 30 bp, Homo sapiens
  source 1..30: mol_type = unassigned DNA
tatgctttcctcagaattccatcatagaca

SEQ ID NO: 2773 - RNA, 38 nt, Homo sapiens
  source 1..38: mol_type = unassigned RNA
tttttttgcccttcagactgatgtagaaattgagagga

SEQ ID NO: 2774 - DNA, 38 bp, Homo sapiens
  source 1..38: mol_type = unassigned DNA
tttttttgcccttcagactgatgtagaaattgagagga

SEQ ID NO: 2775 - DNA, 38 bp, Homo sapiens
  source 1..38: mol_type = unassigned DNA
tcctctcaatttctacatcagtctgaagggcaaaaaaa

SEQ ID NO: 2776 - RNA, 32 nt, Homo sapiens
  source 1..32: mol_type = unassigned RNA
acttggcctgagccgtgctcctggcttccctg

SEQ ID NO: 2777 - DNA, 32 bp, Homo sapiens
  source 1..32: mol_type = unassigned DNA
acttggcctgagccgtgctcctggcttccctg

SEQ ID NO: 2778 - DNA, 32 bp, Homo sapiens
  source 1..32: mol_type = unassigned DNA
cagggaagccaggagcacggctcaggccaagt

SEQ ID NO: 2779 - RNA, 57 nt, Homo sapiens
  source 1..57: mol_type = unassigned RNA
ttgaaaggctgagggtgaaggagcgacagatctgaaaatagccggagctgaggggcc

SEQ ID NO: 2780 - DNA, 57 bp, Homo sapiens
  source 1..57: mol_type = unassigned DNA
ttgaaaggctgagggtgaaggagcgacagatctgaaaatagccggagctgaggggcc

SEQ ID NO: 2781 - DNA, 57 bp, Homo sapiens
  source 1..57: mol_type = unassigned DNA
ggcccctcagctccggctattttcagatctgtcgctccttcaccctcagcctttcaa

SEQ ID NO: 2782 - RNA, 75 nt, Homo sapiens
  source 1..75: mol_type = unassigned RNA
acaacataatgaggatgtactctgattcacagatgatgaattctttaaaaatgtgtaaggaaatatgaacattgc

SEQ ID NO: 2783 - DNA, 75 bp, Homo sapiens
  source 1..75: mol_type = unassigned DNA
acaacataatgaggatgtactctgattcacagatgatgaattctttaaaaatgtgtaaggaaatatgaacattgc

SEQ ID NO: 2784 - DNA, 75 bp, Homo sapiens
  source 1..75: mol_type = unassigned DNA
gcaatgttcatatttccttacacatttttaaagaattcatcatctgtgaatcagagtacatcctcattatgttgt

SEQ ID NO: 2785 - RNA, 33 nt, Homo sapiens
  source 1..33: mol_type = unassigned RNA
atcactggtgaggatctggagcaatggacaccc

SEQ ID NO: 2786 - DNA, 33 bp, Homo sapiens
  source 1..33: mol_type = unassigned DNA
atcactggtgaggatctggagcaatggacaccc

SEQ ID NO: 2787 - DNA, 33 bp, Homo sapiens
  source 1..33: mol_type = unassigned DNA
gggtgtccattgctccagatcctcaccagtgat

SEQ ID NO: 2788 - RNA, 46 nt, Homo sapiens
  source 1..46: mol_type = unassigned RNA
catactttttcttctttcctactttttggcattctccaggtttatt

SEQ ID NO: 2789 - DNA, 46 bp, Homo sapiens
  source 1..46: mol_type = unassigned DNA
catactttttcttctttcctactttttggcattctccaggtttatt

SEQ ID NO: 2790 - DNA, 46 bp, Homo sapiens
  source 1..46: mol_type = unassigned DNA
aataaacctggagaatgccaaaaagtaggaaagaagaaaaagtatg

SEQ ID NO: 2791 - RNA, 30 nt, Homo sapiens
  source 1..30: mol_type = unassigned RNA
actccgtaacagattctggaccaaccttca

SEQ ID NO: 2792 - DNA, 30 bp, Homo sapiens
  source 1..30: mol_type = unassigned DNA
actccgtaacagattctggaccaaccttca

SEQ ID NO: 2793 - DNA, 30 bp, Homo sapiens
  source 1..30: mol_type = unassigned DNA
tgaaggttggtccagaatctgttacggagt

SEQ ID NO: 2794 - RNA, 31 nt, Homo sapiens
  source 1..31: mol_type = unassigned RNA
ttcacgttcactctgtctctcccactatctc

SEQ ID NO: 2795 - DNA, 31 bp, Homo sapiens
  source 1..31: mol_type = unassigned DNA
ttcacgttcactctgtctctcccactatctc

SEQ ID NO: 2796 - DNA, 31 bp, Homo sapiens
  source 1..31: mol_type = unassigned DNA
gagatagtgggagagacagagtgaacgtgaa

SEQ ID NO: 2797 - RNA, 36 nt, Homo sapiens
  source 1..36: mol_type = unassigned RNA
ctatacaaccctttcctcctcaaggaccaaaataag

SEQ ID NO: 2798 - DNA, 36 bp, Homo sapiens
  source 1..36: mol_type = unassigned DNA
ctatacaaccctttcctcctcaaggaccaaaataag

SEQ ID NO: 2799 - DNA, 36 bp, Homo sapiens
  source 1..36: mol_type = unassigned DNA
cttattttggtccttgaggaggaaagggttgtatag

SEQ ID NO: 2800 - RNA, 29 nt, Homo sapiens
  source 1..29: mol_type = unassigned RNA
gcttacatgatgatggacgctgataagtt

SEQ ID NO: 2801 - DNA, 29 bp, Homo sapiens
  source 1..29: mol_type = unassigned DNA
gcttacatgatgatggacgctgataagtt

SEQ ID NO: 2802 - DNA, 29 bp, Homo sapiens
  source 1..29: mol_type = unassigned DNA
aacttatcagcgtccatcatcatgtaagc

SEQ ID NO: 2803 - RNA, 32 nt, Homo sapiens
  source 1..32: mol_type = unassigned RNA
accagactgtttcagactccaagccagatttg

SEQ ID NO: 2804 - DNA, 32 bp, Homo sapiens
  source 1..32: mol_type = unassigned DNA
accagactgtttcagactccaagccagatttg

SEQ ID NO: 2805 - DNA, 32 bp, Homo sapiens
  source 1..32: mol_type = unassigned DNA
caaatctggcttggagtctgaaacagtctggt

SEQ ID NO: 2806 - RNA, 72 nt, Homo sapiens
  source 1..72: mol_type = unassigned RNA
cccctctcacgctttcccctgagtccccaaagtccattgtatcactgacaccttttcgtcctcatagcttag

SEQ ID NO: 2807 - DNA, 72 bp, Homo sapiens
  source 1..72: mol_type = unassigned DNA
cccctctcacgctttcccctgagtccccaaagtccattgtatcactgacaccttttcgtcctcatagcttag

SEQ ID NO: 2808 - DNA, 72 bp, Homo sapiens
  source 1..72: mol_type = unassigned DNA
ctaagctatgaggacgaaaaggtgtcagtgatacaatggactttggggactcaggggaaagcgtgagagggg

SEQ ID NO: 2809 - RNA, 33 nt, Homo sapiens
  source 1..33: mol_type = unassigned RNA
agaagattgcagagattaccatagccaaactga

SEQ ID NO: 2810 - DNA, 33 bp, Homo sapiens
  source 1..33: mol_type = unassigned DNA
agaagattgcagagattaccatagccaaactga

SEQ ID NO: 2811 - DNA, 33 bp, Homo sapiens
  source 1..33: mol_type = unassigned DNA
tcagtttggctatggtaatctctgcaatcttct

SEQ ID NO: 2812 - RNA, 31 nt, Homo sapiens
  source 1..31: mol_type = unassigned RNA
ggctttagctgtgggacgtctggcagacaag

SEQ ID NO: 2813 - DNA, 31 bp, Homo sapiens
  source 1..31: mol_type = unassigned DNA
ggctttagctgtgggacgtctggcagacaag

SEQ ID NO: 2814 - DNA, 31 bp, Homo sapiens
  source 1..31: mol_type = unassigned DNA
cttgtctgccagacgtcccacagctaaagcc

SEQ ID NO: 2815 - RNA, 56 nt, Homo sapiens
  source 1..56: mol_type = unassigned RNA
gatgaatctagattcaaacctaagtcgtctggctctagagggaaacactgtaaaca

SEQ ID NO: 2816 - DNA, 56 bp, Homo sapiens
  source 1..56: mol_type = unassigned DNA
gatgaatctagattcaaacctaagtcgtctggctctagagggaaacactgtaaaca

SEQ ID NO: 2817 - DNA, 56 bp, Homo sapiens
  source 1..56: mol_type = unassigned DNA
tgtttacagtgtttccctctagagccagacgacttaggtttgaatctagattcatc

SEQ ID NO: 2818 - RNA, 66 nt, Homo sapiens
  source 1..66: mol_type = unassigned RNA
tgagctgtgtttaactagctgtattctagctttgttccaggaaatattgccttgtttatgactgtt

SEQ ID NO: 2819 - DNA, 66 bp, Homo sapiens
  source 1..66: mol_type = unassigned DNA
tgagctgtgtttaactagctgtattctagctttgttccaggaaatattgccttgtttatgactgtt

SEQ ID NO: 2820 - DNA, 66 bp, Homo sapiens
  source 1..66: mol_type = unassigned DNA
aacagtcataaacaaggcaatatttcctggaacaaagctagaatacagctagttaaacacagctca

SEQ ID NO: 2821 - RNA, 50 nt, Homo sapiens
  source 1..50: mol_type = unassigned RNA
tgagattgaagttccttgggaatgagagtagagaattttggaaataggat

SEQ ID NO: 2822 - DNA, 50 bp, Homo sapiens
  source 1..50: mol_type = unassigned DNA
tgagattgaagttccttgggaatgagagtagagaattttggaaataggat

SEQ ID NO: 2823 - DNA, 50 bp, Homo sapiens
  source 1..50: mol_type = unassigned DNA
atcctatttccaaaattctctactctcattcccaaggaacttcaatctca

SEQ ID NO: 2824 - RNA, 23 nt, Homo sapiens
  source 1..23: mol_type = unassigned RNA
aggaaactggtagttttcactgg

SEQ ID NO: 2825 - DNA, 23 bp, Homo sapiens
  source 1..23: mol_type = unassigned DNA
aggaaactggtagttttcactgg

SEQ ID NO: 2826 - DNA, 23 bp, Homo sapiens
  source 1..23: mol_type = unassigned DNA
ccagtgaaaactaccagtttcct

SEQ ID NO: 2827 - RNA, 24 nt, Homo sapiens
  source 1..24: mol_type = unassigned RNA
gattggtgcccacattcccaccat

SEQ ID NO: 2828 - DNA, 24 bp, Homo sapiens
  source 1..24: mol_type = unassigned DNA
gattggtgcccacattcccaccat

SEQ ID NO: 2829 - DNA, 24 bp, Homo sapiens
  source 1..24: mol_type = unassigned DNA
atggtgggaatgtgggcaccaatc

SEQ ID NO: 2830 - RNA, 33 nt, Homo sapiens
  source 1..33: mol_type = unassigned RNA
tggatgttcatgatgtctggttctgaaacatca

SEQ ID NO: 2831 - DNA, 33 bp, Homo sapiens
  source 1..33: mol_type = unassigned DNA
tggatgttcatgatgtctggttctgaaacatca

SEQ ID NO: 2832 - DNA, 33 bp, Homo sapiens
  source 1..33: mol_type = unassigned DNA
tgatgtttcagaaccagacatcatgaacatcca

SEQ ID NO: 2833 - RNA, 24 nt, Homo sapiens
  source 1..24: mol_type = unassigned RNA
ttttgctatgttagaacttacctg

SEQ ID NO: 2834 - DNA, 24 bp, Homo sapiens
  source 1..24: mol_type = unassigned DNA
ttttgctatgttagaacttacctg

SEQ ID NO: 2835 - DNA, 24 bp, Homo sapiens
  source 1..24: mol_type = unassigned DNA
caggtaagttctaacatagcaaaa

SEQ ID NO: 2836 - RNA, 52 nt, Homo sapiens
  source 1..52: mol_type = unassigned RNA
gtagtttataagcacttaaatttttcagaccactggttaattcacatcagca

SEQ ID NO: 2837 - DNA, 52 bp, Homo sapiens
  source 1..52: mol_type = unassigned DNA
gtagtttataagcacttaaatttttcagaccactggttaattcacatcagca

SEQ ID NO: 2838 - DNA, 52 bp, Homo sapiens
  source 1..52: mol_type = unassigned DNA
tgctgatgtgaattaaccagtggtctgaaaaatttaagtgcttataaactac

SEQ ID NO: 2839 - RNA, 26 nt, Homo sapiens
  source 1..26: mol_type = unassigned RNA
tttatttcactgttagaattaagtaa

SEQ ID NO: 2840 - DNA, 26 bp, Homo sapiens
  source 1..26: mol_type = unassigned DNA
tttatttcactgttagaattaagtaa

SEQ ID NO: 2841 - DNA, 26 bp, Homo sapiens
  source 1..26: mol_type = unassigned DNA
ttacttaattctaacagtgaaataaa

SEQ ID NO: 2842 - RNA, 30 nt, Homo sapiens
  source 1..30: mol_type = unassigned RNA
tagaagtggatcggttggaagaactgaaaa

SEQ ID NO: 2843 - DNA, 30 bp, Homo sapiens
  source 1..30: mol_type = unassigned DNA
tagaagtggatcggttggaagaactgaaaa

SEQ ID NO: 2844 - DNA, 30 bp, Homo sapiens
  source 1..30: mol_type = unassigned DNA
ttttcagttcttccaaccgatccacttcta

SEQ ID NO: 2845 - RNA, 24 nt, Homo sapiens
  source 1..24: mol_type = unassigned RNA
ttcactattattttgtgtggttat

SEQ ID NO: 2846 - DNA, 24 bp, Homo sapiens
  source 1..24: mol_type = unassigned DNA
ttcactattattttgtgtggttat

SEQ ID NO: 2847 - DNA, 24 bp, Homo sapiens
  source 1..24: mol_type = unassigned DNA
ataaccacacaaaataatagtgaa

SEQ ID NO: 2848 - RNA, 29 nt, Homo sapiens
  source 1..29: mol_type = unassigned RNA
acagaatttgatgtggctgtggatgagct

SEQ ID NO: 2849 - DNA, 29 bp, Homo sapiens
  source 1..29: mol_type = unassigned DNA
acagaatttgatgtggctgtggatgagct

SEQ ID NO: 2850 - DNA, 29 bp, Homo sapiens
  source 1..29: mol_type = unassigned DNA
agctcatccacagccacatcaaattctgt

SEQ ID NO: 2851 - RNA, 40 nt, Homo sapiens
  source 1..40: mol_type = unassigned RNA
ggcctcagtgcactcccaaatatgtcttcttggattctgc

SEQ ID NO: 2852 - DNA, 40 bp, Homo sapiens
  source 1..40: mol_type = unassigned DNA
ggcctcagtgcactcccaaatatgtcttcttggattctgc

SEQ ID NO: 2853 - DNA, 40 bp, Homo sapiens
  source 1..40: mol_type = unassigned DNA
gcagaatccaagaagacatatttgggagtgcactgaggcc

SEQ ID NO: 2854 - RNA, 33 nt, Homo sapiens
  source 1..33: mol_type = unassigned RNA
gcccctctggaccccagggccccggcggccctc

SEQ ID NO: 2855 - DNA, 33 bp, Homo sapiens
  source 1..33: mol_type = unassigned DNA
gcccctctggaccccagggccccggcggccctc

SEQ ID NO: 2856 - DNA, 33 bp, Homo sapiens
  source 1..33: mol_type = unassigned DNA
gagggccgccggggccctggggtccagaggggc

SEQ ID NO: 2857 - RNA, 33 nt, Homo sapiens
  source 1..33: mol_type = unassigned RNA
atttatgattgtgtcactggttaaattcacttt

SEQ ID NO: 2858 - DNA, 33 bp, Homo sapiens
  source 1..33: mol_type = unassigned DNA
atttatgattgtgtcactggttaaattcacttt

SEQ ID NO: 2859 - DNA, 33 bp, Homo sapiens
  source 1..33: mol_type = unassigned DNA
aaagtgaatttaaccagtgacacaatcataaat

SEQ ID NO: 2860 - RNA, 28 nt, Homo sapiens
  source 1..28: mol_type = unassigned RNA
ggagaccgtgaggctctggcctgcagct

SEQ ID NO: 2861 - DNA, 28 bp, Homo sapiens
  source 1..28: mol_type = unassigned DNA
ggagaccgtgaggctctggcctgcagct

SEQ ID NO: 2862 - DNA, 28 bp, Homo sapiens
  source 1..28: mol_type = unassigned DNA
agctgcaggccagagcctcacggtctcc

SEQ ID NO: 2863 - RNA, 23 nt, Homo sapiens
  source 1..23: mol_type = unassigned RNA
ttctctgttttctagctgtctgt

SEQ ID NO: 2864 - DNA, 23 bp, Homo sapiens
  source 1..23: mol_type = unassigned DNA
ttctctgttttctagctgtctgt

SEQ ID NO: 2865 - DNA, 23 bp, Homo sapiens
  source 1..23: mol_type = unassigned DNA
acagacagctagaaaacagagaa

SEQ ID NO: 2866 - RNA, 31 nt, Homo sapiens
  source 1..31: mol_type = unassigned RNA
gacagcatggtcagaggacagtgacggggaa

SEQ ID NO: 2867 - DNA, 31 bp, Homo sapiens
  source 1..31: mol_type = unassigned DNA
gacagcatggtcagaggacagtgacggggaa

SEQ ID NO: 2868 - DNA, 31 bp, Homo sapiens
  source 1..31: mol_type = unassigned DNA
ttccccgtcactgtcctctgaccatgctgtc

SEQ ID NO: 2869 - RNA, 47 nt, Homo sapiens
  source 1..47: mol_type = unassigned RNA
gtcttgctatgtttcccaggccggtcaatcatcactcattttgttgc

SEQ ID NO: 2870 - DNA, 47 bp, Homo sapiens
  source 1..47: mol_type = unassigned DNA
gtcttgctatgtttcccaggccggtcaatcatcactcattttgttgc

SEQ ID NO: 2871 - DNA, 47 bp, Homo sapiens
  source 1..47: mol_type = unassigned DNA
gcaacaaaatgagtgatgattgaccggcctgggaaacatagcaagac

SEQ ID NO: 2872 - RNA, 29 nt, Homo sapiens
  source 1..29: mol_type = unassigned RNA
caggatgccagcggggacttcggagccat

SEQ ID NO: 2873 - DNA, 29 bp, Homo sapiens
  source 1..29: mol_type = unassigned DNA
caggatgccagcggggacttcggagccat

SEQ ID NO: 2874 - DNA, 29 bp, Homo sapiens
  source 1..29: mol_type = unassigned DNA
atggctccgaagtccccgctggcatcctg

SEQ ID NO: 2875 - RNA, 35 nt, Homo sapiens
  source 1..35: mol_type = unassigned RNA
catgcactaccatctccacccagcttaagaaagaa

SEQ ID NO: 2876 - DNA, 35 bp, Homo sapiens
  source 1..35: mol_type = unassigned DNA
catgcactaccatctccacccagcttaagaaagaa

SEQ ID NO: 2877 - DNA, 35 bp, Homo sapiens
  source 1..35: mol_type = unassigned DNA
ttctttcttaagctgggtggagatggtagtgcatg

SEQ ID NO: 2878 - RNA, 27 nt, Homo sapiens
  source 1..27: mol_type = unassigned RNA
tggatactgtcactgtggagttcatct

SEQ ID NO: 2879 - DNA, 27 bp, Homo sapiens
  source 1..27: mol_type = unassigned DNA
tggatactgtcactgtggagttcatct

SEQ ID NO: 2880 - DNA, 27 bp, Homo sapiens
  source 1..27: mol_type = unassigned DNA
agatgaactccacagtgacagtatcca

SEQ ID NO: 2881 - RNA, 32 nt, Homo sapiens
  source 1..32: mol_type = unassigned RNA
agataggatcaccagataccaggttgttaatc

SEQ ID NO: 2882 - DNA, 32 bp, Homo sapiens
  source 1..32: mol_type = unassigned DNA
agataggatcaccagataccaggttgttaatc

SEQ ID NO: 2883 - DNA, 32 bp, Homo sapiens
  source 1..32: mol_type = unassigned DNA
gattaacaacctggtatctggtgatcctatct

SEQ ID NO: 2884 - RNA, 31 nt, Homo sapiens
  source 1..31: mol_type = unassigned RNA
ctttttggccgaactggtggctattccagta

SEQ ID NO: 2885 - DNA, 31 bp, Homo sapiens
  source 1..31: mol_type = unassigned DNA
ctttttggccgaactggtggctattccagta

SEQ ID NO: 2886 - DNA, 31 bp, Homo sapiens
  source 1..31: mol_type = unassigned DNA
tactggaatagccaccagttcggccaaaaag

SEQ ID NO: 2887 - RNA, 43 nt, Homo sapiens
  source 1..43: mol_type = unassigned RNA
gataggacactatgcagccttgttgttagctagctttatgagt

SEQ ID NO: 2888 - DNA, 43 bp, Homo sapiens
  source 1..43: mol_type = unassigned DNA
gataggacactatgcagccttgttgttagctagctttatgagt

SEQ ID NO: 2889 - DNA, 43 bp, Homo sapiens
  source 1..43: mol_type = unassigned DNA
actcataaagctagctaacaacaaggctgcatagtgtcctatc

SEQ ID NO: 2890 - RNA, 132 nt, Homo sapiens
  source 1..132: mol_type = unassigned RNA
gctaagttgggctgggttcacagaggaggctctgctgatctgacgcaggttcatttcctcttggctagggctccctcctgcgtctgtggccagctgggggctaactgactgtgagctggagcagctagtttt

SEQ ID NO: 2891 - DNA, 132 bp, Homo sapiens
  source 1..132: mol_type = unassigned DNA
gctaagttgggctgggttcacagaggaggctctgctgatctgacgcaggttcatttcctcttggctagggctccctcctgcgtctgtggccagctgggggctaactgactgtgagctggagcagctagtttt

SEQ ID NO: 2892 - DNA, 132 bp, Homo sapiens
  source 1..132: mol_type = unassigned DNA
aaaactagctgctccagctcacagtcagttagcccccagctggccacagacgcaggagggagccctagccaagaggaaatgaacctgcgtcagatcagcagagcctcctctgtgaacccagcccaacttagc

SEQ ID NO: 2893 - RNA, 56 nt, Homo sapiens
  source 1..56: mol_type = unassigned RNA
acaccaagctgtgaggaggctgggtggtgtggtctttcttccaggccgtcatgtcc

SEQ ID NO: 2894 - DNA, 56 bp, Homo sapiens
  source 1..56: mol_type = unassigned DNA
acaccaagctgtgaggaggctgggtggtgtggtctttcttccaggccgtcatgtcc

SEQ ID NO: 2895 - DNA, 56 bp, Homo sapiens
  source 1..56: mol_type = unassigned DNA
ggacatgacggcctggaagaaagaccacaccacccagcctcctcacagcttggtgt

SEQ ID NO: 2896 - RNA, 35 nt, Homo sapiens
  source 1..35: mol_type = unassigned RNA
cctggtggctgttccaggatgttctcgtgaccagg

SEQ ID NO: 2897 - DNA, 35 bp, Homo sapiens
  source 1..35: mol_type = unassigned DNA
cctggtggctgttccaggatgttctcgtgaccagg

SEQ ID NO: 2898 - DNA, 35 bp, Homo sapiens
  source 1..35: mol_type = unassigned DNA
cctggtcacgagaacatcctggaacagccaccagg

SEQ ID NO: 2899 - RNA, 42 nt, Homo sapiens
  source 1..42: mol_type = unassigned RNA
ctttgtttcctcctcccatagacctggcagtgcttcacctga

SEQ ID NO: 2900 - DNA, 42 bp, Homo sapiens
  source 1..42: mol_type = unassigned DNA
ctttgtttcctcctcccatagacctggcagtgcttcacctga

SEQ ID NO: 2901 - DNA, 42 bp, Homo sapiens
  source 1..42: mol_type = unassigned DNA
tcaggtgaagcactgccaggtctatgggaggaggaaacaaag

SEQ ID NO: 2902 - RNA, 69 nt, Homo sapiens
  source 1..69: mol_type = unassigned RNA
tacaaaaagctgtctctgtggagccatggaaagagtgtagaccaggaggcaggaggggtgactctggcc

SEQ ID NO: 2903 - DNA, 69 bp, Homo sapiens
  source 1..69: mol_type = unassigned DNA
tacaaaaagctgtctctgtggagccatggaaagagtgtagaccaggaggcaggaggggtgactctggcc

SEQ ID NO: 2904 - DNA, 69 bp, Homo sapiens
  source 1..69: mol_type = unassigned DNA
ggccagagtcacccctcctgcctcctggtctacactctttccatggctccacagagacagctttttgta

SEQ ID NO: 2905 - RNA, 39 nt, Homo sapiens
  source 1..39: mol_type = unassigned RNA
tattcaggccaggaatccaccagcacctccatgttgaag

SEQ ID NO: 2906 - DNA, 39 bp, Homo sapiens
  source 1..39: mol_type = unassigned DNA
tattcaggccaggaatccaccagcacctccatgttgaag

SEQ ID NO: 2907 - DNA, 39 bp, Homo sapiens
  source 1..39: mol_type = unassigned DNA
cttcaacatggaggtgctggtggattcctggcctgaata

SEQ ID NO: 2908 - RNA, 45 nt, Homo sapiens
  source 1..45: mol_type = unassigned RNA
taaataagacactgttgcacaatggactactatgcagccaaaaat

SEQ ID NO: 2909 - DNA, 45 bp, Homo sapiens
  source 1..45: mol_type = unassigned DNA
taaataagacactgttgcacaatggactactatgcagccaaaaat

SEQ ID NO: 2910 - DNA, 45 bp, Homo sapiens
  source 1..45: mol_type = unassigned DNA
atttttggctgcatagtagtccattgtgcaacagtgtcttattta

SEQ ID NO: 2911 - RNA, 88 nt, Homo sapiens
  source 1..88: mol_type = unassigned RNA
cctggcctcaagcaatcctcccacctcggcctcccaaagtgctgggattgcaggcacaaggcagcacacgtggcctaaaggactgaga

SEQ ID NO: 2912 - DNA, 88 bp, Homo sapiens
  source 1..88: mol_type = unassigned DNA
cctggcctcaagcaatcctcccacctcggcctcccaaagtgctgggattgcaggcacaaggcagcacacgtggcctaaaggactgaga

SEQ ID NO: 2913 - DNA, 88 bp, Homo sapiens
  source 1..88: mol_type = unassigned DNA
tctcagtcctttaggccacgtgtgctgccttgtgcctgcaatcccagcactttgggaggccgaggtgggaggattgcttgaggccagg

SEQ ID NO: 2914 - RNA, 34 nt, Homo sapiens
  source 1..34: mol_type = unassigned RNA
tactcgatggagacaaaggtaacactgcagaatg

SEQ ID NO: 2915 - DNA, 34 bp, Homo sapiens
  source 1..34: mol_type = unassigned DNA
tactcgatggagacaaaggtaacactgcagaatg

SEQ ID NO: 2916 - DNA, 34 bp, Homo sapiens
  source 1..34: mol_type = unassigned DNA
cattctgcagtgttacctttgtctccatcgagta

SEQ ID NO: 2917 - RNA, 69 nt, Homo sapiens
  source 1..69: mol_type = unassigned RNA
atatagtgtattgattagtggtaaagtctggaaaggcctctggatttggactgagccatgctaacaact

SEQ ID NO: 2918 - DNA, 69 bp, Homo sapiens
  source 1..69: mol_type = unassigned DNA
atatagtgtattgattagtggtaaagtctggaaaggcctctggatttggactgagccatgctaacaact

SEQ ID NO: 2919 - DNA, 69 bp, Homo sapiens
  source 1..69: mol_type = unassigned DNA
agttgttagcatggctcagtccaaatccagaggcctttccagactttaccactaatcaatacactatat

SEQ ID NO: 2920 - RNA, 28 nt, Homo sapiens
  source 1..28: mol_type = unassigned RNA
tctttgtttatatggctgtgtgtgtgac

SEQ ID NO: 2921 - DNA, 28 bp, Homo sapiens
  source 1..28: mol_type = unassigned DNA
tctttgtttatatggctgtgtgtgtgac

SEQ ID NO: 2922 - DNA, 28 bp, Homo sapiens
  source 1..28: mol_type = unassigned DNA
gtcacacacacagccatataaacaaaga

SEQ ID NO: 2923 - RNA, 27 nt, Homo sapiens
  source 1..27: mol_type = unassigned RNA
attgatgtctactgtgtgccaggtatt

SEQ ID NO: 2924 - DNA, 27 bp, Homo sapiens
  source 1..27: mol_type = unassigned DNA
attgatgtctactgtgtgccaggtatt

SEQ ID NO: 2925 - DNA, 27 bp, Homo sapiens
  source 1..27: mol_type = unassigned DNA
aatacctggcacacagtagacatcaat

SEQ ID NO: 2926 - RNA, 24 nt, Homo sapiens
  source 1..24: mol_type = unassigned RNA
cagggaactggtataactcactca

SEQ ID NO: 2927 - DNA, 24 bp, Homo sapiens
  source 1..24: mol_type = unassigned DNA
cagggaactggtataactcactca

SEQ ID NO: 2928 - DNA, 24 bp, Homo sapiens
  source 1..24: mol_type = unassigned DNA
tgagtgagttataccagttccctg

SEQ ID NO: 2929 - RNA, 44 nt, Homo sapiens
  source 1..44: mol_type = unassigned RNA
agatggatatgtgggtgctgacttgcaaggatcaaaagctttta

SEQ ID NO: 2930 - DNA, 44 bp, Homo sapiens
  source 1..44: mol_type = unassigned DNA
agatggatatgtgggtgctgacttgcaaggatcaaaagctttta

SEQ ID NO: 2931 - DNA, 44 bp, Homo sapiens
  source 1..44: mol_type = unassigned DNA
taaaagcttttgatccttgcaagtcagcacccacatatccatct

SEQ ID NO: 2932 - RNA, 54 nt, Homo sapiens
  source 1..54: mol_type = unassigned RNA
atccatgccctggacttcgggccccccgttaggcaccctcggtccaccggtttc

SEQ ID NO: 2933 - DNA, 54 bp, Homo sapiens
  source 1..54: mol_type = unassigned DNA
atccatgccctggacttcgggccccccgttaggcaccctcggtccaccggtttc

SEQ ID NO: 2934 - DNA, 54 bp, Homo sapiens
  source 1..54: mol_type = unassigned DNA
gaaaccggtggaccgagggtgcctaacggggggcccgaagtccagggcatggat

SEQ ID NO: 2935 - RNA, 23 nt, Homo sapiens
  source 1..23: mol_type = unassigned RNA
agaggtcgactttgtgtggttaa

SEQ ID NO: 2936 - DNA, 23 bp, Homo sapiens
  source 1..23: mol_type = unassigned DNA
agaggtcgactttgtgtggttaa

SEQ ID NO: 2937 - DNA, 23 bp, Homo sapiens
  source 1..23: mol_type = unassigned DNA
ttaaccacacaaagtcgacctct

SEQ ID NO: 2938 - RNA, 75 nt, Homo sapiens
  source 1..75: mol_type = unassigned RNA
tgctacttctggataatgatggaaatccaggctctgaacatggtctcctctgatactgtggtagggtggctatta

SEQ ID NO: 2939 - DNA, 75 bp, Homo sapiens
  source 1..75: mol_type = unassigned DNA
tgctacttctggataatgatggaaatccaggctctgaacatggtctcctctgatactgtggtagggtggctatta

SEQ ID NO: 2940 - DNA, 75 bp, Homo sapiens
  source 1..75: mol_type = unassigned DNA
taatagccaccctaccacagtatcagaggagaccatgttcagagcctggatttccatcattatccagaagtagca

SEQ ID NO: 2941 - RNA, 29 nt, Homo sapiens
  source 1..29: mol_type = unassigned RNA
ggagctgttgtgaaatggactgagttctt

SEQ ID NO: 2942 - DNA, 29 bp, Homo sapiens
  source 1..29: mol_type = unassigned DNA
ggagctgttgtgaaatggactgagttctt

SEQ ID NO: 2943 - DNA, 29 bp, Homo sapiens
  source 1..29: mol_type = unassigned DNA
aagaactcagtccatttcacaacagctcc

SEQ ID NO: 2944 - RNA, 35 nt, Homo sapiens
  source 1..35: mol_type = unassigned RNA
tagcttctcatatttctgttgagaaatctgatatt

SEQ ID NO: 2945 - DNA, 35 bp, Homo sapiens
  source 1..35: mol_type = unassigned DNA
tagcttctcatatttctgttgagaaatctgatatt

SEQ ID NO: 2946 - DNA, 35 bp, Homo sapiens
  source 1..35: mol_type = unassigned DNA
aatatcagatttctcaacagaaatatgagaagcta

SEQ ID NO: 2947 - RNA, 27 nt, Homo sapiens
  source 1..27: mol_type = unassigned RNA
ctataagtagtggagctctggtgaact

SEQ ID NO: 2948 - DNA, 27 bp, Homo sapiens
  source 1..27: mol_type = unassigned DNA
ctataagtagtggagctctggtgaact

SEQ ID NO: 2949 - DNA, 27 bp, Homo sapiens
  source 1..27: mol_type = unassigned DNA
agttcaccagagctccactacttatag

SEQ ID NO: 2950 - RNA, 29 nt, Homo sapiens
  source 1..29: mol_type = unassigned RNA
ttgtggttcatttcctcttggatgttacc

SEQ ID NO: 2951 - DNA, 29 bp, Homo sapiens
  source 1..29: mol_type = unassigned DNA
ttgtggttcatttcctcttggatgttacc

SEQ ID NO: 2952 - DNA, 29 bp, Homo sapiens
  source 1..29: mol_type = unassigned DNA
ggtaacatccaagaggaaatgaaccacaa

SEQ ID NO: 2953 - RNA, 42 nt, Homo sapiens
  source 1..42: mol_type = unassigned RNA
gatgcgacttgatttgggacgtatccgcctgagttggcataa

SEQ ID NO: 2954 - DNA, 42 bp, Homo sapiens
  source 1..42: mol_type = unassigned DNA
gatgcgacttgatttgggacgtatccgcctgagttggcataa

SEQ ID NO: 2955 - DNA, 42 bp, Homo sapiens
  source 1..42: mol_type = unassigned DNA
ttatgccaactcaggcggatacgtcccaaatcaagtcgcatc

SEQ ID NO: 2956 - RNA, 35 nt, Homo sapiens
  source 1..35: mol_type = unassigned RNA
aaggcaggtaggaacctgtggaaggagaaatcaaa

SEQ ID NO: 2957 - DNA, 35 bp, Homo sapiens
  source 1..35: mol_type = unassigned DNA
aaggcaggtaggaacctgtggaaggagaaatcaaa

SEQ ID NO: 2958 - DNA, 35 bp, Homo sapiens
  source 1..35: mol_type = unassigned DNA
tttgatttctccttccacaggttcctacctgcctt

SEQ ID NO: 2959 - RNA, 31 nt, Homo sapiens
  source 1..31: mol_type = unassigned RNA
cccccttatcctcccctggctgcagaggtga

SEQ ID NO: 2960 - DNA, 31 bp, Homo sapiens
  source 1..31: mol_type = unassigned DNA
cccccttatcctcccctggctgcagaggtga

SEQ ID NO: 2961 - DNA, 31 bp, Homo sapiens
  source 1..31: mol_type = unassigned DNA
tcacctctgcagccaggggaggataaggggg

SEQ ID NO: 2962 - RNA, 67 nt, Homo sapiens
  source 1..67: mol_type = unassigned RNA
aacggcacagaacactgtagaattggagcatttgcagagattttataggaccactagactttgttta

SEQ ID NO: 2963 - DNA, 67 bp, Homo sapiens
  source 1..67: mol_type = unassigned DNA
aacggcacagaacactgtagaattggagcatttgcagagattttataggaccactagactttgttta

SEQ ID NO: 2964 - DNA, 67 bp, Homo sapiens
  source 1..67: mol_type = unassigned DNA
taaacaaagtctagtggtcctataaaatctctgcaaatgctccaattctacagtgttctgtgccgtt

SEQ ID NO: 2965 - RNA, 30 nt, Homo sapiens
  source 1..30: mol_type = unassigned RNA
aatgagtctatgatgaacactgaggcagca

SEQ ID NO: 2966 - DNA, 30 bp, Homo sapiens
  source 1..30: mol_type = unassigned DNA
aatgagtctatgatgaacactgaggcagca

SEQ ID NO: 2967 - DNA, 30 bp, Homo sapiens
  source 1..30: mol_type = unassigned DNA
tgctgcctcagtgttcatcatagactcatt

SEQ ID NO: 2968 - RNA, 50 nt, Homo sapiens
  source 1..50: mol_type = unassigned RNA
ctactgagtggccatctagctgtctgccaaattctgtccacagcactggt

SEQ ID NO: 2969 - DNA, 50 bp, Homo sapiens
  source 1..50: mol_type = unassigned DNA
ctactgagtggccatctagctgtctgccaaattctgtccacagcactggt

SEQ ID NO: 2970 - DNA, 50 bp, Homo sapiens
  source 1..50: mol_type = unassigned DNA
accagtgctgtggacagaatttggcagacagctagatggccactcagtag

SEQ ID NO: 2971 - RNA, 53 nt, Homo sapiens
  source 1..53: mol_type = unassigned RNA
caggggggagccaaaagggtcatcatctctgccccctctgctgatgccccaat

SEQ ID NO: 2972 - DNA, 53 bp, Homo sapiens
  source 1..53: mol_type = unassigned DNA
caggggggagccaaaagggtcatcatctctgccccctctgctgatgccccaat

SEQ ID NO: 2973 - DNA, 53 bp, Homo sapiens
  source 1..53: mol_type = unassigned DNA
attggggcatcagcagagggggcagagatgatgacccttttggctcccccctg

SEQ ID NO: 2974 - RNA, 50 nt, Homo sapiens
  source 1..50: mol_type = unassigned RNA
caaattgtgatgataaaggctctgaaggaagtaaacagcatacattaata

SEQ ID NO: 2975 - DNA, 50 bp, Homo sapiens
  source 1..50: mol_type = unassigned DNA
caaattgtgatgataaaggctctgaaggaagtaaacagcatacattaata

SEQ ID NO: 2976 - DNA, 50 bp, Homo sapiens
  source 1..50: mol_type = unassigned DNA
tattaatgtatgctgtttacttccttcagagcctttatcatcacaatttg

SEQ ID NO: 2977 - RNA, 73 nt, Homo sapiens
  source 1..73: mol_type = unassigned RNA
ctccagagggatgccttcagattctcctccttcccctccatccctcagggagttgctgatctgaatgaattca

SEQ ID NO: 2978 - DNA, 73 bp, Homo sapiens
  source 1..73: mol_type = unassigned DNA
ctccagagggatgccttcagattctcctccttcccctccatccctcagggagttgctgatctgaatgaattca

SEQ ID NO: 2979 - DNA, 73 bp, Homo sapiens
  source 1..73: mol_type = unassigned DNA
tgaattcattcagatcagcaactccctgagggatggaggggaaggaggagaatctgaaggcatccctctggag

SEQ ID NO: 2980 - RNA, 82 nt, Homo sapiens
  source 1..82: mol_type = unassigned RNA
gaggtcactttctgggctggctctggagggaagcatttataagaaacccttatcttagaaaagtaagcgtttgtaaactgtg

SEQ ID NO: 2981 - DNA, 82 bp, Homo sapiens
  source 1..82: mol_type = unassigned DNA
gaggtcactttctgggctggctctggagggaagcatttataagaaacccttatcttagaaaagtaagcgtttgtaaactgtg

SEQ ID NO: 2982 - DNA, 82 bp, Homo sapiens
  source 1..82: mol_type = unassigned DNA
cacagtttacaaacgcttacttttctaagataagggtttcttataaatgcttccctccagagccagcccagaaagtgacctc

SEQ ID NO: 2983 - RNA, 42 nt, Homo sapiens
  source 1..42: mol_type = unassigned RNA
gaaggtaggaacctgcagaaggaggaggagaaaaacggggct

SEQ ID NO: 2984 - DNA, 42 bp, Homo sapiens
  source 1..42: mol_type = unassigned DNA
gaaggtaggaacctgcagaaggaggaggagaaaaacggggct

SEQ ID NO: 2985 - DNA, 42 bp, Homo sapiens
  source 1..42: mol_type = unassigned DNA
agccccgtttttctcctcctccttctgcaggttcctaccttc

SEQ ID NO: 2986 - RNA, 67 nt, Homo sapiens
  source 1..67: mol_type = unassigned RNA
ggggcagtagggatgcttctctgttgaacttactgctcactggtagaatcactgtggagagagcatt

SEQ ID NO: 2987 - DNA, 67 bp, Homo sapiens
  source 1..67: mol_type = unassigned DNA
ggggcagtagggatgcttctctgttgaacttactgctcactggtagaatcactgtggagagagcatt

SEQ ID NO: 2988 - DNA, 67 bp, Homo sapiens
  source 1..67: mol_type = unassigned DNA
aatgctctctccacagtgattctaccagtgagcagtaagttcaacagagaagcatccctactgcccc

SEQ ID NO: 2989 - RNA, 24 nt, Homo sapiens
  source 1..24: mol_type = unassigned RNA
gtggagatatgggaatgagaattc

SEQ ID NO: 2990 - DNA, 24 bp, Homo sapiens
  source 1..24: mol_type = unassigned DNA
gtggagatatgggaatgagaattc

SEQ ID NO: 2991 - DNA, 24 bp, Homo sapiens
  source 1..24: mol_type = unassigned DNA
gaattctcattcccatatctccac

SEQ ID NO: 2992 - RNA, 40 nt, Homo sapiens
  source 1..40: mol_type = unassigned RNA
tgctctatcagactgagttaaccaaggcaaggaattgccc

SEQ ID NO: 2993 - DNA, 40 bp, Homo sapiens
  source 1..40: mol_type = unassigned DNA
tgctctatcagactgagttaaccaaggcaaggaattgccc

SEQ ID NO: 2994 - DNA, 40 bp, Homo sapiens
  source 1..40: mol_type = unassigned DNA
gggcaattccttgccttggttaactcagtctgatagagca

SEQ ID NO: 2995 - RNA, 34 nt, Homo sapiens
  source 1..34: mol_type = unassigned RNA
atggctctggtataaggaactgtttgagatcagc

SEQ ID NO: 2996 - DNA, 34 bp, Homo sapiens
  source 1..34: mol_type = unassigned DNA
atggctctggtataaggaactgtttgagatcagc

SEQ ID NO: 2997 - DNA, 34 bp, Homo sapiens
  source 1..34: mol_type = unassigned DNA
gctgatctcaaacagttccttataccagagccat

SEQ ID NO: 2998 - RNA, 25 nt, Homo sapiens
  source 1..25: mol_type = unassigned RNA
tgtcaaggatatgggaatgagagaa

SEQ ID NO: 2999 - DNA, 25 bp, Homo sapiens
  source 1..25: mol_type = unassigned DNA
tgtcaaggatatgggaatgagagaa

SEQ ID NO: 3000 - DNA, 25 bp, Homo sapiens
  source 1..25: mol_type = unassigned DNA
ttctctcattcccatatccttgaca

SEQ ID NO: 3001 - RNA, 27 nt, Homo sapiens
  source 1..27: mol_type = unassigned RNA
actcttgaggaaagcattttctaaaag

SEQ ID NO: 3002 - DNA, 27 bp, Homo sapiens
  source 1..27: mol_type = unassigned DNA
actcttgaggaaagcattttctaaaag

SEQ ID NO: 3003 - DNA, 27 bp, Homo sapiens
  source 1..27: mol_type = unassigned DNA
cttttagaaaatgctttcctcaagagt

SEQ ID NO: 3004 - RNA, 56 nt, Homo sapiens
  source 1..56: mol_type = unassigned RNA
cttacccttttgagtagtgtgatgaaatctcctgctgacctactccttctagccag

SEQ ID NO: 3005 - DNA, 56 bp, Homo sapiens
  source 1..56: mol_type = unassigned DNA
cttacccttttgagtagtgtgatgaaatctcctgctgacctactccttctagccag

SEQ ID NO: 3006 - DNA, 56 bp, Homo sapiens
  source 1..56: mol_type = unassigned DNA
ctggctagaaggagtaggtcagcaggagatttcatcacactactcaaaagggtaag

SEQ ID NO: 3007 - RNA, 68 nt, Homo sapiens
  source 1..68: mol_type = unassigned RNA
cagttatgatgaatgtttctcttggtctgtctgaaccccttgtcatttgtgggctgctagatcgatta

SEQ ID NO: 3008 - DNA, 68 bp, Homo sapiens
  source 1..68: mol_type = unassigned DNA
cagttatgatgaatgtttctcttggtctgtctgaaccccttgtcatttgtgggctgctagatcgatta

SEQ ID NO: 3009 - DNA, 68 bp, Homo sapiens
  source 1..68: mol_type = unassigned DNA
taatcgatctagcagcccacaaatgacaaggggttcagacagaccaagagaaacattcatcataactg

SEQ ID NO: 3010 - RNA, 25 nt, Homo sapiens
  source 1..25: mol_type = unassigned RNA
aaaggaactggcagaattctctgtg

SEQ ID NO: 3011 - DNA, 25 bp, Homo sapiens
  source 1..25: mol_type = unassigned DNA
aaaggaactggcagaattctctgtg

SEQ ID NO: 3012 - DNA, 25 bp, Homo sapiens
  source 1..25: mol_type = unassigned DNA
cacagagaattctgccagttccttt

SEQ ID NO: 3013 - RNA, 59 nt, Homo sapiens
  source 1..59: mol_type = unassigned RNA
tttcctataagactcatgttggtttggccccacttggtcccctatgtgtaatgcaggtt

SEQ ID NO: 3014 - DNA, 59 bp, Homo sapiens
  source 1..59: mol_type = unassigned DNA
tttcctataagactcatgttggtttggccccacttggtcccctatgtgtaatgcaggtt

SEQ ID NO: 3015 - DNA, 59 bp, Homo sapiens
  source 1..59: mol_type = unassigned DNA
aacctgcattacacataggggaccaagtggggccaaaccaacatgagtcttataggaaa

SEQ ID NO: 3016 - RNA, 28 nt, Homo sapiens
  source 1..28: mol_type = unassigned RNA
tatttccctgttagacttcaccaataaa

SEQ ID NO: 3017 - DNA, 28 bp, Homo sapiens
  source 1..28: mol_type = unassigned DNA
tatttccctgttagacttcaccaataaa

SEQ ID NO: 3018 - DNA, 28 bp, Homo sapiens
  source 1..28: mol_type = unassigned DNA
tttattggtgaagtctaacagggaaata

SEQ ID NO: 3019 - RNA, 31 nt, Homo sapiens
  source 1..31: mol_type = unassigned RNA
ctctctggtgacgtttgggacattgacaatg

SEQ ID NO: 3020 - DNA, 31 bp, Homo sapiens
  source 1..31: mol_type = unassigned DNA
ctctctggtgacgtttgggacattgacaatg

SEQ ID NO: 3021 - DNA, 31 bp, Homo sapiens
  source 1..31: mol_type = unassigned DNA
cattgtcaatgtcccaaacgtcaccagagag

SEQ ID NO: 3022 - RNA, 26 nt, Homo sapiens
  source 1..26: mol_type = unassigned RNA
ttagcgtagcaggctgaattatgacc

SEQ ID NO: 3023 - DNA, 26 bp, Homo sapiens
  source 1..26: mol_type = unassigned DNA
ttagcgtagcaggctgaattatgacc

SEQ ID NO: 3024 - DNA, 26 bp, Homo sapiens
  source 1..26: mol_type = unassigned DNA
ggtcataattcagcctgctacgctaa

SEQ ID NO: 3025 - RNA, 32 nt, Homo sapiens
  source 1..32: mol_type = unassigned RNA
tactcgatggagacaaaggtaacactgcagaa

SEQ ID NO: 3026 - DNA, 32 bp, Homo sapiens
  source 1..32: mol_type = unassigned DNA
tactcgatggagacaaaggtaacactgcagaa

SEQ ID NO: 3027 - DNA, 32 bp, Homo sapiens
  source 1..32: mol_type = unassigned DNA
ttctgcagtgttacctttgtctccatcgagta

SEQ ID NO: 3028 - RNA, 53 nt, Homo sapiens
  source 1..53: mol_type = unassigned RNA
ataagaaatcaatagacaagttgaaattttaagaactgtaattaagcatgttg

SEQ ID NO: 3029 - DNA, 53 bp, Homo sapiens
  source 1..53: mol_type = unassigned DNA
ataagaaatcaatagacaagttgaaattttaagaactgtaattaagcatgttg

SEQ ID NO: 3030 - DNA, 53 bp, Homo sapiens
  source 1..53: mol_type = unassigned DNA
caacatgcttaattacagttcttaaaatttcaacttgtctattgatttcttat

SEQ ID NO: 3031 - RNA, 75 nt, Homo sapiens
  source 1..75: mol_type = unassigned RNA
aagctgtggagggtttgcaatggagaaatcacatgatcactctggttactatctttagagtaggttgtagagaaa

SEQ ID NO: 3032 - DNA, 75 bp, Homo sapiens
  source 1..75: mol_type = unassigned DNA
aagctgtggagggtttgcaatggagaaatcacatgatcactctggttactatctttagagtaggttgtagagaaa

SEQ ID NO: 3033 - DNA, 75 bp, Homo sapiens
  source 1..75: mol_type = unassigned DNA
tttctctacaacctactctaaagatagtaaccagagtgatcatgtgatttctccattgcaaaccctccacagctt

SEQ ID NO: 3034 - RNA, 31 nt, Homo sapiens
  source 1..31: mol_type = unassigned RNA
tggccagggggcgtcggctgtgggcctcacg

SEQ ID NO: 3035 - DNA, 31 bp, Homo sapiens
  source 1..31: mol_type = unassigned DNA
tggccagggggcgtcggctgtgggcctcacg

SEQ ID NO: 3036 - DNA, 31 bp, Homo sapiens
  source 1..31: mol_type = unassigned DNA
cgtgaggcccacagccgacgccccctggcca

SEQ ID NO: 3037 - RNA, 22 nt, Homo sapiens
  source 1..22: mol_type = unassigned RNA
tgcactaatagcttgtatagtg

SEQ ID NO: 3038 - DNA, 22 bp, Homo sapiens
  source 1..22: mol_type = unassigned DNA
tgcactaatagcttgtatagtg

SEQ ID NO: 3039 - DNA, 22 bp, Homo sapiens
  source 1..22: mol_type = unassigned DNA
cactatacaagctattagtgca

SEQ ID NO: 3040 - RNA, 61 nt, Homo sapiens
  source 1..61: mol_type = unassigned RNA
tttgtttccttattaagtagagaactttcaccttctcacttgaaggaagcactttaacagc

SEQ ID NO: 3041 - DNA, 61 bp, Homo sapiens
  source 1..61: mol_type = unassigned DNA
tttgtttccttattaagtagagaactttcaccttctcacttgaaggaagcactttaacagc

SEQ ID NO: 3042 - DNA, 61 bp, Homo sapiens
  source 1..61: mol_type = unassigned DNA
gctgttaaagtgcttccttcaagtgagaaggtgaaagttctctacttaataaggaaacaaa

SEQ ID NO: 3043 - RNA, 30 nt, Homo sapiens
  source 1..30: mol_type = unassigned RNA
tcttacaaagatcaagggctgtccgcaaca

SEQ ID NO: 3044 - DNA, 30 bp, Homo sapiens
  source 1..30: mol_type = unassigned DNA
tcttacaaagatcaagggctgtccgcaaca

SEQ ID NO: 3045 - DNA, 30 bp, Homo sapiens
  source 1..30: mol_type = unassigned DNA
tgttgcggacagcccttgatctttgtaaga

SEQ ID NO: 3046 - RNA, 35 nt, Homo sapiens
  source 1..35: mol_type = unassigned RNA
cagtccacttggcctaatagaatgttatacccaaa

SEQ ID NO: 3047 - DNA, 35 bp, Homo sapiens
  source 1..35: mol_type = unassigned DNA
cagtccacttggcctaatagaatgttatacccaaa

SEQ ID NO: 3048 - DNA, 35 bp, Homo sapiens
  source 1..35: mol_type = unassigned DNA
tttgggtataacattctattaggccaagtggactg

SEQ ID NO: 3049 - RNA, 27 nt, Homo sapiens
  source 1..27: mol_type = unassigned RNA
caaaggtcgaaccaaccttgcattcct

SEQ ID NO: 3050 - DNA, 27 bp, Homo sapiens
  source 1..27: mol_type = unassigned DNA
caaaggtcgaaccaaccttgcattcct

SEQ ID NO: 3051 - DNA, 27 bp, Homo sapiens
  source 1..27: mol_type = unassigned DNA
aggaatgcaaggttggttcgacctttg

SEQ ID NO: 3052 - RNA, 34 nt, Homo sapiens
  source 1..34: mol_type = unassigned RNA
ctctatagggaagcacttgaagaaactctagtgg

SEQ ID NO: 3053 - DNA, 34 bp, Homo sapiens
  source 1..34: mol_type = unassigned DNA
ctctatagggaagcacttgaagaaactctagtgg

SEQ ID NO: 3054 - DNA, 34 bp, Homo sapiens
  source 1..34: mol_type = unassigned DNA
ccactagagtttcttcaagtgcttccctatagag

SEQ ID NO: 3055 - RNA, 43 nt, Homo sapiens
  source 1..43: mol_type = unassigned RNA
ctggatttacggaagaactctcatcaggacttctggactgtat

SEQ ID NO: 3056 - DNA, 43 bp, Homo sapiens
  source 1..43: mol_type = unassigned DNA
ctggatttacggaagaactctcatcaggacttctggactgtat

SEQ ID NO: 3057 - DNA, 43 bp, Homo sapiens
  source 1..43: mol_type = unassigned DNA
atacagtccagaagtcctgatgagagttcttccgtaaatccag

SEQ ID NO: 3058 - RNA, 58 nt, Homo sapiens
  source 1..58: mol_type = unassigned RNA
ccccccagacccccaccctgtgggccagaatgatgggatctgactggctgtgtgagtc

SEQ ID NO: 3059 - DNA, 58 bp, Homo sapiens
  source 1..58: mol_type = unassigned DNA
ccccccagacccccaccctgtgggccagaatgatgggatctgactggctgtgtgagtc

SEQ ID NO: 3060 - DNA, 58 bp, Homo sapiens
  source 1..58: mol_type = unassigned DNA
gactcacacagccagtcagatcccatcattctggcccacagggtgggggtctgggggg

SEQ ID NO: 3061 - RNA, 26 nt, Homo sapiens
  source 1..26: mol_type = unassigned RNA
actgctaagggaagccctttctaatt

SEQ ID NO: 3062 - DNA, 26 bp, Homo sapiens
  source 1..26: mol_type = unassigned DNA
actgctaagggaagccctttctaatt

SEQ ID NO: 3063 - DNA, 26 bp, Homo sapiens
  source 1..26: mol_type = unassigned DNA
aattagaaagggcttcccttagcagt

SEQ ID NO: 3064 - RNA, 156 nt, Homo sapiens
  source 1..156: mol_type = unassigned RNA
ttcctgggggcctctctcaaggatgaggttttgaagattatgctggtgcagaagcagatctgtgcaggccagcgcaccaggttcaaggcatttgttgccatcagggactacaatggccacgttggcctgggtgttaagtgctccaaggtggtggcc

SEQ ID NO: 3065 - DNA, 156 bp, Homo sapiens
  source 1..156: mol_type = unassigned DNA
ttcctgggggcctctctcaaggatgaggttttgaagattatgctggtgcagaagcagatctgtgcaggccagcgcaccaggttcaaggcatttgttgccatcagggactacaatggccacgttggcctgggtgttaagtgctccaaggtggtggcc

SEQ ID NO: 3066 - DNA, 156 bp, Homo sapiens
  source 1..156: mol_type = unassigned DNA
ggccaccaccttggagcacttaacacccaggccaacgtggccattgtagtccctgatggcaacaaatgccttgaacctggtgcgctggcctgcacagatctgcttctgcaccagcataatcttcaaaacctcatccttgagagaggcccccaggaa

SEQ ID NO: 3067 - RNA, 23 nt, Homo sapiens
  source 1..23: mol_type = unassigned RNA
ttcttggttattatctgcatgaa

SEQ ID NO: 3068 - DNA, 23 bp, Homo sapiens
  source 1..23: mol_type = unassigned DNA
ttcttggttattatctgcatgaa

SEQ ID NO: 3069 - DNA, 23 bp, Homo sapiens
  source 1..23: mol_type = unassigned DNA
ttcatgcagataataaccaagaa

SEQ ID NO: 3070 - RNA, 55 nt, Homo sapiens
  source 1..55: mol_type = unassigned RNA
gtgacacctttcccagatacactgaattaatatctggaggtgagaagcacaaaag

SEQ ID NO: 3071 - DNA, 55 bp, Homo sapiens
  source 1..55: mol_type = unassigned DNA
gtgacacctttcccagatacactgaattaatatctggaggtgagaagcacaaaag

SEQ ID NO: 3072 - DNA, 55 bp, Homo sapiens
  source 1..55: mol_type = unassigned DNA
cttttgtgcttctcacctccagatattaattcagtgtatctgggaaaggtgtcac

SEQ ID NO: 3073 - RNA, 92 nt, Homo sapiens
  source 1..92: mol_type = unassigned RNA
atgcagttcatgatggtttacactcccaacattgtcagggctttccgtgtgttgactggttattagttttaacctgcacagaactaaaagat

SEQ ID NO: 3074 - DNA, 92 bp, Homo sapiens
  source 1..92: mol_type = unassigned DNA
atgcagttcatgatggtttacactcccaacattgtcagggctttccgtgtgttgactggttattagttttaacctgcacagaactaaaagat

SEQ ID NO: 3075 - DNA, 92 bp, Homo sapiens
  source 1..92: mol_type = unassigned DNA
atcttttagttctgtgcaggttaaaactaataaccagtcaacacacggaaagccctgacaatgttgggagtgtaaaccatcatgaactgcat

SEQ ID NO: 3076 - RNA, 25 nt, Homo sapiens
  source 1..25: mol_type = unassigned RNA
tttgtttagttggttgtattgttat

SEQ ID NO: 3077 - DNA, 25 bp, Homo sapiens
  source 1..25: mol_type = unassigned DNA
tttgtttagttggttgtattgttat

SEQ ID NO: 3078 - DNA, 25 bp, Homo sapiens
  source 1..25: mol_type = unassigned DNA
ataacaatacaaccaactaaacaaa

SEQ ID NO: 3079 - RNA, 33 nt, Homo sapiens
  source 1..33: mol_type = unassigned RNA
gctatggtattagctttgcaggcagatgctgaa

SEQ ID NO: 3080 - DNA, 33 bp, Homo sapiens
  source 1..33: mol_type = unassigned DNA
gctatggtattagctttgcaggcagatgctgaa

SEQ ID NO: 3081 - DNA, 33 bp, Homo sapiens
  source 1..33: mol_type = unassigned DNA
ttcagcatctgcctgcaaagctaataccatagc

SEQ ID NO: 3082 - RNA, 30 nt, Homo sapiens
  source 1..30: mol_type = unassigned RNA
gagcatgattcgtctctctgaagctatggc

SEQ ID NO: 3083 - DNA, 30 bp, Homo sapiens
  source 1..30: mol_type = unassigned DNA
gagcatgattcgtctctctgaagctatggc

SEQ ID NO: 3084 - DNA, 30 bp, Homo sapiens
  source 1..30: mol_type = unassigned DNA
gccatagcttcagagagacgaatcatgctc

SEQ ID NO: 3085 - RNA, 23 nt, Homo sapiens
  source 1..23: mol_type = unassigned RNA
agaagcagtgtgcagggaatgag

SEQ ID NO: 3086 - DNA, 23 bp, Homo sapiens
  source 1..23: mol_type = unassigned DNA
agaagcagtgtgcagggaatgag

SEQ ID NO: 3087 - DNA, 23 bp, Homo sapiens
  source 1..23: mol_type = unassigned DNA
ctcattccctgcacactgcttct

SEQ ID NO: 3088 - RNA, 33 nt, Homo sapiens
  source 1..33: mol_type = unassigned RNA
attcagtatgataatggactgcaaaggaaacct

SEQ ID NO: 3089 - DNA, 33 bp, Homo sapiens
  source 1..33: mol_type = unassigned DNA
attcagtatgataatggactgcaaaggaaacct

SEQ ID NO: 3090 - DNA, 33 bp, Homo sapiens
  source 1..33: mol_type = unassigned DNA
aggtttcctttgcagtccattatcatactgaat

SEQ ID NO: 3091 - RNA, 30 nt, Homo sapiens
  source 1..30: mol_type = unassigned RNA
tgtgggttggggctgggtctactgctgacc

SEQ ID NO: 3092 - DNA, 30 bp, Homo sapiens
  source 1..30: mol_type = unassigned DNA
tgtgggttggggctgggtctactgctgacc

SEQ ID NO: 3093 - DNA, 30 bp, Homo sapiens
  source 1..30: mol_type = unassigned DNA
ggtcagcagtagacccagccccaacccaca

SEQ ID NO: 3094 - RNA, 39 nt, Homo sapiens
  source 1..39: mol_type = unassigned RNA
catctagaacggggtgtgagtggcaggaaagccatttgg

SEQ ID NO: 3095 - DNA, 39 bp, Homo sapiens
  source 1..39: mol_type = unassigned DNA
catctagaacggggtgtgagtggcaggaaagccatttgg

SEQ ID NO: 3096 - DNA, 39 bp, Homo sapiens
  source 1..39: mol_type = unassigned DNA
ccaaatggctttcctgccactcacaccccgttctagatg

SEQ ID NO: 3097 - RNA, 57 nt, Homo sapiens
  source 1..57: mol_type = unassigned RNA
tttcccagttctaggagctttttggatgagactttggggttttctaggtgtatgatc

SEQ ID NO: 3098 - DNA, 57 bp, Homo sapiens
  source 1..57: mol_type = unassigned DNA
tttcccagttctaggagctttttggatgagactttggggttttctaggtgtatgatc

SEQ ID NO: 3099 - DNA, 57 bp, Homo sapiens
  source 1..57: mol_type = unassigned DNA
gatcatacacctagaaaaccccaaagtctcatccaaaaagctcctagaactgggaaa

SEQ ID NO: 3100 - RNA, 29 nt, Homo sapiens
  source 1..29: mol_type = unassigned RNA
cctcgccctgaacctgagccacggcctcc

SEQ ID NO: 3101 - DNA, 29 bp, Homo sapiens
  source 1..29: mol_type = unassigned DNA
cctcgccctgaacctgagccacggcctcc

SEQ ID NO: 3102 - DNA, 29 bp, Homo sapiens
  source 1..29: mol_type = unassigned DNA
ggaggccgtggctcaggttcagggcgagg

SEQ ID NO: 3103 - RNA, 33 nt, Homo sapiens
  source 1..33: mol_type = unassigned RNA
ggagctggtgcaatggacttcccagagcggggc

SEQ ID NO: 3104 - DNA, 33 bp, Homo sapiens
  source 1..33: mol_type = unassigned DNA
ggagctggtgcaatggacttcccagagcggggc

SEQ ID NO: 3105 - DNA, 33 bp, Homo sapiens
  source 1..33: mol_type = unassigned DNA
gccccgctctgggaagtccattgcaccagctcc

SEQ ID NO: 3106 - RNA, 28 nt, Homo sapiens
  source 1..28: mol_type = unassigned RNA
ttatctagtaattctatagttagcaaaa

SEQ ID NO: 3107 - DNA, 28 bp, Homo sapiens
  source 1..28: mol_type = unassigned DNA
ttatctagtaattctatagttagcaaaa

SEQ ID NO: 3108 - DNA, 28 bp, Homo sapiens
  source 1..28: mol_type = unassigned DNA
ttttgctaactatagaattactagataa

SEQ ID NO: 3109 - RNA, 24 nt, Homo sapiens
  source 1..24: mol_type = unassigned RNA
tgcaaagcatttttggaaatagct

SEQ ID NO: 3110 - DNA, 24 bp, Homo sapiens
  source 1..24: mol_type = unassigned DNA
tgcaaagcatttttggaaatagct

SEQ ID NO: 3111 - DNA, 24 bp, Homo sapiens
  source 1..24: mol_type = unassigned DNA
agctatttccaaaaatgctttgca

SEQ ID NO: 3112 - RNA, 32 nt, Homo sapiens
  source 1..32: mol_type = unassigned RNA
tgcaccatgatggattctgagagcagagagtc

SEQ ID NO: 3113 - DNA, 32 bp, Homo sapiens
  source 1..32: mol_type = unassigned DNA
tgcaccatgatggattctgagagcagagagtc

SEQ ID NO: 3114 - DNA, 32 bp, Homo sapiens
  source 1..32: mol_type = unassigned DNA
gactctctgctctcagaatccatcatggtgca

SEQ ID NO: 3115 - RNA, 33 nt, Homo sapiens
  source 1..33: mol_type = unassigned RNA
ggcccccaggcgtgctggactcccctctcatct

SEQ ID NO: 3116 - DNA, 33 bp, Homo sapiens
  source 1..33: mol_type = unassigned DNA
ggcccccaggcgtgctggactcccctctcatct

SEQ ID NO: 3117 - DNA, 33 bp, Homo sapiens
  source 1..33: mol_type = unassigned DNA
agatgagaggggagtccagcacgcctgggggcc

SEQ ID NO: 3118 - RNA, 57 nt, Homo sapiens
  source 1..57: mol_type = unassigned RNA
tataaattgactgtattgatgatgaaggaaggagttccggctgaccattctgaagca

SEQ ID NO: 3119 - DNA, 57 bp, Homo sapiens
  source 1..57: mol_type = unassigned DNA
tataaattgactgtattgatgatgaaggaaggagttccggctgaccattctgaagca

SEQ ID NO: 3120 - DNA, 57 bp, Homo sapiens
  source 1..57: mol_type = unassigned DNA
tgcttcagaatggtcagccggaactccttccttcatcatcaatacagtcaatttata

SEQ ID NO: 3121 - RNA, 37 nt, Homo sapiens
  source 1..37: mol_type = unassigned RNA
ccttaacttgaaggggcttacaatttagctgggagac

SEQ ID NO: 3122 - DNA, 37 bp, Homo sapiens
  source 1..37: mol_type = unassigned DNA
ccttaacttgaaggggcttacaatttagctgggagac

SEQ ID NO: 3123 - DNA, 37 bp, Homo sapiens
  source 1..37: mol_type = unassigned DNA
gtctcccagctaaattgtaagccccttcaagttaagg

SEQ ID NO: 3124 - RNA, 106 nt, Homo sapiens
  source 1..106: mol_type = unassigned RNA
ccaaagtatcacagatgtcaaatagaatatgctatataaaccaaaaatgtgcatttcagatgacctattacagcaatctcagccaatatgtaatatcacaaaatgt

SEQ ID NO: 3125 - DNA, 106 bp, Homo sapiens
  source 1..106: mol_type = unassigned DNA
ccaaagtatcacagatgtcaaatagaatatgctatataaaccaaaaatgtgcatttcagatgacctattacagcaatctcagccaatatgtaatatcacaaaatgt

SEQ ID NO: 3126 - DNA, 106 bp, Homo sapiens
  source 1..106: mol_type = unassigned DNA
acattttgtgatattacatattggctgagattgctgtaataggtcatctgaaatgcacatttttggtttatatagcatattctatttgacatctgtgatactttgg

SEQ ID NO: 3127 - RNA, 61 nt, Homo sapiens
  source 1..61: mol_type = unassigned RNA
ataaaatgattccctttagagtgtaatcttagggctttcatgttgggaagtaggaaaagga

SEQ ID NO: 3128 - DNA, 61 bp, Homo sapiens
  source 1..61: mol_type = unassigned DNA
ataaaatgattccctttagagtgtaatcttagggctttcatgttgggaagtaggaaaagga

SEQ ID NO: 3129 - DNA, 61 bp, Homo sapiens
  source 1..61: mol_type = unassigned DNA
tccttttcctacttcccaacatgaaagccctaagattacactctaaagggaatcattttat

SEQ ID NO: 3130 - RNA, 30 nt, Homo sapiens
  source 1..30: mol_type = unassigned RNA
gcacagtattcttggctgattgatgggaac

SEQ ID NO: 3131 - DNA, 30 bp, Homo sapiens
  source 1..30: mol_type = unassigned DNA
gcacagtattcttggctgattgatgggaac

SEQ ID NO: 3132 - DNA, 30 bp, Homo sapiens
  source 1..30: mol_type = unassigned DNA
gttcccatcaatcagccaagaatactgtgc

SEQ ID NO: 3133 - RNA, 36 nt, Homo sapiens
  source 1..36: mol_type = unassigned RNA
ccaccagaacaaccaggacaactgcccctacatctc

SEQ ID NO: 3134 - DNA, 36 bp, Homo sapiens
  source 1..36: mol_type = unassigned DNA
ccaccagaacaaccaggacaactgcccctacatctc

SEQ ID NO: 3135 - DNA, 36 bp, Homo sapiens
  source 1..36: mol_type = unassigned DNA
gagatgtaggggcagttgtcctggttgttctggtgg

SEQ ID NO: 3136 - RNA, 134 nt, Homo sapiens
  source 1..134: mol_type = unassigned RNA
ctatatgcctaatacagttttctctccacttaaagagatttcttcagcgttttattgaccctctggctaaagaagaagaaaatgttggcatagatattactgaacctctatacatgcaacgacttggggaggta

SEQ ID NO: 3137 - DNA, 134 bp, Homo sapiens
  source 1..134: mol_type = unassigned DNA
ctatatgcctaatacagttttctctccacttaaagagatttcttcagcgttttattgaccctctggctaaagaagaagaaaatgttggcatagatattactgaacctctatacatgcaacgacttggggaggta

SEQ ID NO: 3138 - DNA, 134 bp, Homo sapiens
  source 1..134: mol_type = unassigned DNA
tacctccccaagtcgttgcatgtatagaggttcagtaatatctatgccaacattttcttcttctttagccagagggtcaataaaacgctgaagaaatctctttaagtggagagaaaactgtattaggcatatag

SEQ ID NO: 3139 - RNA, 64 nt, Homo sapiens
  source 1..64: mol_type = unassigned RNA
ggattcagagggaggggaggcagctccagtgggtatgcactttagacatgcaagacagttatga

SEQ ID NO: 3140 - DNA, 64 bp, Homo sapiens
  source 1..64: mol_type = unassigned DNA
ggattcagagggaggggaggcagctccagtgggtatgcactttagacatgcaagacagttatga

SEQ ID NO: 3141 - DNA, 64 bp, Homo sapiens
  source 1..64: mol_type = unassigned DNA
tcataactgtcttgcatgtctaaagtgcatacccactggagctgcctcccctccctctgaatcc

SEQ ID NO: 3142 - RNA, 29 nt, Homo sapiens
  source 1..29: mol_type = unassigned RNA
cactagtactttgcttgactggaggaagt

SEQ ID NO: 3143 - DNA, 29 bp, Homo sapiens
  source 1..29: mol_type = unassigned DNA
cactagtactttgcttgactggaggaagt

SEQ ID NO: 3144 - DNA, 29 bp, Homo sapiens
  source 1..29: mol_type = unassigned DNA
acttcctccagtcaagcaaagtactagtg

SEQ ID NO: 3145 - RNA, 25 nt, Homo sapiens
  source 1..25: mol_type = unassigned RNA
ctacaatgcttatagagcagttagt

SEQ ID NO: 3146 - DNA, 25 bp, Homo sapiens
  source 1..25: mol_type = unassigned DNA
ctacaatgcttatagagcagttagt

SEQ ID NO: 3147 - DNA, 25 bp, Homo sapiens
  source 1..25: mol_type = unassigned DNA
actaactgctctataagcattgtag

SEQ ID NO: 3148 - RNA, 47 nt, Homo sapiens
  source 1..47: mol_type = unassigned RNA
ttgttgtagccattttggagtataatttggtggtatctatcagaatt

SEQ ID NO: 3149 - DNA, 47 bp, Homo sapiens
  source 1..47: mol_type = unassigned DNA
ttgttgtagccattttggagtataatttggtggtatctatcagaatt

SEQ ID NO: 3150 - DNA, 47 bp, Homo sapiens
  source 1..47: mol_type = unassigned DNA
aattctgatagataccaccaaattatactccaaaatggctacaacaa

SEQ ID NO: 3151 - RNA, 30 nt, Homo sapiens
  source 1..30: mol_type = unassigned RNA
cttggtcattgctcattccccggagcctgg

SEQ ID NO: 3152 - DNA, 30 bp, Homo sapiens
  source 1..30: mol_type = unassigned DNA
cttggtcattgctcattccccggagcctgg

SEQ ID NO: 3153 - DNA, 30 bp, Homo sapiens
  source 1..30: mol_type = unassigned DNA
ccaggctccggggaatgagcaatgaccaag

SEQ ID NO: 3154 - RNA, 106 nt, Homo sapiens
  source 1..106: mol_type = unassigned RNA
taatgttatgtgttatgtctgtatctggttatctgactgtatcttctgttggttctgtttctctgaggaactccgatacaccatatgatccagtaatcccattcgt

SEQ ID NO: 3155 - DNA, 106 bp, Homo sapiens
  source 1..106: mol_type = unassigned DNA
taatgttatgtgttatgtctgtatctggttatctgactgtatcttctgttggttctgtttctctgaggaactccgatacaccatatgatccagtaatcccattcgt

SEQ ID NO: 3156 - DNA, 106 bp, Homo sapiens
  source 1..106: mol_type = unassigned DNA
acgaatgggattactggatcatatggtgtatcggagttcctcagagaaacagaaccaacagaagatacagtcagataaccagatacagacataacacataacatta

SEQ ID NO: 3157 - RNA, 35 nt, Homo sapiens
  source 1..35: mol_type = unassigned RNA
caccacaccagtgatgcgggaagacctgagtgtgg

SEQ ID NO: 3158 - DNA, 35 bp, Homo sapiens
  source 1..35: mol_type = unassigned DNA
caccacaccagtgatgcgggaagacctgagtgtgg

SEQ ID NO: 3159 - DNA, 35 bp, Homo sapiens
  source 1..35: mol_type = unassigned DNA
ccacactcaggtcttcccgcatcactggtgtggtg

SEQ ID NO: 3160 - RNA, 37 nt, Homo sapiens
  source 1..37: mol_type = unassigned RNA
taaagtggttgcattgtagaactcacaagtgtaacct

SEQ ID NO: 3161 - DNA, 37 bp, Homo sapiens
  source 1..37: mol_type = unassigned DNA
taaagtggttgcattgtagaactcacaagtgtaacct

SEQ ID NO: 3162 - DNA, 37 bp, Homo sapiens
  source 1..37: mol_type = unassigned DNA
aggttacacttgtgagttctacaatgcaaccacttta

SEQ ID NO: 3163 - RNA, 30 nt, Homo sapiens
  source 1..30: mol_type = unassigned RNA
atgctccaatggtagtactcaaacaggtgc

SEQ ID NO: 3164 - DNA, 30 bp, Homo sapiens
  source 1..30: mol_type = unassigned DNA
atgctccaatggtagtactcaaacaggtgc

SEQ ID NO: 3165 - DNA, 30 bp, Homo sapiens
  source 1..30: mol_type = unassigned DNA
gcacctgtttgagtactaccattggagcat

SEQ ID NO: 3166 - RNA, 34 nt, Homo sapiens
  source 1..34: mol_type = unassigned RNA
tttcaggctgcttggttatcagaggttgttgaca

SEQ ID NO: 3167 - DNA, 34 bp, Homo sapiens
  source 1..34: mol_type = unassigned DNA
tttcaggctgcttggttatcagaggttgttgaca

SEQ ID NO: 3168 - DNA, 34 bp, Homo sapiens
  source 1..34: mol_type = unassigned DNA
tgtcaacaacctctgataaccaagcagcctgaaa

SEQ ID NO: 3169 - RNA, 30 nt, Homo sapiens
  source 1..30: mol_type = unassigned RNA
tgactttctgaataaagatggcaacacaat

SEQ ID NO: 3170 - DNA, 30 bp, Homo sapiens
  source 1..30: mol_type = unassigned DNA
tgactttctgaataaagatggcaacacaat

SEQ ID NO: 3171 - DNA, 30 bp, Homo sapiens
  source 1..30: mol_type = unassigned DNA
attgtgttgccatctttattcagaaagtca

SEQ ID NO: 3172 - RNA, 24 nt, Homo sapiens
  source 1..24: mol_type = unassigned RNA
attttccaaggaagaactcacagt

SEQ ID NO: 3173 - DNA, 24 bp, Homo sapiens
  source 1..24: mol_type = unassigned DNA
attttccaaggaagaactcacagt

SEQ ID NO: 3174 - DNA, 24 bp, Homo sapiens
  source 1..24: mol_type = unassigned DNA
actgtgagttcttccttggaaaat

SEQ ID NO: 3175 - RNA, 37 nt, Homo sapiens
  source 1..37: mol_type = unassigned RNA
acctccctgaggatgacagaataagaactgagatctg

SEQ ID NO: 3176 - DNA, 37 bp, Homo sapiens
  source 1..37: mol_type = unassigned DNA
acctccctgaggatgacagaataagaactgagatctg

SEQ ID NO: 3177 - DNA, 37 bp, Homo sapiens
  source 1..37: mol_type = unassigned DNA
cagatctcagttcttattctgtcatcctcagggaggt

SEQ ID NO: 3178 - RNA, 25 nt, Homo sapiens
  source 1..25: mol_type = unassigned RNA
ctttaactttttaggcccactcctt

SEQ ID NO: 3179 - DNA, 25 bp, Homo sapiens
  source 1..25: mol_type = unassigned DNA
ctttaactttttaggcccactcctt

SEQ ID NO: 3180 - DNA, 25 bp, Homo sapiens
  source 1..25: mol_type = unassigned DNA
aaggagtgggcctaaaaagttaaag

SEQ ID NO: 3181 - RNA, 32 nt, Homo sapiens
  source 1..32: mol_type = unassigned RNA
aaggggtagatcaatgaattccatgggtttac

SEQ ID NO: 3182 - DNA, 32 bp, Homo sapiens
  source 1..32: mol_type = unassigned DNA
aaggggtagatcaatgaattccatgggtttac

SEQ ID NO: 3183 - DNA, 32 bp, Homo sapiens
  source 1..32: mol_type = unassigned DNA
gtaaacccatggaattcattgatctacccctt

SEQ ID NO: 3184 - RNA, 34 nt, Homo sapiens
  source 1..34: mol_type = unassigned RNA
ttgtaaccccagatcagaagtactccatggacaa

SEQ ID NO: 3185 - DNA, 34 bp, Homo sapiens
  source 1..34: mol_type = unassigned DNA
ttgtaaccccagatcagaagtactccatggacaa

SEQ ID NO: 3186 - DNA, 34 bp, Homo sapiens
  source 1..34: mol_type = unassigned DNA
ttgtccatggagtacttctgatctggggttacaa

SEQ ID NO: 3187 - RNA, 24 nt, Homo sapiens
  source 1..24: mol_type = unassigned RNA
ttgggctgagccatgctactgtta

SEQ ID NO: 3188 - DNA, 24 bp, Homo sapiens
  source 1..24: mol_type = unassigned DNA
ttgggctgagccatgctactgtta

SEQ ID NO: 3189 - DNA, 24 bp, Homo sapiens
  source 1..24: mol_type = unassigned DNA
taacagtagcatggctcagcccaa

SEQ ID NO: 3190 - RNA, 42 nt, Homo sapiens
  source 1..42: mol_type = unassigned RNA
atatttttacctatctactatctgtttatctatctgtattct

SEQ ID NO: 3191 - DNA, 42 bp, Homo sapiens
  source 1..42: mol_type = unassigned DNA
atatttttacctatctactatctgtttatctatctgtattct

SEQ ID NO: 3192 - DNA, 42 bp, Homo sapiens
  source 1..42: mol_type = unassigned DNA
agaatacagatagataaacagatagtagataggtaaaaatat

SEQ ID NO: 3193 - RNA, 33 nt, Homo sapiens
  source 1..33: mol_type = unassigned RNA
ttattaaaattatttataagttgtatagtttat

SEQ ID NO: 3194 - DNA, 33 bp, Homo sapiens
  source 1..33: mol_type = unassigned DNA
ttattaaaattatttataagttgtatagtttat

SEQ ID NO: 3195 - DNA, 33 bp, Homo sapiens
  source 1..33: mol_type = unassigned DNA
ataaactatacaacttataaataattttaataa

SEQ ID NO: 3196 - RNA, 122 nt, Homo sapiens
  source 1..122: mol_type = unassigned RNA
agtcctggccgtccagcactctggactcccctgaggccccaccatcaggagagggagccccagcctctgggccctttcagtcctggctgtggccctgagcaccaggggtgaagtttgctgag

SEQ ID NO: 3197 - DNA, 122 bp, Homo sapiens
  source 1..122: mol_type = unassigned DNA
agtcctggccgtccagcactctggactcccctgaggccccaccatcaggagagggagccccagcctctgggccctttcagtcctggctgtggccctgagcaccaggggtgaagtttgctgag

SEQ ID NO: 3198 - DNA, 122 bp, Homo sapiens
  source 1..122: mol_type = unassigned DNA
ctcagcaaacttcacccctggtgctcagggccacagccaggactgaaagggcccagaggctggggctccctctcctgatggtggggcctcaggggagtccagagtgctggacggccaggact

SEQ ID NO: 3199 - RNA, 46 nt, Homo sapiens
  source 1..46: mol_type = unassigned RNA
tattttcaatggtaaactcactcaaatgagactataatccaacttt

SEQ ID NO: 3200 - DNA, 46 bp, Homo sapiens
  source 1..46: mol_type = unassigned DNA
tattttcaatggtaaactcactcaaatgagactataatccaacttt

SEQ ID NO: 3201 - DNA, 46 bp, Homo sapiens
  source 1..46: mol_type = unassigned DNA
aaagttggattatagtctcatttgagtgagtttaccattgaaaata

SEQ ID NO: 3202 - RNA, 46 nt, Homo sapiens
  source 1..46: mol_type = unassigned RNA
atacctgtcaaactgaagttgtcttctggtaccatggtgcagtgga

SEQ ID NO: 3203 - DNA, 46 bp, Homo sapiens
  source 1..46: mol_type = unassigned DNA
atacctgtcaaactgaagttgtcttctggtaccatggtgcagtgga

SEQ ID NO: 3204 - DNA, 46 bp, Homo sapiens
  source 1..46: mol_type = unassigned DNA
tccactgcaccatggtaccagaagacaacttcagtttgacaggtat

SEQ ID NO: 3205 - RNA, 24 nt, Homo sapiens
  source 1..24: mol_type = unassigned RNA
cagcttgacaaactgatgttcaag

SEQ ID NO: 3206 - DNA, 24 bp, Homo sapiens
  source 1..24: mol_type = unassigned DNA
cagcttgacaaactgatgttcaag

SEQ ID NO: 3207 - DNA, 24 bp, Homo sapiens
  source 1..24: mol_type = unassigned DNA
cttgaacatcagtttgtcaagctg

SEQ ID NO: 3208 - RNA, 38 nt, Homo sapiens
  source 1..38: mol_type = unassigned RNA
cagcagaaaggactgtgcagacccctgtgactcctgag

SEQ ID NO: 3209 - DNA, 38 bp, Homo sapiens
  source 1..38: mol_type = unassigned DNA
cagcagaaaggactgtgcagacccctgtgactcctgag

SEQ ID NO: 3210 - DNA, 38 bp, Homo sapiens
  source 1..38: mol_type = unassigned DNA
ctcaggagtcacaggggtctgcacagtcctttctgctg

SEQ ID NO: 3211 - RNA, 30 nt, Homo sapiens
  source 1..30: mol_type = unassigned RNA
ggtgctttttgaccacgtaggctgtttaaa

SEQ ID NO: 3212 - DNA, 30 bp, Homo sapiens
  source 1..30: mol_type = unassigned DNA
ggtgctttttgaccacgtaggctgtttaaa

SEQ ID NO: 3213 - DNA, 30 bp, Homo sapiens
  source 1..30: mol_type = unassigned DNA
tttaaacagcctacgtggtcaaaaagcacc

SEQ ID NO: 3214 - RNA, 24 nt, Homo sapiens
  source 1..24: mol_type = unassigned RNA
cagatttctgttcattcaggtaga

SEQ ID NO: 3215 - DNA, 24 bp, Homo sapiens
  source 1..24: mol_type = unassigned DNA
cagatttctgttcattcaggtaga

SEQ ID NO: 3216 - DNA, 24 bp, Homo sapiens
  source 1..24: mol_type = unassigned DNA
tctacctgaatgaacagaaatctg

SEQ ID NO: 3217 - RNA, 30 nt, Homo sapiens
  source 1..30: mol_type = unassigned RNA
cctccgaagctgggactgtggatccaaggc

SEQ ID NO: 3218 - DNA, 30 bp, Homo sapiens
  source 1..30: mol_type = unassigned DNA
cctccgaagctgggactgtggatccaaggc

SEQ ID NO: 3219 - DNA, 30 bp, Homo sapiens
  source 1..30: mol_type = unassigned DNA
gccttggatccacagtcccagcttcggagg

SEQ ID NO: 3220 - RNA, 31 nt, Homo sapiens
  source 1..31: mol_type = unassigned RNA
tagcttctaattatagaactgatagggagga

SEQ ID NO: 3221 - DNA, 31 bp, Homo sapiens
  source 1..31: mol_type = unassigned DNA
tagcttctaattatagaactgatagggagga

SEQ ID NO: 3222 - DNA, 31 bp, Homo sapiens
  source 1..31: mol_type = unassigned DNA
tcctccctatcagttctataattagaagcta

SEQ ID NO: 3223 - RNA, 31 nt, Homo sapiens
  source 1..31: mol_type = unassigned RNA
ggagaagggaggcacctgggctgtggatgcc

SEQ ID NO: 3224 - DNA, 31 bp, Homo sapiens
  source 1..31: mol_type = unassigned DNA
ggagaagggaggcacctgggctgtggatgcc

SEQ ID NO: 3225 - DNA, 31 bp, Homo sapiens
  source 1..31: mol_type = unassigned DNA
ggcatccacagcccaggtgcctcccttctcc

SEQ ID NO: 3226 - RNA, 36 nt, Homo sapiens
  source 1..36: mol_type = unassigned RNA
ttcaaaccttctctatgaaaggccatgttcatctct

SEQ ID NO: 3227 - DNA, 36 bp, Homo sapiens
  source 1..36: mol_type = unassigned DNA
ttcaaaccttctctatgaaaggccatgttcatctct

SEQ ID NO: 3228 - DNA, 36 bp, Homo sapiens
  source 1..36: mol_type = unassigned DNA
agagatgaacatggcctttcatagagaaggtttgaa

SEQ ID NO: 3229 - RNA, 86 nt, Homo sapiens
  source 1..86: mol_type = unassigned RNA
atcttttcctctggagaactcacactctttgcctacctccttcttgccttccggtctacatccatgattcttttgcccacctcctt

SEQ ID NO: 3230 - DNA, 86 bp, Homo sapiens
  source 1..86: mol_type = unassigned DNA
atcttttcctctggagaactcacactctttgcctacctccttcttgccttccggtctacatccatgattcttttgcccacctcctt

SEQ ID NO: 3231 - DNA, 86 bp, Homo sapiens
  source 1..86: mol_type = unassigned DNA
aaggaggtgggcaaaagaatcatggatgtagaccggaaggcaagaaggaggtaggcaaagagtgtgagttctccagaggaaaagat

SEQ ID NO: 3232 - RNA, 33 nt, Homo sapiens
  source 1..33: mol_type = unassigned RNA
ctgttcttgtgacagcggatgggtctcatgaga

SEQ ID NO: 3233 - DNA, 33 bp, Homo sapiens
  source 1..33: mol_type = unassigned DNA
ctgttcttgtgacagcggatgggtctcatgaga

SEQ ID NO: 3234 - DNA, 33 bp, Homo sapiens
  source 1..33: mol_type = unassigned DNA
tctcatgagacccatccgctgtcacaagaacag

SEQ ID NO: 3235 - RNA, 184 nt, Homo sapiens
  source 1..184: mol_type = unassigned RNA
atggcaggaactcaaaaccctgggtacagtccctggttcatctctgccctgtgactggggcaagtcagggcaggactgttgggagctgcaatccaagcacagagttgctcggagttgcaaaaggagaagccacagggcagacatacaatacagaacctgaaagaagtgcccaagcctgcgccag

SEQ ID NO: 3236 - DNA, 184 bp, Homo sapiens
  source 1..184: mol_type = unassigned DNA
atggcaggaactcaaaaccctgggtacagtccctggttcatctctgccctgtgactggggcaagtcagggcaggactgttgggagctgcaatccaagcacagagttgctcggagttgcaaaaggagaagccacagggcagacatacaatacagaacctgaaagaagtgcccaagcctgcgccag

SEQ ID NO: 3237 - DNA, 184 bp, Homo sapiens
  source 1..184: mol_type = unassigned DNA
ctggcgcaggcttgggcacttctttcaggttctgtattgtatgtctgccctgtggcttctccttttgcaactccgagcaactctgtgcttggattgcagctcccaacagtcctgccctgacttgccccagtcacagggcagagatgaaccagggactgtacccagggttttgagttcctgccat

SEQ ID NO: 3238 - RNA, 49 nt, Homo sapiens
  source 1..49: mol_type = unassigned RNA
aagttggtcttgaattcctggtcactacgtctgctctgagtagtgcagc

SEQ ID NO: 3239 - DNA, 49 bp, Homo sapiens
  source 1..49: mol_type = unassigned DNA
aagttggtcttgaattcctggtcactacgtctgctctgagtagtgcagc

SEQ ID NO: 3240 - DNA, 49 bp, Homo sapiens
  source 1..49: mol_type = unassigned DNA
gctgcactactcagagcagacgtagtgaccaggaattcaagaccaactt

SEQ ID NO: 3241 - RNA, 32 nt, Homo sapiens
  source 1..32: mol_type = unassigned RNA
agggggcagggggatgaatgctgactgtcagg

SEQ ID NO: 3242 - DNA, 32 bp, Homo sapiens
  source 1..32: mol_type = unassigned DNA
agggggcagggggatgaatgctgactgtcagg

SEQ ID NO: 3243 - DNA, 32 bp, Homo sapiens
  source 1..32: mol_type = unassigned DNA
cctgacagtcagcattcatccccctgccccct

SEQ ID NO: 3244 - RNA, 24 nt, Homo sapiens
  source 1..24: mol_type = unassigned RNA
cttttgcatggtagacctcaaaac

SEQ ID NO: 3245 - DNA, 24 bp, Homo sapiens
  source 1..24: mol_type = unassigned DNA
cttttgcatggtagacctcaaaac

SEQ ID NO: 3246 - DNA, 24 bp, Homo sapiens
  source 1..24: mol_type = unassigned DNA
gttttgaggtctaccatgcaaaag

SEQ ID NO: 3247 - RNA, 32 nt, Homo sapiens
  source 1..32: mol_type = unassigned RNA
atactctctgtatcccaccctcctccccacca

SEQ ID NO: 3248 - DNA, 32 bp, Homo sapiens
  source 1..32: mol_type = unassigned DNA
atactctctgtatcccaccctcctccccacca

SEQ ID NO: 3249 - DNA, 32 bp, Homo sapiens
  source 1..32: mol_type = unassigned DNA
tggtggggaggagggtgggatacagagagtat

SEQ ID NO: 3250 - RNA, 27 nt, Homo sapiens
  source 1..27: mol_type = unassigned RNA
tcactgagctccacctcagctccctct

SEQ ID NO: 3251 - DNA, 27 bp, Homo sapiens
  source 1..27: mol_type = unassigned DNA
tcactgagctccacctcagctccctct

SEQ ID NO: 3252 - DNA, 27 bp, Homo sapiens
  source 1..27: mol_type = unassigned DNA
agagggagctgaggtggagctcagtga

SEQ ID NO: 3253 - RNA, 73 nt, Homo sapiens
  source 1..73: mol_type = unassigned RNA
cctcagcatctactctatcaggctgagtgttgagacccagggaccagaaggcctaggattcagccagctaaca

SEQ ID NO: 3254 - DNA, 73 bp, Homo sapiens
  source 1..73: mol_type = unassigned DNA
cctcagcatctactctatcaggctgagtgttgagacccagggaccagaaggcctaggattcagccagctaaca

SEQ ID NO: 3255 - DNA, 73 bp, Homo sapiens
  source 1..73: mol_type = unassigned DNA
tgttagctggctgaatcctaggccttctggtccctgggtctcaacactcagcctgatagagtagatgctgagg

SEQ ID NO: 3256 - RNA, 42 nt, Homo sapiens
  source 1..42: mol_type = unassigned RNA
tatcttctttcctactttattgggtccagaaggtgaagaagt

SEQ ID NO: 3257 - DNA, 42 bp, Homo sapiens
  source 1..42: mol_type = unassigned DNA
tatcttctttcctactttattgggtccagaaggtgaagaagt

SEQ ID NO: 3258 - DNA, 42 bp, Homo sapiens
  source 1..42: mol_type = unassigned DNA
acttcttcaccttctggacccaataaagtaggaaagaagata

SEQ ID NO: 3259 - RNA, 43 nt, Homo sapiens
  source 1..43: mol_type = unassigned RNA
ttccagagggaagtattttaatggtttttttcttggcctggtg

SEQ ID NO: 3260 - DNA, 43 bp, Homo sapiens
  source 1..43: mol_type = unassigned DNA
ttccagagggaagtattttaatggtttttttcttggcctggtg

SEQ ID NO: 3261 - DNA, 43 bp, Homo sapiens
  source 1..43: mol_type = unassigned DNA
caccaggccaagaaaaaaaccattaaaatacttccctctggaa

SEQ ID NO: 3262 - RNA, 29 nt, Homo sapiens
  source 1..29: mol_type = unassigned RNA
gcgcgcggtgcagtcgggaggtggaggca

SEQ ID NO: 3263 - DNA, 29 bp, Homo sapiens
  source 1..29: mol_type = unassigned DNA
gcgcgcggtgcagtcgggaggtggaggca

SEQ ID NO: 3264 - DNA, 29 bp, Homo sapiens
  source 1..29: mol_type = unassigned DNA
tgcctccacctcccgactgcaccgcgcgc

SEQ ID NO: 3265 - RNA, 25 nt, Homo sapiens
  source 1..25: mol_type = unassigned RNA
aagctgtgagtggcaagaaatgtga

SEQ ID NO: 3266 - DNA, 25 bp, Homo sapiens
  source 1..25: mol_type = unassigned DNA
aagctgtgagtggcaagaaatgtga

SEQ ID NO: 3267 - DNA, 25 bp, Homo sapiens
  source 1..25: mol_type = unassigned DNA
tcacatttcttgccactcacagctt

SEQ ID NO: 3268 - RNA, 78 nt, Homo sapiens
  source 1..78: mol_type = unassigned RNA
agaaagtcctctgatggaatctgactggcaaagacagttgccgagctttctctgtcctagccaccctcttcacaagcc

SEQ ID NO: 3269 - DNA, 78 bp, Homo sapiens
  source 1..78: mol_type = unassigned DNA
agaaagtcctctgatggaatctgactggcaaagacagttgccgagctttctctgtcctagccaccctcttcacaagcc

SEQ ID NO: 3270 - DNA, 78 bp, Homo sapiens
  source 1..78: mol_type = unassigned DNA
ggcttgtgaagagggtggctaggacagagaaagctcggcaactgtctttgccagtcagattccatcagaggactttct

SEQ ID NO: 3271 - RNA, 46 nt, Homo sapiens
  source 1..46: mol_type = unassigned RNA
gggttaagaccagacaggatttttagaaatagggaccttggggctg

SEQ ID NO: 3272 - DNA, 46 bp, Homo sapiens
  source 1..46: mol_type = unassigned DNA
gggttaagaccagacaggatttttagaaatagggaccttggggctg

SEQ ID NO: 3273 - DNA, 46 bp, Homo sapiens
  source 1..46: mol_type = unassigned DNA
cagccccaaggtccctatttctaaaaatcctgtctggtcttaaccc

SEQ ID NO: 3274 - RNA, 23 nt, Homo sapiens
  source 1..23: mol_type = unassigned RNA
taatttagtaggtgtgtggtggg

SEQ ID NO: 3275 - DNA, 23 bp, Homo sapiens
  source 1..23: mol_type = unassigned DNA
taatttagtaggtgtgtggtggg

SEQ ID NO: 3276 - DNA, 23 bp, Homo sapiens
  source 1..23: mol_type = unassigned DNA
cccaccacacacctactaaatta

SEQ ID NO: 3277 - RNA, 32 nt, Homo sapiens
  source 1..32: mol_type = unassigned RNA
ccatcggtacagatctggacgcagtgcgaaca

SEQ ID NO: 3278 - DNA, 32 bp, Homo sapiens
  source 1..32: mol_type = unassigned DNA
ccatcggtacagatctggacgcagtgcgaaca

SEQ ID NO: 3279 - DNA, 32 bp, Homo sapiens
  source 1..32: mol_type = unassigned DNA
tgttcgcactgcgtccagatctgtaccgatgg

SEQ ID NO: 3280 - RNA, 28 nt, Homo sapiens
  source 1..28: mol_type = unassigned RNA
aaaatcctgtacaggactatgagctttt

SEQ ID NO: 3281 - DNA, 28 bp, Homo sapiens
  source 1..28: mol_type = unassigned DNA
aaaatcctgtacaggactatgagctttt

SEQ ID NO: 3282 - DNA, 28 bp, Homo sapiens
  source 1..28: mol_type = unassigned DNA
aaaagctcatagtcctgtacaggatttt

SEQ ID NO: 3283 - RNA, 54 nt, Homo sapiens
  source 1..54: mol_type = unassigned RNA
ttcagcttaatgattcactggtagatctcacaggacttagaagctcttatactc

SEQ ID NO: 3284 - DNA, 54 bp, Homo sapiens
  source 1..54: mol_type = unassigned DNA
ttcagcttaatgattcactggtagatctcacaggacttagaagctcttatactc

SEQ ID NO: 3285 - DNA, 54 bp, Homo sapiens
  source 1..54: mol_type = unassigned DNA
gagtataagagcttctaagtcctgtgagatctaccagtgaatcattaagctgaa

SEQ ID NO: 3286 - RNA, 84 nt, Homo sapiens
  source 1..84: mol_type = unassigned RNA
acctgtgtacatgctgagcaacaccacagcagttgctgaggcctgggcttgcctggaccacaagtttgacctgatgtatgataa

SEQ ID NO: 3287 - DNA, 84 bp, Homo sapiens
  source 1..84: mol_type = unassigned DNA
acctgtgtacatgctgagcaacaccacagcagttgctgaggcctgggcttgcctggaccacaagtttgacctgatgtatgataa

SEQ ID NO: 3288 - DNA, 84 bp, Homo sapiens
  source 1..84: mol_type = unassigned DNA
ttatcatacatcaggtcaaacttgtggtccaggcaagcccaggcctcagcaactgctgtggtgttgctcagcatgtacacaggt

SEQ ID NO: 3289 - RNA, 40 nt, Homo sapiens
  source 1..40: mol_type = unassigned RNA
gttaagcctggattcttccctcctctcctcccataaatag

SEQ ID NO: 3290 - DNA, 40 bp, Homo sapiens
  source 1..40: mol_type = unassigned DNA
gttaagcctggattcttccctcctctcctcccataaatag

SEQ ID NO: 3291 - DNA, 40 bp, Homo sapiens
  source 1..40: mol_type = unassigned DNA
ctatttatgggaggagaggagggaagaatccaggcttaac

SEQ ID NO: 3292 - RNA, 26 nt, Homo sapiens
  source 1..26: mol_type = unassigned RNA
aaaacattcagggacaacactttaat

SEQ ID NO: 3293 - DNA, 26 bp, Homo sapiens
  source 1..26: mol_type = unassigned DNA
aaaacattcagggacaacactttaat

SEQ ID NO: 3294 - DNA, 26 bp, Homo sapiens
  source 1..26: mol_type = unassigned DNA
attaaagtgttgtccctgaatgtttt

SEQ ID NO: 3295 - RNA, 28 nt, Homo sapiens
  source 1..28: mol_type = unassigned RNA
gggctttctcgcacaatagacctttgtg

SEQ ID NO: 3296 - DNA, 28 bp, Homo sapiens
  source 1..28: mol_type = unassigned DNA
gggctttctcgcacaatagacctttgtg

SEQ ID NO: 3297 - DNA, 28 bp, Homo sapiens
  source 1..28: mol_type = unassigned DNA
cacaaaggtctattgtgcgagaaagccc

SEQ ID NO: 3298 - RNA, 179 nt, Homo sapiens
  source 1..179: mol_type = unassigned RNA
gattttcatttgacatcttcctaatctccctaggtggtggattccaacgagtgaggactcacttgtatggctctctgctttattacttacagattgcccagagacctgatgaaccagacaccttagaagcaggtagaatgagatcaattcctaatcttttctggattgggagatggtta

SEQ ID NO: 3299 - DNA, 179 bp, Homo sapiens
  source 1..179: mol_type = unassigned DNA
gattttcatttgacatcttcctaatctccctaggtggtggattccaacgagtgaggactcacttgtatggctctctgctttattacttacagattgcccagagacctgatgaaccagacaccttagaagcaggtagaatgagatcaattcctaatcttttctggattgggagatggtta

SEQ ID NO: 3300 - DNA, 179 bp, Homo sapiens
  source 1..179: mol_type = unassigned DNA
taaccatctcccaatccagaaaagattaggaattgatctcattctacctgcttctaaggtgtctggttcatcaggtctctgggcaatctgtaagtaataaagcagagagccatacaagtgagtcctcactcgttggaatccaccacctagggagattaggaagatgtcaaatgaaaatc

SEQ ID NO: 3301 - RNA, 32 nt, Homo sapiens
  source 1..32: mol_type = unassigned RNA
tgaaaaagggtttggactgagggaaataagtt

SEQ ID NO: 3302 - DNA, 32 bp, Homo sapiens
  source 1..32: mol_type = unassigned DNA
tgaaaaagggtttggactgagggaaataagtt

SEQ ID NO: 3303 - DNA, 32 bp, Homo sapiens
  source 1..32: mol_type = unassigned DNA
aacttatttccctcagtccaaaccctttttca

SEQ ID NO: 3304 - RNA, 34 nt, Homo sapiens
  source 1..34: mol_type = unassigned RNA
aatggtttaggacctgtgggacaaataaaaaact

SEQ ID NO: 3305 - DNA, 34 bp, Homo sapiens
  source 1..34: mol_type = unassigned DNA
aatggtttaggacctgtgggacaaataaaaaact

SEQ ID NO: 3306 - DNA, 34 bp, Homo sapiens
  source 1..34: mol_type = unassigned DNA
agttttttatttgtcccacaggtcctaaaccatt

SEQ ID NO: 3307 - RNA, 32 nt, Homo sapiens
  source 1..32: mol_type = unassigned RNA
aacagaatgaaatggccagattgaaagcagca

SEQ ID NO: 3308 - DNA, 32 bp, Homo sapiens
  source 1..32: mol_type = unassigned DNA
aacagaatgaaatggccagattgaaagcagca

SEQ ID NO: 3309 - DNA, 32 bp, Homo sapiens
  source 1..32: mol_type = unassigned DNA
tgctgctttcaatctggccatttcattctgtt

SEQ ID NO: 3310 - RNA, 131 nt, Homo sapiens
  source 1..131: mol_type = unassigned RNA
ctagggaagggcagatctgtacatttattctcacacaatgtagataccatgctattaactattatcttatgcctatgcagtcttctgtcttccttcacttcaaaaggtaaaactttgaagtcgaagggtct

SEQ ID NO: 3311 - DNA, 131 bp, Homo sapiens
  source 1..131: mol_type = unassigned DNA
ctagggaagggcagatctgtacatttattctcacacaatgtagataccatgctattaactattatcttatgcctatgcagtcttctgtcttccttcacttcaaaaggtaaaactttgaagtcgaagggtct

SEQ ID NO: 3312 - DNA, 131 bp, Homo sapiens
  source 1..131: mol_type = unassigned DNA
agacccttcgacttcaaagttttaccttttgaagtgaaggaagacagaagactgcataggcataagataatagttaatagcatggtatctacattgtgtgagaataaatgtacagatctgcccttccctag

SEQ ID NO: 3313 - RNA, 64 nt, Homo sapiens
  source 1..64: mol_type = unassigned RNA
ttagatgatagactgttggtcacaaaggttctcaactaatggtagaactcacttcctgagccac

SEQ ID NO: 3314 - DNA, 64 bp, Homo sapiens
  source 1..64: mol_type = unassigned DNA
ttagatgatagactgttggtcacaaaggttctcaactaatggtagaactcacttcctgagccac

SEQ ID NO: 3315 - DNA, 64 bp, Homo sapiens
  source 1..64: mol_type = unassigned DNA
gtggctcaggaagtgagttctaccattagttgagaacctttgtgaccaacagtctatcatctaa

SEQ ID NO: 3316 - RNA, 29 nt, Homo sapiens
  source 1..29: mol_type = unassigned RNA
tagggaggtaaggattgtggggattcgag

SEQ ID NO: 3317 - DNA, 29 bp, Homo sapiens
  source 1..29: mol_type = unassigned DNA
tagggaggtaaggattgtggggattcgag

SEQ ID NO: 3318 - DNA, 29 bp, Homo sapiens
  source 1..29: mol_type = unassigned DNA
ctcgaatccccacaatccttacctcccta

SEQ ID NO: 3319 - RNA, 61 nt, Homo sapiens
  source 1..61: mol_type = unassigned RNA
ctgagtatccgacaaccattggccctgaaacccagagaatgctcaaatagattttctatat

SEQ ID NO: 3320 - DNA, 61 bp, Homo sapiens
  source 1..61: mol_type = unassigned DNA
ctgagtatccgacaaccattggccctgaaacccagagaatgctcaaatagattttctatat

SEQ ID NO: 3321 - DNA, 61 bp, Homo sapiens
  source 1..61: mol_type = unassigned DNA
atatagaaaatctatttgagcattctctgggtttcagggccaatggttgtcggatactcag

SEQ ID NO: 3322 - RNA, 24 nt, Homo sapiens
  source 1..24: mol_type = unassigned RNA
actcaaactgtgagtgcaaaaagt

SEQ ID NO: 3323 - DNA, 24 bp, Homo sapiens
  source 1..24: mol_type = unassigned DNA
actcaaactgtgagtgcaaaaagt

SEQ ID NO: 3324 - DNA, 24 bp, Homo sapiens
  source 1..24: mol_type = unassigned DNA
actttttgcactcacagtttgagt

SEQ ID NO: 3325 - RNA, 29 nt, Homo sapiens
  source 1..29: mol_type = unassigned RNA
aagcaggtgattgttcggaaggaagatgt

SEQ ID NO: 3326 - DNA, 29 bp, Homo sapiens
  source 1..29: mol_type = unassigned DNA
aagcaggtgattgttcggaaggaagatgt

SEQ ID NO: 3327 - DNA, 29 bp, Homo sapiens
  source 1..29: mol_type = unassigned DNA
acatcttccttccgaacaatcacctgctt

SEQ ID NO: 3328 - RNA, 46 nt, Homo sapiens
  source 1..46: mol_type = unassigned RNA
tttgtcaagcatcattgtacatgtctctgtgactttttaaggtgag

SEQ ID NO: 3329 - DNA, 46 bp, Homo sapiens
  source 1..46: mol_type = unassigned DNA
tttgtcaagcatcattgtacatgtctctgtgactttttaaggtgag

SEQ ID NO: 3330 - DNA, 46 bp, Homo sapiens
  source 1..46: mol_type = unassigned DNA
ctcaccttaaaaagtcacagagacatgtacaatgatgcttgacaaa

SEQ ID NO: 3331 - RNA, 171 nt, Homo sapiens
  source 1..171: mol_type = unassigned RNA
acccccaaaaagctcgggaagtagtggactgtttttacccctcctgggatcaccactgacagcatccatgaagttctgacagaagaacacaccaggatgacaaagtagtgacttttaaagagcagccaacaacaagcatatagggaatctctcagcaaatacaggtaggag

SEQ ID NO: 3332 - DNA, 171 bp, Homo sapiens
  source 1..171: mol_type = unassigned DNA
acccccaaaaagctcgggaagtagtggactgtttttacccctcctgggatcaccactgacagcatccatgaagttctgacagaagaacacaccaggatgacaaagtagtgacttttaaagagcagccaacaacaagcatatagggaatctctcagcaaatacaggtaggag

SEQ ID NO: 3333 - DNA, 171 bp, Homo sapiens
  source 1..171: mol_type = unassigned DNA
ctcctacctgtatttgctgagagattccctatatgcttgttgttggctgctctttaaaagtcactactttgtcatcctggtgtgttcttctgtcagaacttcatggatgctgtcagtggtgatcccaggaggggtaaaaacagtccactacttcccgagctttttgggggt

SEQ ID NO: 3334 - RNA, 32 nt, Homo sapiens
  source 1..32: mol_type = unassigned RNA
attcgcactgagtttgaccaggagattgacat

SEQ ID NO: 3335 - DNA, 32 bp, Homo sapiens
  source 1..32: mol_type = unassigned DNA
attcgcactgagtttgaccaggagattgacat

SEQ ID NO: 3336 - DNA, 32 bp, Homo sapiens
  source 1..32: mol_type = unassigned DNA
atgtcaatctcctggtcaaactcagtgcgaat

SEQ ID NO: 3337 - RNA, 33 nt, Homo sapiens
  source 1..33: mol_type = unassigned RNA
aaccatgagatcccaaggatggagaacaactta

SEQ ID NO: 3338 - DNA, 33 bp, Homo sapiens
  source 1..33: mol_type = unassigned DNA
aaccatgagatcccaaggatggagaacaactta

SEQ ID NO: 3339 - DNA, 33 bp, Homo sapiens
  source 1..33: mol_type = unassigned DNA
taagttgttctccatccttgggatctcatggtt

SEQ ID NO: 3340 - RNA, 25 nt, Homo sapiens
  source 1..25: mol_type = unassigned RNA
ttttattgtgtcctgctttatggct

SEQ ID NO: 3341 - DNA, 25 bp, Homo sapiens
  source 1..25: mol_type = unassigned DNA
ttttattgtgtcctgctttatggct

SEQ ID NO: 3342 - DNA, 25 bp, Homo sapiens
  source 1..25: mol_type = unassigned DNA
agccataaagcaggacacaataaaa

SEQ ID NO: 3343 - RNA, 54 nt, Homo sapiens
  source 1..54: mol_type = unassigned RNA
aagaccctaaagatcgtccttctgctgcacacattgttgaagctctggaaacag

SEQ ID NO: 3344 - DNA, 54 bp, Homo sapiens
  source 1..54: mol_type = unassigned DNA
aagaccctaaagatcgtccttctgctgcacacattgttgaagctctggaaacag

SEQ ID NO: 3345 - DNA, 54 bp, Homo sapiens
  source 1..54: mol_type = unassigned DNA
ctgtttccagagcttcaacaatgtgtgcagcagaaggacgatctttagggtctt

SEQ ID NO: 3346 - RNA, 165 nt, Homo sapiens
  source 1..165: mol_type = unassigned RNA
actgtgcgccggcgcccgcgcgccgcgcctctgtgcgcctgcgccggcgcgccgcgtctctgtcaatttagaaagcttattttgccaagattaaggacacgaccatgacacagcctcaggaggtcctgacgacgtgtgtccaaggtggccagggtagagcttgct

SEQ ID NO: 3347 - DNA, 165 bp, Homo sapiens
  source 1..165: mol_type = unassigned DNA
actgtgcgccggcgcccgcgcgccgcgcctctgtgcgcctgcgccggcgcgccgcgtctctgtcaatttagaaagcttattttgccaagattaaggacacgaccatgacacagcctcaggaggtcctgacgacgtgtgtccaaggtggccagggtagagcttgct

SEQ ID NO: 3348 - DNA, 165 bp, Homo sapiens
  source 1..165: mol_type = unassigned DNA
agcaagctctaccctggccaccttggacacacgtcgtcaggacctcctgaggctgtgtcatggtcgtgtccttaatcttggcaaaataagctttctaaattgacagagacgcggcgcgccggcgcaggcgcacagaggcgcggcgcgcgggcgccggcgcacagt

SEQ ID NO: 3349 - RNA, 104 nt, Homo sapiens
  source 1..104: mol_type = unassigned RNA
ctggggccactcagttgctacagactcctcactccctggaggcctttcctgaagaggagtgtagacttgtgagccagactgcaagagcaattgtcttccactac

SEQ ID NO: 3350 - DNA, 104 bp, Homo sapiens
  source 1..104: mol_type = unassigned DNA
ctggggccactcagttgctacagactcctcactccctggaggcctttcctgaagaggagtgtagacttgtgagccagactgcaagagcaattgtcttccactac

SEQ ID NO: 3351 - DNA, 104 bp, Homo sapiens
  source 1..104: mol_type = unassigned DNA
gtagtggaagacaattgctcttgcagtctggctcacaagtctacactcctcttcaggaaaggcctccagggagtgaggagtctgtagcaactgagtggccccag

SEQ ID NO: 3352 - RNA, 97 nt, Homo sapiens
  source 1..97: mol_type = unassigned RNA
ccccttcccccacctcacctagactggagaattggcaagtgctgaggtaacagagagaggagagagccagagagggacctgagctttcccaagggat

SEQ ID NO: 3353 - DNA, 97 bp, Homo sapiens
  source 1..97: mol_type = unassigned DNA
ccccttcccccacctcacctagactggagaattggcaagtgctgaggtaacagagagaggagagagccagagagggacctgagctttcccaagggat

SEQ ID NO: 3354 - DNA, 97 bp, Homo sapiens
  source 1..97: mol_type = unassigned DNA
atcccttgggaaagctcaggtccctctctggctctctcctctctctgttacctcagcacttgccaattctccagtctaggtgaggtgggggaagggg

SEQ ID NO: 3355 - RNA, 31 nt, Homo sapiens
  source 1..31: mol_type = unassigned RNA
cctgcactctccagccctcctctaggtatgg

SEQ ID NO: 3356 - DNA, 31 bp, Homo sapiens
  source 1..31: mol_type = unassigned DNA
cctgcactctccagccctcctctaggtatgg

SEQ ID NO: 3357 - DNA, 31 bp, Homo sapiens
  source 1..31: mol_type = unassigned DNA
ccatacctagaggagggctggagagtgcagg

SEQ ID NO: 3358 - RNA, 37 nt, Homo sapiens
  source 1..37: mol_type = unassigned RNA
gcttgttttggcttacttggttctgaaggcttttttt

SEQ ID NO: 3359 - DNA, 37 bp, Homo sapiens
  source 1..37: mol_type = unassigned DNA
gcttgttttggcttacttggttctgaaggcttttttt

SEQ ID NO: 3360 - DNA, 37 bp, Homo sapiens
  source 1..37: mol_type = unassigned DNA
aaaaaaagccttcagaaccaagtaagccaaaacaagc

SEQ ID NO: 3361 - RNA, 25 nt, Homo sapiens
  source 1..25: mol_type = unassigned RNA
aacccagtgaaccggtcctttttat

SEQ ID NO: 3362 - DNA, 25 bp, Homo sapiens
  source 1..25: mol_type = unassigned DNA
aacccagtgaaccggtcctttttat

SEQ ID NO: 3363 - DNA, 25 bp, Homo sapiens
  source 1..25: mol_type = unassigned DNA
ataaaaaggaccggttcactgggtt

SEQ ID NO: 3364 - RNA, 34 nt, Homo sapiens
  source 1..34: mol_type = unassigned RNA
cctgttccaggacagatcacaaggctgagggtta

SEQ ID NO: 3365 - DNA, 34 bp, Homo sapiens
  source 1..34: mol_type = unassigned DNA
cctgttccaggacagatcacaaggctgagggtta

SEQ ID NO: 3366 - DNA, 34 bp, Homo sapiens
  source 1..34: mol_type = unassigned DNA
taaccctcagccttgtgatctgtcctggaacagg

SEQ ID NO: 3367 - RNA, 31 nt, Homo sapiens
  source 1..31: mol_type = unassigned RNA
ccaaagacagccaggtcgggcccgacgtgaa

SEQ ID NO: 3368 - DNA, 31 bp, Homo sapiens
  source 1..31: mol_type = unassigned DNA
ccaaagacagccaggtcgggcccgacgtgaa

SEQ ID NO: 3369 - DNA, 31 bp, Homo sapiens
  source 1..31: mol_type = unassigned DNA
ttcacgtcgggcccgacctggctgtctttgg

SEQ ID NO: 3370 - RNA, 143 nt, Homo sapiens
  source 1..143: mol_type = unassigned RNA
gctcttatttcattttaaaggtttgaaaccaggtcagagaaaggttttgtttacttgcttcaaacggaatgacaagcgagaagtaaaggttgcccaattagctggatcagtggctgaaatgtcttcttatcatcatggtgagg

SEQ ID NO: 3371 - DNA, 143 bp, Homo sapiens
  source 1..143: mol_type = unassigned DNA
gctcttatttcattttaaaggtttgaaaccaggtcagagaaaggttttgtttacttgcttcaaacggaatgacaagcgagaagtaaaggttgcccaattagctggatcagtggctgaaatgtcttcttatcatcatggtgagg

SEQ ID NO: 3372 - DNA, 143 bp, Homo sapiens
  source 1..143: mol_type = unassigned DNA
cctcaccatgatgataagaagacatttcagccactgatccagctaattgggcaacctttacttctcgcttgtcattccgtttgaagcaagtaaacaaaacctttctctgacctggtttcaaacctttaaaatgaaataagagc

SEQ ID NO: 3373 - RNA, 53 nt, Homo sapiens
  source 1..53: mol_type = unassigned RNA
ctgtcctgagccgtctaatgtctcatcggattcctcacactgagctgaatggg

SEQ ID NO: 3374 - DNA, 53 bp, Homo sapiens
  source 1..53: mol_type = unassigned DNA
ctgtcctgagccgtctaatgtctcatcggattcctcacactgagctgaatggg

SEQ ID NO: 3375 - DNA, 53 bp, Homo sapiens
  source 1..53: mol_type = unassigned DNA
cccattcagctcagtgtgaggaatccgatgagacattagacggctcaggacag

SEQ ID NO: 3376 - RNA, 162 nt, Homo sapiens
  source 1..162: mol_type = unassigned RNA
cgagtcctttaacctccactacagtcatatgaagtagtaaattcatatgactgtaaaacaagggttttaaggaaattaagacactgagaggtgaagtaactgccaggaaggataggaactgaacgttgcaatgtgatgtatgagtgagaaggaagtgaggga

SEQ ID NO: 3377 - DNA, 162 bp, Homo sapiens
  source 1..162: mol_type = unassigned DNA
cgagtcctttaacctccactacagtcatatgaagtagtaaattcatatgactgtaaaacaagggttttaaggaaattaagacactgagaggtgaagtaactgccaggaaggataggaactgaacgttgcaatgtgatgtatgagtgagaaggaagtgaggga

SEQ ID NO: 3378 - DNA, 162 bp, Homo sapiens
  source 1..162: mol_type = unassigned DNA
tccctcacttccttctcactcatacatcacattgcaacgttcagttcctatccttcctggcagttacttcacctctcagtgtcttaatttccttaaaacccttgttttacagtcatatgaatttactacttcatatgactgtagtggaggttaaaggactcg

SEQ ID NO: 3379 - RNA, 136 nt, Homo sapiens
  source 1..136: mol_type = unassigned RNA
tgggaggggcttggagcagaagtgaaagtggactctggctgtacctctcggggcacagggtacaacctcaggaaaccccggacagggctggctgagcacgtgcgtccccgtcaccctggggcagcaggacctctgg

SEQ ID NO: 3380 - DNA, 136 bp, Homo sapiens
  source 1..136: mol_type = unassigned DNA
tgggaggggcttggagcagaagtgaaagtggactctggctgtacctctcggggcacagggtacaacctcaggaaaccccggacagggctggctgagcacgtgcgtccccgtcaccctggggcagcaggacctctgg

SEQ ID NO: 3381 - DNA, 136 bp, Homo sapiens
  source 1..136: mol_type = unassigned DNA
ccagaggtcctgctgccccagggtgacggggacgcacgtgctcagccagccctgtccggggtttcctgaggttgtaccctgtgccccgagaggtacagccagagtccactttcacttctgctccaagcccctccca

SEQ ID NO: 3382 - RNA, 25 nt, Homo sapiens
  source 1..25: mol_type = unassigned RNA
ttagttcagcaggctgatgttaaaa

SEQ ID NO: 3383 - DNA, 25 bp, Homo sapiens
  source 1..25: mol_type = unassigned DNA
ttagttcagcaggctgatgttaaaa

SEQ ID NO: 3384 - DNA, 25 bp, Homo sapiens
  source 1..25: mol_type = unassigned DNA
ttttaacatcagcctgctgaactaa

SEQ ID NO: 3385 - RNA, 34 nt, Homo sapiens
  source 1..34: mol_type = unassigned RNA
ccaggaatgagatgctggacattgtggatgccat

SEQ ID NO: 3386 - DNA, 34 bp, Homo sapiens
  source 1..34: mol_type = unassigned DNA
ccaggaatgagatgctggacattgtggatgccat

SEQ ID NO: 3387 - DNA, 34 bp, Homo sapiens
  source 1..34: mol_type = unassigned DNA
atggcatccacaatgtccagcatctcattcctgg

SEQ ID NO: 3388 - RNA, 53 nt, Homo sapiens
  source 1..53: mol_type = unassigned RNA
tgatgtggatcaccctgggagaaccaactccttcctgtgtaatgctggaagtg

SEQ ID NO: 3389 - DNA, 53 bp, Homo sapiens
  source 1..53: mol_type = unassigned DNA
tgatgtggatcaccctgggagaaccaactccttcctgtgtaatgctggaagtg

SEQ ID NO: 3390 - DNA, 53 bp, Homo sapiens
  source 1..53: mol_type = unassigned DNA
cacttccagcattacacaggaaggagttggttctcccagggtgatccacatca

SEQ ID NO: 3391 - RNA, 29 nt, Homo sapiens
  source 1..29: mol_type = unassigned RNA
aagtttaactttgagccgggcgtggtagc

SEQ ID NO: 3392 - DNA, 29 bp, Homo sapiens
  source 1..29: mol_type = unassigned DNA
aagtttaactttgagccgggcgtggtagc

SEQ ID NO: 3393 - DNA, 29 bp, Homo sapiens
  source 1..29: mol_type = unassigned DNA
gctaccacgcccggctcaaagttaaactt

SEQ ID NO: 3394 - RNA, 33 nt, Homo sapiens
  source 1..33: mol_type = unassigned RNA
acaggaaagactgtgaactcctgagttcagctt

SEQ ID NO: 3395 - DNA, 33 bp, Homo sapiens
  source 1..33: mol_type = unassigned DNA
acaggaaagactgtgaactcctgagttcagctt

SEQ ID NO: 3396 - DNA, 33 bp, Homo sapiens
  source 1..33: mol_type = unassigned DNA
aagctgaactcaggagttcacagtctttcctgt

SEQ ID NO: 3397 - RNA, 29 nt, Homo sapiens
  source 1..29: mol_type = unassigned RNA
ttttcaaaacctggtgctggaggctggca

SEQ ID NO: 3398 - DNA, 29 bp, Homo sapiens
  source 1..29: mol_type = unassigned DNA
ttttcaaaacctggtgctggaggctggca

SEQ ID NO: 3399 - DNA, 29 bp, Homo sapiens
  source 1..29: mol_type = unassigned DNA
tgccagcctccagcaccaggttttgaaaa

SEQ ID NO: 3400 - RNA, 23 nt, Homo sapiens
  source 1..23: mol_type = unassigned RNA
acagtggttatctactgtattgt

SEQ ID NO: 3401 - DNA, 23 bp, Homo sapiens
  source 1..23: mol_type = unassigned DNA
acagtggttatctactgtattgt

SEQ ID NO: 3402 - DNA, 23 bp, Homo sapiens
  source 1..23: mol_type = unassigned DNA
acaatacagtagataaccactgt

SEQ ID NO: 3403 - RNA, 37 nt, Homo sapiens
  source 1..37: mol_type = unassigned RNA
cccctgcacatgctgtcttgcctgccgtcatgtaaaa

SEQ ID NO: 3404 - DNA, 37 bp, Homo sapiens
  source 1..37: mol_type = unassigned DNA
cccctgcacatgctgtcttgcctgccgtcatgtaaaa

SEQ ID NO: 3405 - DNA, 37 bp, Homo sapiens
  source 1..37: mol_type = unassigned DNA
ttttacatgacggcaggcaagacagcatgtgcagggg

SEQ ID NO: 3406 - RNA, 49 nt, Homo sapiens
  source 1..49: mol_type = unassigned RNA
aaagcttctctggttcagaggtctacgcccaccctgaacacacggcaat

SEQ ID NO: 3407 - DNA, 49 bp, Homo sapiens
  source 1..49: mol_type = unassigned DNA
aaagcttctctggttcagaggtctacgcccaccctgaacacacggcaat

SEQ ID NO: 3408 - DNA, 49 bp, Homo sapiens
  source 1..49: mol_type = unassigned DNA
attgccgtgtgttcagggtgggcgtagacctctgaaccagagaagcttt

SEQ ID NO: 3409 - RNA, 26 nt, Homo sapiens
  source 1..26: mol_type = unassigned RNA
gtctaggtatatctggctgtatgagt

SEQ ID NO: 3410 - DNA, 26 bp, Homo sapiens
  source 1..26: mol_type = unassigned DNA
gtctaggtatatctggctgtatgagt

SEQ ID NO: 3411 - DNA, 26 bp, Homo sapiens
  source 1..26: mol_type = unassigned DNA
actcatacagccagatatacctagac

SEQ ID NO: 3412 - RNA, 47 nt, Homo sapiens
  source 1..47: mol_type = unassigned RNA
ttgtttgcatggtagaaatcccaccacaatttcagaaatttccccag

SEQ ID NO: 3413 - DNA, 47 bp, Homo sapiens
  source 1..47: mol_type = unassigned DNA
ttgtttgcatggtagaaatcccaccacaatttcagaaatttccccag

SEQ ID NO: 3414 - DNA, 47 bp, Homo sapiens
  source 1..47: mol_type = unassigned DNA
ctggggaaatttctgaaattgtggtgggatttctaccatgcaaacaa

SEQ ID NO: 3415 - RNA, 74 nt, Homo sapiens
  source 1..74: mol_type = unassigned RNA
catagctgtggacccagggaggctgaggcaggaggttcatgtaagcccaggaactggaggctgcagtcagctag

SEQ ID NO: 3416 - DNA, 74 bp, Homo sapiens
  source 1..74: mol_type = unassigned DNA
catagctgtggacccagggaggctgaggcaggaggttcatgtaagcccaggaactggaggctgcagtcagctag

SEQ ID NO: 3417 - DNA, 74 bp, Homo sapiens
  source 1..74: mol_type = unassigned DNA
ctagctgactgcagcctccagttcctgggcttacatgaacctcctgcctcagcctccctgggtccacagctatg

SEQ ID NO: 3418 - RNA, 38 nt, Homo sapiens
  source 1..38: mol_type = unassigned RNA
cacaaggcactgtgactagctaataagaggatggagaa

SEQ ID NO: 3419 - DNA, 38 bp, Homo sapiens
  source 1..38: mol_type = unassigned DNA
cacaaggcactgtgactagctaataagaggatggagaa

SEQ ID NO: 3420 - DNA, 38 bp, Homo sapiens
  source 1..38: mol_type = unassigned DNA
ttctccatcctcttattagctagtcacagtgccttgtg

SEQ ID NO: 3421 - RNA, 26 nt, Homo sapiens
  source 1..26: mol_type = unassigned RNA
ttgtatcactggtacaactcactgac

SEQ ID NO: 3422 - DNA, 26 bp, Homo sapiens
  source 1..26: mol_type = unassigned DNA
ttgtatcactggtacaactcactgac

SEQ ID NO: 3423 - DNA, 26 bp, Homo sapiens
  source 1..26: mol_type = unassigned DNA
gtcagtgagttgtaccagtgatacaa

SEQ ID NO: 3424 - RNA, 45 nt, Homo sapiens
  source 1..45: mol_type = unassigned RNA
gactaaactggttgtggtagtatcagactatgtggactggtgaca

SEQ ID NO: 3425 - DNA, 45 bp, Homo sapiens
  source 1..45: mol_type = unassigned DNA
gactaaactggttgtggtagtatcagactatgtggactggtgaca

SEQ ID NO: 3426 - DNA, 45 bp, Homo sapiens
  source 1..45: mol_type = unassigned DNA
tgtcaccagtccacatagtctgatactaccacaaccagtttagtc

SEQ ID NO: 3427 - RNA, 27 nt, Homo sapiens
  source 1..27: mol_type = unassigned RNA
tttcgaggttcatttcctgttggtgtt

SEQ ID NO: 3428 - DNA, 27 bp, Homo sapiens
  source 1..27: mol_type = unassigned DNA
tttcgaggttcatttcctgttggtgtt

SEQ ID NO: 3429 - DNA, 27 bp, Homo sapiens
  source 1..27: mol_type = unassigned DNA
aacaccaacaggaaatgaacctcgaaa

SEQ ID NO: 3430 - RNA, 29 nt, Homo sapiens
  source 1..29: mol_type = unassigned RNA
ttgctggtgccgggtgatgatggaaaata

SEQ ID NO: 3431 - DNA, 29 bp, Homo sapiens
  source 1..29: mol_type = unassigned DNA
ttgctggtgccgggtgatgatggaaaata

SEQ ID NO: 3432 - DNA, 29 bp, Homo sapiens
  source 1..29: mol_type = unassigned DNA
tattttccatcatcacccggcaccagcaa

SEQ ID NO: 3433 - RNA, 24 nt, Homo sapiens
  source 1..24: mol_type = unassigned RNA
gcaccatcttcccttctctttgtc

SEQ ID NO: 3434 - DNA, 24 bp, Homo sapiens
  source 1..24: mol_type = unassigned DNA
gcaccatcttcccttctctttgtc

SEQ ID NO: 3435 - DNA, 24 bp, Homo sapiens
  source 1..24: mol_type = unassigned DNA
gacaaagagaagggaagatggtgc

SEQ ID NO: 3436 - RNA, 89 nt, Homo sapiens
  source 1..89: mol_type = unassigned RNA
cctccagggccgttggtgagtgtggccagcccatgccaggctcctacctgcgggatgatggtcagctgagagcgcaggtcatggaggcc

SEQ ID NO: 3437 - DNA, 89 bp, Homo sapiens
  source 1..89: mol_type = unassigned DNA
cctccagggccgttggtgagtgtggccagcccatgccaggctcctacctgcgggatgatggtcagctgagagcgcaggtcatggaggcc

SEQ ID NO: 3438 - DNA, 89 bp, Homo sapiens
  source 1..89: mol_type = unassigned DNA
ggcctccatgacctgcgctctcagctgaccatcatcccgcaggtaggagcctggcatgggctggccacactcaccaacggccctggagg

SEQ ID NO: 3439 - RNA, 25 nt, Homo sapiens
  source 1..25: mol_type = unassigned RNA
gtttgcaatggtaggacttatagtg

SEQ ID NO: 3440 - DNA, 25 bp, Homo sapiens
  source 1..25: mol_type = unassigned DNA
gtttgcaatggtaggacttatagtg

SEQ ID NO: 3441 - DNA, 25 bp, Homo sapiens
  source 1..25: mol_type = unassigned DNA
cactataagtcctaccattgcaaac

SEQ ID NO: 3442 - RNA, 153 nt, Homo sapiens
  source 1..153: mol_type = unassigned RNA
attccggtaaatttaaaggactgttttaacatgataatttgtctcctaaaataatgtcccaggacccacactaacaaaagtcaaaattgaaggtgaacctgaattcagactgattaaagaaggtgaaacaataactgaagtgatccatggagg

SEQ ID NO: 3443 - DNA, 153 bp, Homo sapiens
  source 1..153: mol_type = unassigned DNA
attccggtaaatttaaaggactgttttaacatgataatttgtctcctaaaataatgtcccaggacccacactaacaaaagtcaaaattgaaggtgaacctgaattcagactgattaaagaaggtgaaacaataactgaagtgatccatggagg

SEQ ID NO: 3444 - DNA, 153 bp, Homo sapiens
  source 1..153: mol_type = unassigned DNA
cctccatggatcacttcagttattgtttcaccttctttaatcagtctgaattcaggttcaccttcaattttgacttttgttagtgtgggtcctgggacattattttaggagacaaattatcatgttaaaacagtcctttaaatttaccggaat

SEQ ID NO: 3445 - RNA, 38 nt, Homo sapiens
  source 1..38: mol_type = unassigned RNA
gtatggcactggtataagtactgacaggtagagaagat

SEQ ID NO: 3446 - DNA, 38 bp, Homo sapiens
  source 1..38: mol_type = unassigned DNA
gtatggcactggtataagtactgacaggtagagaagat

SEQ ID NO: 3447 - DNA, 38 bp, Homo sapiens
  source 1..38: mol_type = unassigned DNA
atcttctctacctgtcagtacttataccagtgccatac

SEQ ID NO: 3448 - RNA, 24 nt, Homo sapiens
  source 1..24: mol_type = unassigned RNA
gagatggttatctagtgtaggagg

SEQ ID NO: 3449 - DNA, 24 bp, Homo sapiens
  source 1..24: mol_type = unassigned DNA
gagatggttatctagtgtaggagg

SEQ ID NO: 3450 - DNA, 24 bp, Homo sapiens
  source 1..24: mol_type = unassigned DNA
cctcctacactagataaccatctc

SEQ ID NO: 3451 - RNA, 26 nt, Homo sapiens
  source 1..26: mol_type = unassigned RNA
aatgccaatgggacaactcacacttg

SEQ ID NO: 3452 - DNA, 26 bp, Homo sapiens
  source 1..26: mol_type = unassigned DNA
aatgccaatgggacaactcacacttg

SEQ ID NO: 3453 - DNA, 26 bp, Homo sapiens
  source 1..26: mol_type = unassigned DNA
caagtgtgagttgtcccattggcatt

SEQ ID NO: 3454 - RNA, 72 nt, Homo sapiens
  source 1..72: mol_type = unassigned RNA
ccaccgcgcctgggtgaactgatgagctcttacaagacctgatgtaccagatgctgacattagtttatatag

SEQ ID NO: 3455 - DNA, 72 bp, Homo sapiens
  source 1..72: mol_type = unassigned DNA
ccaccgcgcctgggtgaactgatgagctcttacaagacctgatgtaccagatgctgacattagtttatatag

SEQ ID NO: 3456 - DNA, 72 bp, Homo sapiens
  source 1..72: mol_type = unassigned DNA
ctatataaactaatgtcagcatctggtacatcaggtcttgtaagagctcatcagttcacccaggcgcggtgg

SEQ ID NO: 3457 - RNA, 57 nt, Homo sapiens
  source 1..57: mol_type = unassigned RNA
tacaggaatagcaagaccagcaagaagatcaccattgctgactgtggacaattctaa

SEQ ID NO: 3458 - DNA, 57 bp, Homo sapiens
  source 1..57: mol_type = unassigned DNA
tacaggaatagcaagaccagcaagaagatcaccattgctgactgtggacaattctaa

SEQ ID NO: 3459 - DNA, 57 bp, Homo sapiens
  source 1..57: mol_type = unassigned DNA
ttagaattgtccacagtcagcaatggtgatcttcttgctggtcttgctattcctgta

SEQ ID NO: 3460 - RNA, 29 nt, Homo sapiens
  source 1..29: mol_type = unassigned RNA
gcttatctgctgtgtcctgaacgacacct

SEQ ID NO: 3461 - DNA, 29 bp, Homo sapiens
  source 1..29: mol_type = unassigned DNA
gcttatctgctgtgtcctgaacgacacct

SEQ ID NO: 3462 - DNA, 29 bp, Homo sapiens
  source 1..29: mol_type = unassigned DNA
aggtgtcgttcaggacacagcagataagc

SEQ ID NO: 3463 - RNA, 73 nt, Homo sapiens
  source 1..73: mol_type = unassigned RNA
tgagaacagcatacatccattcttagttatgttcttctgtatgtagtgtatgtgtttttctagctgtatttga

SEQ ID NO: 3464 - DNA, 73 bp, Homo sapiens
  source 1..73: mol_type = unassigned DNA
tgagaacagcatacatccattcttagttatgttcttctgtatgtagtgtatgtgtttttctagctgtatttga

SEQ ID NO: 3465 - DNA, 73 bp, Homo sapiens
  source 1..73: mol_type = unassigned DNA
tcaaatacagctagaaaaacacatacactacatacagaagaacataactaagaatggatgtatgctgttctca

SEQ ID NO: 3466 - RNA, 43 nt, Homo sapiens
  source 1..43: mol_type = unassigned RNA
atgtacatgtgtatcaccactagagggaagcacttgaacaact

SEQ ID NO: 3467 - DNA, 43 bp, Homo sapiens
  source 1..43: mol_type = unassigned DNA
atgtacatgtgtatcaccactagagggaagcacttgaacaact

SEQ ID NO: 3468 - DNA, 43 bp, Homo sapiens
  source 1..43: mol_type = unassigned DNA
agttgttcaagtgcttccctctagtggtgatacacatgtacat

SEQ ID NO: 3469 - RNA, 34 nt, Homo sapiens
  source 1..34: mol_type = unassigned RNA
gcaagaagatcaccattgctgactgtggacagct

SEQ ID NO: 3470 - DNA, 34 bp, Homo sapiens
  source 1..34: mol_type = unassigned DNA
gcaagaagatcaccattgctgactgtggacagct

SEQ ID NO: 3471 - DNA, 34 bp, Homo sapiens
  source 1..34: mol_type = unassigned DNA
agctgtccacagtcagcaatggtgatcttcttgc

SEQ ID NO: 3472 - RNA, 30 nt, Homo sapiens
  source 1..30: mol_type = unassigned RNA
aggtttggacttggactagatgactctcaa

SEQ ID NO: 3473 - DNA, 30 bp, Homo sapiens
  source 1..30: mol_type = unassigned DNA
aggtttggacttggactagatgactctcaa

SEQ ID NO: 3474 - DNA, 30 bp, Homo sapiens
  source 1..30: mol_type = unassigned DNA
ttgagagtcatctagtccaagtccaaacct

SEQ ID NO: 3475 - RNA, 31 nt, Homo sapiens
  source 1..31: mol_type = unassigned RNA
gaggtgcatggcctggtcggcctcgggatcg

SEQ ID NO: 3476 - DNA, 31 bp, Homo sapiens
  source 1..31: mol_type = unassigned DNA
gaggtgcatggcctggtcggcctcgggatcg

SEQ ID NO: 3477 - DNA, 31 bp, Homo sapiens
  source 1..31: mol_type = unassigned DNA
cgatcccgaggccgaccaggccatgcacctc

SEQ ID NO: 3478 - RNA, 31 nt, Homo sapiens
  source 1..31: mol_type = unassigned RNA
tctcagagggactctggggcttggacacaaa

SEQ ID NO: 3479 - DNA, 31 bp, Homo sapiens
  source 1..31: mol_type = unassigned DNA
tctcagagggactctggggcttggacacaaa

SEQ ID NO: 3480 - DNA, 31 bp, Homo sapiens
  source 1..31: mol_type = unassigned DNA
tttgtgtccaagccccagagtccctctgaga

SEQ ID NO: 3481 - RNA, 112 nt, Homo sapiens
  source 1..112: mol_type = unassigned RNA
tgttagtaccagaacttctgaaataaacaaacctgtgtctatgttcatcgggtccatggatcaggaagactccggggtttttagcccctttaccggcatctacatgtggaat

SEQ ID NO: 3482 - DNA, 112 bp, Homo sapiens
  source 1..112: mol_type = unassigned DNA
tgttagtaccagaacttctgaaataaacaaacctgtgtctatgttcatcgggtccatggatcaggaagactccggggtttttagcccctttaccggcatctacatgtggaat

SEQ ID NO: 3483 - DNA, 112 bp, Homo sapiens
  source 1..112: mol_type = unassigned DNA
attccacatgtagatgccggtaaaggggctaaaaaccccggagtcttcctgatccatggacccgatgaacatagacacaggtttgtttatttcagaagttctggtactaaca

SEQ ID NO: 3484 - RNA, 37 nt, Homo sapiens
  source 1..37: mol_type = unassigned RNA
ttttccaatgttggaactcaacaagtccatccgatgg

SEQ ID NO: 3485 - DNA, 37 bp, Homo sapiens
  source 1..37: mol_type = unassigned DNA
ttttccaatgttggaactcaacaagtccatccgatgg

SEQ ID NO: 3486 - DNA, 37 bp, Homo sapiens
  source 1..37: mol_type = unassigned DNA
ccatcggatggacttgttgagttccaacattggaaaa

SEQ ID NO: 3487 - RNA, 112 nt, Homo sapiens
  source 1..112: mol_type = unassigned RNA
tgctttgctagctggactgagctgggctatactaagttgtctgacctttatcccgtacacaacaggaactacaggaggttttcaagaaagggagtgaagtcagattcatagt

SEQ ID NO: 3488 - DNA, 112 bp, Homo sapiens
  source 1..112: mol_type = unassigned DNA
tgctttgctagctggactgagctgggctatactaagttgtctgacctttatcccgtacacaacaggaactacaggaggttttcaagaaagggagtgaagtcagattcatagt

SEQ ID NO: 3489 - DNA, 112 bp, Homo sapiens
  source 1..112: mol_type = unassigned DNA
actatgaatctgacttcactccctttcttgaaaacctcctgtagttcctgttgtgtacgggataaaggtcagacaacttagtatagcccagctcagtccagctagcaaagca

SEQ ID NO: 3490 - RNA, 30 nt, Homo sapiens
  source 1..30: mol_type = unassigned RNA
gctccagtgccagacaggtaggacccagcc

SEQ ID NO: 3491 - DNA, 30 bp, Homo sapiens
  source 1..30: mol_type = unassigned DNA
gctccagtgccagacaggtaggacccagcc

SEQ ID NO: 3492 - DNA, 30 bp, Homo sapiens
  source 1..30: mol_type = unassigned DNA
ggctgggtcctacctgtctggcactggagc

SEQ ID NO: 3493 - RNA, 30 nt, Homo sapiens
  source 1..30: mol_type = unassigned RNA
tcagagttgtttgtgatgagtaaccttgag

SEQ ID NO: 3494 - DNA, 30 bp, Homo sapiens
  source 1..30: mol_type = unassigned DNA
tcagagttgtttgtgatgagtaaccttgag

SEQ ID NO: 3495 - DNA, 30 bp, Homo sapiens
  source 1..30: mol_type = unassigned DNA
ctcaaggttactcatcacaaacaactctga

SEQ ID NO: 3496 - RNA, 54 nt, Homo sapiens
  source 1..54: mol_type = unassigned RNA
ctttttttcctttggttggttcgttttggtgaggttcatttactcttgtagttt

SEQ ID NO: 3497 - DNA, 54 bp, Homo sapiens
  source 1..54: mol_type = unassigned DNA
ctttttttcctttggttggttcgttttggtgaggttcatttactcttgtagttt

SEQ ID NO: 3498 - DNA, 54 bp, Homo sapiens
  source 1..54: mol_type = unassigned DNA
aaactacaagagtaaatgaacctcaccaaaacgaaccaaccaaaggaaaaaaag

SEQ ID NO: 3499 - RNA, 29 nt, Homo sapiens
  source 1..29: mol_type = unassigned RNA
aatgggtctatggtagaacttacacaaaa

SEQ ID NO: 3500 - DNA, 29 bp, Homo sapiens
  source 1..29: mol_type = unassigned DNA
aatgggtctatggtagaacttacacaaaa

SEQ ID NO: 3501 - DNA, 29 bp, Homo sapiens
  source 1..29: mol_type = unassigned DNA
ttttgtgtaagttctaccatagacccatt

SEQ ID NO: 3502 - RNA, 75 nt, Homo sapiens
  source 1..75: mol_type = unassigned RNA
tgcattaaagccagcgcggggagacagacgtgaactgcgcccctgtctccttgtgggttggcctagaataaaagc

SEQ ID NO: 3503 - DNA, 75 bp, Homo sapiens
  source 1..75: mol_type = unassigned DNA
tgcattaaagccagcgcggggagacagacgtgaactgcgcccctgtctccttgtgggttggcctagaataaaagc

SEQ ID NO: 3504 - DNA, 75 bp, Homo sapiens
  source 1..75: mol_type = unassigned DNA
gcttttattctaggccaacccacaaggagacaggggcgcagttcacgtctgtctccccgcgctggctttaatgca

SEQ ID NO: 3505 - RNA, 38 nt, Homo sapiens
  source 1..38: mol_type = unassigned RNA
tgtatgtttatatagctggatgattggacagatgcaga

SEQ ID NO: 3506 - DNA, 38 bp, Homo sapiens
  source 1..38: mol_type = unassigned DNA
tgtatgtttatatagctggatgattggacagatgcaga

SEQ ID NO: 3507 - DNA, 38 bp, Homo sapiens
  source 1..38: mol_type = unassigned DNA
tctgcatctgtccaatcatccagctatataaacataca

SEQ ID NO: 3508 - RNA, 68 nt, Homo sapiens
  source 1..68: mol_type = unassigned RNA
tagcacttcgtaggaggaaggccaagcaacgtgactattacagatctatggattcacagcactgcttt

SEQ ID NO: 3509 - DNA, 68 bp, Homo sapiens
  source 1..68: mol_type = unassigned DNA
tagcacttcgtaggaggaaggccaagcaacgtgactattacagatctatggattcacagcactgcttt

SEQ ID NO: 3510 - DNA, 68 bp, Homo sapiens
  source 1..68: mol_type = unassigned DNA
aaagcagtgctgtgaatccatagatctgtaatagtcacgttgcttggccttcctcctacgaagtgcta

SEQ ID NO: 3511 - RNA, 63 nt, Homo sapiens
  source 1..63: mol_type = unassigned RNA
atgcaccaccctctccactcagccccgtttgtgagccagtcgcggtgcaggacactgatggtg

SEQ ID NO: 3512 - DNA, 63 bp, Homo sapiens
  source 1..63: mol_type = unassigned DNA
atgcaccaccctctccactcagccccgtttgtgagccagtcgcggtgcaggacactgatggtg

SEQ ID NO: 3513 - DNA, 63 bp, Homo sapiens
  source 1..63: mol_type = unassigned DNA
caccatcagtgtcctgcaccgcgactggctcacaaacggggctgagtggagagggtggtgcat

SEQ ID NO: 3514 - RNA, 68 nt, Homo sapiens
  source 1..68: mol_type = unassigned RNA
gagagatcgactctgtgagctccctgtgagatagactgcagctagtggccagtggcgatctcattatt

SEQ ID NO: 3515 - DNA, 68 bp, Homo sapiens
  source 1..68: mol_type = unassigned DNA
gagagatcgactctgtgagctccctgtgagatagactgcagctagtggccagtggcgatctcattatt

SEQ ID NO: 3516 - DNA, 68 bp, Homo sapiens
  source 1..68: mol_type = unassigned DNA
aataatgagatcgccactggccactagctgcagtctatctcacagggagctcacagagtcgatctctc

SEQ ID NO: 3517 - RNA, 140 nt, Homo sapiens
  source 1..140: mol_type = unassigned RNA
caaatttctaggctcaagcagtcctcccgcctcagcctcccaaagtgctaggattattggtgtgagaggaatccctttcaacccttgaaaataaatcaagcggtgatgaactccctgagcttatatttgcctaggaaggt

SEQ ID NO: 3518 - DNA, 140 bp, Homo sapiens
  source 1..140: mol_type = unassigned DNA
caaatttctaggctcaagcagtcctcccgcctcagcctcccaaagtgctaggattattggtgtgagaggaatccctttcaacccttgaaaataaatcaagcggtgatgaactccctgagcttatatttgcctaggaaggt

SEQ ID NO: 3519 - DNA, 140 bp, Homo sapiens
  source 1..140: mol_type = unassigned DNA
accttcctaggcaaatataagctcagggagttcatcaccgcttgatttattttcaagggttgaaagggattcctctcacaccaataatcctagcactttgggaggctgaggcgggaggactgcttgagcctagaaatttg

SEQ ID NO: 3520 - RNA, 30 nt, Homo sapiens
  source 1..30: mol_type = unassigned RNA
tggagtttgagtttgaccggctgagggcct

SEQ ID NO: 3521 - DNA, 30 bp, Homo sapiens
  source 1..30: mol_type = unassigned DNA
tggagtttgagtttgaccggctgagggcct

SEQ ID NO: 3522 - DNA, 30 bp, Homo sapiens
  source 1..30: mol_type = unassigned DNA
aggccctcagccggtcaaactcaaactcca

SEQ ID NO: 3523 - RNA, 47 nt, Homo sapiens
  source 1..47: mol_type = unassigned RNA
ggcactacatggtgctctaggctcattttgtgtatttcctgccccag

SEQ ID NO: 3524 - DNA, 47 bp, Homo sapiens
  source 1..47: mol_type = unassigned DNA
ggcactacatggtgctctaggctcattttgtgtatttcctgccccag

SEQ ID NO: 3525 - DNA, 47 bp, Homo sapiens
  source 1..47: mol_type = unassigned DNA
ctggggcaggaaatacacaaaatgagcctagagcaccatgtagtgcc

SEQ ID NO: 3526 - RNA, 30 nt, Homo sapiens
  source 1..30: mol_type = unassigned RNA
gtgggcgccgcgcgcttcccccgcttccca

SEQ ID NO: 3527 - DNA, 30 bp, Homo sapiens
  source 1..30: mol_type = unassigned DNA
gtgggcgccgcgcgcttcccccgcttccca

SEQ ID NO: 3528 - DNA, 30 bp, Homo sapiens
  source 1..30: mol_type = unassigned DNA
tgggaagcgggggaagcgcgcggcgcccac

SEQ ID NO: 3529 - RNA, 38 nt, Homo sapiens
  source 1..38: mol_type = unassigned RNA
tctgtttttatctaactgtaagaaccaggcttgtacta

SEQ ID NO: 3530 - DNA, 38 bp, Homo sapiens
  source 1..38: mol_type = unassigned DNA
tctgtttttatctaactgtaagaaccaggcttgtacta

SEQ ID NO: 3531 - DNA, 38 bp, Homo sapiens
  source 1..38: mol_type = unassigned DNA
tagtacaagcctggttcttacagttagataaaaacaga

SEQ ID NO: 3532 - RNA, 38 nt, Homo sapiens
  source 1..38: mol_type = unassigned RNA
ccatcaaaagtagactcttggccgggtgcggtggctca

SEQ ID NO: 3533 - DNA, 38 bp, Homo sapiens
  source 1..38: mol_type = unassigned DNA
ccatcaaaagtagactcttggccgggtgcggtggctca

SEQ ID NO: 3534 - DNA, 38 bp, Homo sapiens
  source 1..38: mol_type = unassigned DNA
tgagccaccgcacccggccaagagtctacttttgatgg

SEQ ID NO: 3535 - RNA, 31 nt, Homo sapiens
  source 1..31: mol_type = unassigned RNA
actctctgcctctctccctgccccaggctca

SEQ ID NO: 3536 - DNA, 31 bp, Homo sapiens
  source 1..31: mol_type = unassigned DNA
actctctgcctctctccctgccccaggctca

SEQ ID NO: 3537 - DNA, 31 bp, Homo sapiens
  source 1..31: mol_type = unassigned DNA
tgagcctggggcagggagagaggcagagagt

SEQ ID NO: 3538 - RNA, 38 nt, Homo sapiens
  source 1..38: mol_type = unassigned RNA
taattacggctcaagcaccaatgtttgtccaccgtttt

SEQ ID NO: 3539 - DNA, 38 bp, Homo sapiens
  source 1..38: mol_type = unassigned DNA
taattacggctcaagcaccaatgtttgtccaccgtttt

SEQ ID NO: 3540 - DNA, 38 bp, Homo sapiens
  source 1..38: mol_type = unassigned DNA
aaaacggtggacaaacattggtgcttgagccgtaatta

SEQ ID NO: 3541 - RNA, 27 nt, Homo sapiens
  source 1..27: mol_type = unassigned RNA
agtgaggcagtggtagagctaacagtt

SEQ ID NO: 3542 - DNA, 27 bp, Homo sapiens
  source 1..27: mol_type = unassigned DNA
agtgaggcagtggtagagctaacagtt

SEQ ID NO: 3543 - DNA, 27 bp, Homo sapiens
  source 1..27: mol_type = unassigned DNA
aactgttagctctaccactgcctcact

SEQ ID NO: 3544 - RNA, 47 nt, Homo sapiens
  source 1..47: mol_type = unassigned RNA
ttctctaatacattgtatggctctatctgtatatccgtatctatatc

SEQ ID NO: 3545 - DNA, 47 bp, Homo sapiens
  source 1..47: mol_type = unassigned DNA
ttctctaatacattgtatggctctatctgtatatccgtatctatatc

SEQ ID NO: 3546 - DNA, 47 bp, Homo sapiens
  source 1..47: mol_type = unassigned DNA
gatatagatacggatatacagatagagccatacaatgtattagagaa

SEQ ID NO: 3547 - RNA, 48 nt, Homo sapiens
  source 1..48: mol_type = unassigned RNA
aagcctcttgaactacaatatgtttagagaggctctggagctattgca

SEQ ID NO: 3548 - DNA, 48 bp, Homo sapiens
  source 1..48: mol_type = unassigned DNA
aagcctcttgaactacaatatgtttagagaggctctggagctattgca

SEQ ID NO: 3549 - DNA, 48 bp, Homo sapiens
  source 1..48: mol_type = unassigned DNA
tgcaatagctccagagcctctctaaacatattgtagttcaagaggctt

SEQ ID NO: 3550 - RNA, 47 nt, Homo sapiens
  source 1..47: mol_type = unassigned RNA
gaatgtctttttggaaaaaggaaggtttcatagcccatggctgttag

SEQ ID NO: 3551 - DNA, 47 bp, Homo sapiens
  source 1..47: mol_type = unassigned DNA
gaatgtctttttggaaaaaggaaggtttcatagcccatggctgttag

SEQ ID NO: 3552 - DNA, 47 bp, Homo sapiens
  source 1..47: mol_type = unassigned DNA
ctaacagccatgggctatgaaaccttcctttttccaaaaagacattc

SEQ ID NO: 3553 - RNA, 41 nt, Homo sapiens
  source 1..41: mol_type = unassigned RNA
ttcttaggattttggacttggactgagccatgctattgact

SEQ ID NO: 3554 - DNA, 41 bp, Homo sapiens
  source 1..41: mol_type = unassigned DNA
ttcttaggattttggacttggactgagccatgctattgact

SEQ ID NO: 3555 - DNA, 41 bp, Homo sapiens
  source 1..41: mol_type = unassigned DNA
agtcaatagcatggctcagtccaagtccaaaatcctaagaa

SEQ ID NO: 3556 - RNA, 168 nt, Homo sapiens
  source 1..168: mol_type = unassigned RNA
catccagggtatcgagcgggatcggagagcccaggcccctggtaacttggaggaatttgaagtcaatgacctgaactatgaagataaactccaggaagatcgtttcctatacagtaacattgccttcaacctggctgcagatgctggtgaggggtaaatggagtgtgg

SEQ ID NO: 3557 - DNA, 168 bp, Homo sapiens
  source 1..168: mol_type = unassigned DNA
catccagggtatcgagcgggatcggagagcccaggcccctggtaacttggaggaatttgaagtcaatgacctgaactatgaagataaactccaggaagatcgtttcctatacagtaacattgccttcaacctggctgcagatgctggtgaggggtaaatggagtgtgg

SEQ ID NO: 3558 - DNA, 168 bp, Homo sapiens
  source 1..168: mol_type = unassigned DNA
ccacactccatttacccctcaccagcatctgcagccaggttgaaggcaatgttactgtataggaaacgatcttcctggagtttatcttcatagttcaggtcattgacttcaaattcctccaagttaccaggggcctgggctctccgatcccgctcgataccctggatg

SEQ ID NO: 3559 - RNA, 60 nt, Homo sapiens
  source 1..60: mol_type = unassigned RNA
aatgttgcaaagattttcttccaaatgttggatagttttagcttttacacttatgttgct

SEQ ID NO: 3560 - DNA, 60 bp, Homo sapiens
  source 1..60: mol_type = unassigned DNA
aatgttgcaaagattttcttccaaatgttggatagttttagcttttacacttatgttgct

SEQ ID NO: 3561 - DNA, 60 bp, Homo sapiens
  source 1..60: mol_type = unassigned DNA
agcaacataagtgtaaaagctaaaactatccaacatttggaagaaaatctttgcaacatt

SEQ ID NO: 3562 - RNA, 105 nt, Homo sapiens
  source 1..105: mol_type = unassigned RNA
tctgtgagctcaagagtctagtaagaaaggcaagcactgaacaagttaacgtaagtacctgctccccagccaccacagaactgctaattcatctcccagacgagt

SEQ ID NO: 3563 - DNA, 105 bp, Homo sapiens
  source 1..105: mol_type = unassigned DNA
tctgtgagctcaagagtctagtaagaaaggcaagcactgaacaagttaacgtaagtacctgctccccagccaccacagaactgctaattcatctcccagacgagt

SEQ ID NO: 3564 - DNA, 105 bp, Homo sapiens
  source 1..105: mol_type = unassigned DNA
actcgtctgggagatgaattagcagttctgtggtggctggggagcaggtacttacgttaacttgttcagtgcttgcctttcttactagactcttgagctcacaga

SEQ ID NO: 3565 - RNA, 32 nt, Homo sapiens
  source 1..32: mol_type = unassigned RNA
gaaaaacaggaactctgcatctcaggtggctt

SEQ ID NO: 3566 - DNA, 32 bp, Homo sapiens
  source 1..32: mol_type = unassigned DNA
gaaaaacaggaactctgcatctcaggtggctt

SEQ ID NO: 3567 - DNA, 32 bp, Homo sapiens
  source 1..32: mol_type = unassigned DNA
aagccacctgagatgcagagttcctgtttttc

SEQ ID NO: 3568 - RNA, 147 nt, Homo sapiens
  source 1..147: mol_type = unassigned RNA
ctcctcgccccacggactccctcaggtcaccatcctggaggcagataacaggatcgggggccgcatcttcacctaccgggaccagaacacgggctggattggggagctgggagccatgcgcatgcccagctctcacaggtgacctag

SEQ ID NO: 3569 - DNA, 147 bp, Homo sapiens
  source 1..147: mol_type = unassigned DNA
ctcctcgccccacggactccctcaggtcaccatcctggaggcagataacaggatcgggggccgcatcttcacctaccgggaccagaacacgggctggattggggagctgggagccatgcgcatgcccagctctcacaggtgacctag

SEQ ID NO: 3570 - DNA, 147 bp, Homo sapiens
  source 1..147: mol_type = unassigned DNA
ctaggtcacctgtgagagctgggcatgcgcatggctcccagctccccaatccagcccgtgttctggtcccggtaggtgaagatgcggcccccgatcctgttatctgcctccaggatggtgacctgagggagtccgtggggcgaggag

SEQ ID NO: 3571 - RNA, 32 nt, Homo sapiens
  source 1..32: mol_type = unassigned RNA
tcttctcagtctgagcttgtctatgctctatg

SEQ ID NO: 3572 - DNA, 32 bp, Homo sapiens
  source 1..32: mol_type = unassigned DNA
tcttctcagtctgagcttgtctatgctctatg

SEQ ID NO: 3573 - DNA, 32 bp, Homo sapiens
  source 1..32: mol_type = unassigned DNA
catagagcatagacaagctcagactgagaaga

SEQ ID NO: 3574 - RNA, 61 nt, Homo sapiens
  source 1..61: mol_type = unassigned RNA
cctaatatatcagttatacctcttttttgtaactgtttttactggttgccagagagtttgc

SEQ ID NO: 3575 - DNA, 61 bp, Homo sapiens
  source 1..61: mol_type = unassigned DNA
cctaatatatcagttatacctcttttttgtaactgtttttactggttgccagagagtttgc

SEQ ID NO: 3576 - DNA, 61 bp, Homo sapiens
  source 1..61: mol_type = unassigned DNA
gcaaactctctggcaaccagtaaaaacagttacaaaaaagaggtataactgatatattagg

SEQ ID NO: 3577 - RNA, 23 nt, Homo sapiens
  source 1..23: mol_type = unassigned RNA
ttatctagtagatttatacttga

SEQ ID NO: 3578 - DNA, 23 bp, Homo sapiens
  source 1..23: mol_type = unassigned DNA
ttatctagtagatttatacttga

SEQ ID NO: 3579 - DNA, 23 bp, Homo sapiens
  source 1..23: mol_type = unassigned DNA
tcaagtataaatctactagataa

SEQ ID NO: 3580 - RNA, 33 nt, Homo sapiens
  source 1..33: mol_type = unassigned RNA
gtacatcgggacctggccacgcggaactgccta

SEQ ID NO: 3581 - DNA, 33 bp, Homo sapiens
  source 1..33: mol_type = unassigned DNA
gtacatcgggacctggccacgcggaactgccta

SEQ ID NO: 3582 - DNA, 33 bp, Homo sapiens
  source 1..33: mol_type = unassigned DNA
taggcagttccgcgtggccaggtcccgatgtac

SEQ ID NO: 3583 - RNA, 35 nt, Homo sapiens
  source 1..35: mol_type = unassigned RNA
ttaaacaatatgttcctgaatgaccagagggtcaa

SEQ ID NO: 3584 - DNA, 35 bp, Homo sapiens
  source 1..35: mol_type = unassigned DNA
ttaaacaatatgttcctgaatgaccagagggtcaa

SEQ ID NO: 3585 - DNA, 35 bp, Homo sapiens
  source 1..35: mol_type = unassigned DNA
ttgaccctctggtcattcaggaacatattgtttaa

SEQ ID NO: 3586 - RNA, 50 nt, Homo sapiens
  source 1..50: mol_type = unassigned RNA
gcttgtggccctgaggctggagatgtcttcgttgcctgacctgacaccca

SEQ ID NO: 3587 - DNA, 50 bp, Homo sapiens
  source 1..50: mol_type = unassigned DNA
gcttgtggccctgaggctggagatgtcttcgttgcctgacctgacaccca

SEQ ID NO: 3588 - DNA, 50 bp, Homo sapiens
  source 1..50: mol_type = unassigned DNA
tgggtgtcaggtcaggcaacgaagacatctccagcctcagggccacaagc

SEQ ID NO: 3589 - RNA, 24 nt, Homo sapiens
  source 1..24: mol_type = unassigned RNA
ttttccaatgcaagacctcacaca

SEQ ID NO: 3590 - DNA, 24 bp, Homo sapiens
  source 1..24: mol_type = unassigned DNA
ttttccaatgcaagacctcacaca

SEQ ID NO: 3591 - DNA, 24 bp, Homo sapiens
  source 1..24: mol_type = unassigned DNA
tgtgtgaggtcttgcattggaaaa

SEQ ID NO: 3592 - RNA, 37 nt, Homo sapiens
  source 1..37: mol_type = unassigned RNA
gcctcctgtgcgtgtagacagaggcaagaacctgttc

SEQ ID NO: 3593 - DNA, 37 bp, Homo sapiens
  source 1..37: mol_type = unassigned DNA
gcctcctgtgcgtgtagacagaggcaagaacctgttc

SEQ ID NO: 3594 - DNA, 37 bp, Homo sapiens
  source 1..37: mol_type = unassigned DNA
gaacaggttcttgcctctgtctacacgcacaggaggc

SEQ ID NO: 3595 - RNA, 29 nt, Homo sapiens
  source 1..29: mol_type = unassigned RNA
gccactctgctggctgaggctgcggagag

SEQ ID NO: 3596 - DNA, 29 bp, Homo sapiens
  source 1..29: mol_type = unassigned DNA
gccactctgctggctgaggctgcggagag

SEQ ID NO: 3597 - DNA, 29 bp, Homo sapiens
  source 1..29: mol_type = unassigned DNA
ctctccgcagcctcagccagcagagtggc

SEQ ID NO: 3598 - RNA, 24 nt, Homo sapiens
  source 1..24: mol_type = unassigned RNA
tgagaaatcaaactgattttgact

SEQ ID NO: 3599 - DNA, 24 bp, Homo sapiens
  source 1..24: mol_type = unassigned DNA
tgagaaatcaaactgattttgact

SEQ ID NO: 3600 - DNA, 24 bp, Homo sapiens
  source 1..24: mol_type = unassigned DNA
agtcaaaatcagtttgatttctca

SEQ ID NO: 3601 - RNA, 156 nt, Homo sapiens
  source 1..156: mol_type = unassigned RNA
tttgttactgttctgagccctgctacttcccccatcaatcactcccctacagcctgacggccttgctgttccttcaagttgtatagcgcgctgccacctcagagcctttgcaacggctttccctctctgccttgaatttccttccgaactgtgtgc

SEQ ID NO: 3602 - DNA, 156 bp, Homo sapiens
  source 1..156: mol_type = unassigned DNA
tttgttactgttctgagccctgctacttcccccatcaatcactcccctacagcctgacggccttgctgttccttcaagttgtatagcgcgctgccacctcagagcctttgcaacggctttccctctctgccttgaatttccttccgaactgtgtgc

SEQ ID NO: 3603 - DNA, 156 bp, Homo sapiens
  source 1..156: mol_type = unassigned DNA
gcacacagttcggaaggaaattcaaggcagagagggaaagccgttgcaaaggctctgaggtggcagcgcgctatacaacttgaaggaacagcaaggccgtcaggctgtaggggagtgattgatgggggaagtagcagggctcagaacagtaacaaa

SEQ ID NO: 3604 - RNA, 55 nt, Homo sapiens
  source 1..55: mol_type = unassigned RNA
cctctttcctttataaataacccagtcttaggatatttagcagtatgagaacagt

SEQ ID NO: 3605 - DNA, 55 bp, Homo sapiens
  source 1..55: mol_type = unassigned DNA
cctctttcctttataaataacccagtcttaggatatttagcagtatgagaacagt

SEQ ID NO: 3606 - DNA, 55 bp, Homo sapiens
  source 1..55: mol_type = unassigned DNA
actgttctcatactgctaaatatcctaagactgggttatttataaaggaaagagg

SEQ ID NO: 3607 - RNA, 32 nt, Homo sapiens
  source 1..32: mol_type = unassigned RNA
gaaagtaactgaccagagctgaggaactgtgg

SEQ ID NO: 3608 - DNA, 32 bp, Homo sapiens
  source 1..32: mol_type = unassigned DNA
gaaagtaactgaccagagctgaggaactgtgg

SEQ ID NO: 3609 - DNA, 32 bp, Homo sapiens
  source 1..32: mol_type = unassigned DNA
ccacagttcctcagctctggtcagttactttc

SEQ ID NO: 3610 - RNA, 33 nt, Homo sapiens
  source 1..33: mol_type = unassigned RNA
agatggaggagattttatagttggattctaagg

SEQ ID NO: 3611 - DNA, 33 bp, Homo sapiens
  source 1..33: mol_type = unassigned DNA
agatggaggagattttatagttggattctaagg

SEQ ID NO: 3612 - DNA, 33 bp, Homo sapiens
  source 1..33: mol_type = unassigned DNA
ccttagaatccaactataaaatctcctccatct

SEQ ID NO: 3613 - RNA, 27 nt, Homo sapiens
  source 1..27: mol_type = unassigned RNA
atagatgacactggtagaattttcttg

SEQ ID NO: 3614 - DNA, 27 bp, Homo sapiens
  source 1..27: mol_type = unassigned DNA
atagatgacactggtagaattttcttg

SEQ ID NO: 3615 - DNA, 27 bp, Homo sapiens
  source 1..27: mol_type = unassigned DNA
caagaaaattctaccagtgtcatctat

SEQ ID NO: 3616 - RNA, 25 nt, Homo sapiens
  source 1..25: mol_type = unassigned RNA
ttttccaatgataaaactcaagctg

SEQ ID NO: 3617 - DNA, 25 bp, Homo sapiens
  source 1..25: mol_type = unassigned DNA
ttttccaatgataaaactcaagctg

SEQ ID NO: 3618 - DNA, 25 bp, Homo sapiens
  source 1..25: mol_type = unassigned DNA
cagcttgagttttatcattggaaaa

SEQ ID NO: 3619 - RNA, 57 nt, Homo sapiens
  source 1..57: mol_type = unassigned RNA
gtagctggtatcagaacactgtccagggtggctgggcatcccagcagagtggccaac

SEQ ID NO: 3620 - DNA, 57 bp, Homo sapiens
  source 1..57: mol_type = unassigned DNA
gtagctggtatcagaacactgtccagggtggctgggcatcccagcagagtggccaac

SEQ ID NO: 3621 - DNA, 57 bp, Homo sapiens
  source 1..57: mol_type = unassigned DNA
gttggccactctgctgggatgcccagccaccctggacagtgttctgataccagctac

SEQ ID NO: 3622 - RNA, 36 nt, Homo sapiens
  source 1..36: mol_type = unassigned RNA
cttaagtgatgatgaacccctgggacaactgaaata

SEQ ID NO: 3623 - DNA, 36 bp, Homo sapiens
  source 1..36: mol_type = unassigned DNA
cttaagtgatgatgaacccctgggacaactgaaata

SEQ ID NO: 3624 - DNA, 36 bp, Homo sapiens
  source 1..36: mol_type = unassigned DNA
tatttcagttgtcccaggggttcatcatcacttaag

SEQ ID NO: 3625 - RNA, 109 nt, Homo sapiens
  source 1..109: mol_type = unassigned RNA
cttcacatgtgaacactggcagtgtctgggggctgaggccagtgctccattgctccagttaagatcacagcgaaagccaagccgtgtaggtggtgtggttcaggctggg

SEQ ID NO: 3626 - DNA, 109 bp, Homo sapiens
  source 1..109: mol_type = unassigned DNA
cttcacatgtgaacactggcagtgtctgggggctgaggccagtgctccattgctccagttaagatcacagcgaaagccaagccgtgtaggtggtgtggttcaggctggg

SEQ ID NO: 3627 - DNA, 109 bp, Homo sapiens
  source 1..109: mol_type = unassigned DNA
cccagcctgaaccacaccacctacacggcttggctttcgctgtgatcttaactggagcaatggagcactggcctcagcccccagacactgccagtgttcacatgtgaag

SEQ ID NO: 3628 - RNA, 31 nt, Homo sapiens
  source 1..31: mol_type = unassigned RNA
tgaactttacatctgaactacgaaagcatcc

SEQ ID NO: 3629 - DNA, 31 bp, Homo sapiens
  source 1..31: mol_type = unassigned DNA
tgaactttacatctgaactacgaaagcatcc

SEQ ID NO: 3630 - DNA, 31 bp, Homo sapiens
  source 1..31: mol_type = unassigned DNA
ggatgctttcgtagttcagatgtaaagttca

SEQ ID NO: 3631 - RNA, 87 nt, Homo sapiens
  source 1..87: mol_type = unassigned RNA
aaattttgtacagacagcatctcatgcttcccagactgatgctgaactcttgagctgcggcaatcctcctatcttggcctctcaaag

SEQ ID NO: 3632 - DNA, 87 bp, Homo sapiens
  source 1..87: mol_type = unassigned DNA
aaattttgtacagacagcatctcatgcttcccagactgatgctgaactcttgagctgcggcaatcctcctatcttggcctctcaaag

SEQ ID NO: 3633 - DNA, 87 bp, Homo sapiens
  source 1..87: mol_type = unassigned DNA
ctttgagaggccaagataggaggattgccgcagctcaagagttcagcatcagtctgggaagcatgagatgctgtctgtacaaaattt

SEQ ID NO: 3634 - RNA, 29 nt, Homo sapiens
  source 1..29: mol_type = unassigned RNA
taagcaacaccagtcgattctgtacagag

SEQ ID NO: 3635 - DNA, 29 bp, Homo sapiens
  source 1..29: mol_type = unassigned DNA
taagcaacaccagtcgattctgtacagag

SEQ ID NO: 3636 - DNA, 29 bp, Homo sapiens
  source 1..29: mol_type = unassigned DNA
ctctgtacagaatcgactggtgttgctta

SEQ ID NO: 3637 - RNA, 70 nt, Homo sapiens
  source 1..70: mol_type = unassigned RNA
ccatcacaggatagttgcatcatgtttgaccagatcttatgaactatctccatgctaactgcccaaatct

SEQ ID NO: 3638 - DNA, 70 bp, Homo sapiens
  source 1..70: mol_type = unassigned DNA
ccatcacaggatagttgcatcatgtttgaccagatcttatgaactatctccatgctaactgcccaaatct

SEQ ID NO: 3639 - DNA, 70 bp, Homo sapiens
  source 1..70: mol_type = unassigned DNA
agatttgggcagttagcatggagatagttcataagatctggtcaaacatgatgcaactatcctgtgatgg

SEQ ID NO: 3640 - RNA, 28 nt, Homo sapiens
  source 1..28: mol_type = unassigned RNA
tgcctagaggtgaaatattggacaggca

SEQ ID NO: 3641 - DNA, 28 bp, Homo sapiens
  source 1..28: mol_type = unassigned DNA
tgcctagaggtgaaatattggacaggca

SEQ ID NO: 3642 - DNA, 28 bp, Homo sapiens
  source 1..28: mol_type = unassigned DNA
tgcctgtccaatatttcacctctaggca

SEQ ID NO: 3643 - RNA, 63 nt, Homo sapiens
  source 1..63: mol_type = unassigned RNA
tgagtcttacacttgctgaggtgttgatgtgattgactgagccgtgcactgcagcagcactgg

SEQ ID NO: 3644 - DNA, 63 bp, Homo sapiens
  source 1..63: mol_type = unassigned DNA
tgagtcttacacttgctgaggtgttgatgtgattgactgagccgtgcactgcagcagcactgg

SEQ ID NO: 3645 - DNA, 63 bp, Homo sapiens
  source 1..63: mol_type = unassigned DNA
ccagtgctgctgcagtgcacggctcagtcaatcacatcaacacctcagcaagtgtaagactca

SEQ ID NO: 3646 - RNA, 51 nt, Homo sapiens
  source 1..51: mol_type = unassigned RNA
ggggttctgcctggctctgtgacctggggaagttcatttcctcttgcgttg

SEQ ID NO: 3647 - DNA, 51 bp, Homo sapiens
  source 1..51: mol_type = unassigned DNA
ggggttctgcctggctctgtgacctggggaagttcatttcctcttgcgttg

SEQ ID NO: 3648 - DNA, 51 bp, Homo sapiens
  source 1..51: mol_type = unassigned DNA
caacgcaagaggaaatgaacttccccaggtcacagagccaggcagaacccc

SEQ ID NO: 3649 - RNA, 24 nt, Homo sapiens
  source 1..24: mol_type = unassigned RNA
taatatattagtttgtaaagttta

SEQ ID NO: 3650 - DNA, 24 bp, Homo sapiens
  source 1..24: mol_type = unassigned DNA
taatatattagtttgtaaagttta

SEQ ID NO: 3651 - DNA, 24 bp, Homo sapiens
  source 1..24: mol_type = unassigned DNA
taaactttacaaactaatatatta

SEQ ID NO: 3652 - RNA, 37 nt, Homo sapiens
  source 1..37: mol_type = unassigned RNA
gtaggagaagtttgggacctgtgggacaaaggacagt

SEQ ID NO: 3653 - DNA, 37 bp, Homo sapiens
  source 1..37: mol_type = unassigned DNA
gtaggagaagtttgggacctgtgggacaaaggacagt

SEQ ID NO: 3654 - DNA, 37 bp, Homo sapiens
  source 1..37: mol_type = unassigned DNA
actgtcctttgtcccacaggtcccaaacttctcctac

SEQ ID NO: 3655 - RNA, 142 nt, Homo sapiens
  source 1..142: mol_type = unassigned RNA
agcctcctgtctgggctcagttgcagccaaaggggccagagcccaggcaagcagttgggcaggcattttctgagcattgcagaagctctcctgggcagagttcagctctgctccagctccctgctggaaggtggtcttcctc

SEQ ID NO: 3656 - DNA, 142 bp, Homo sapiens
  source 1..142: mol_type = unassigned DNA
agcctcctgtctgggctcagttgcagccaaaggggccagagcccaggcaagcagttgggcaggcattttctgagcattgcagaagctctcctgggcagagttcagctctgctccagctccctgctggaaggtggtcttcctc

SEQ ID NO: 3657 - DNA, 142 bp, Homo sapiens
  source 1..142: mol_type = unassigned DNA
gaggaagaccaccttccagcagggagctggagcagagctgaactctgcccaggagagcttctgcaatgctcagaaaatgcctgcccaactgcttgcctgggctctggcccctttggctgcaactgagcccagacaggaggct

SEQ ID NO: 3658 - RNA, 55 nt, Homo sapiens
  source 1..55: mol_type = unassigned RNA
taaataaaaaaggctgtttcattaaaaattctgggagacactggaacctaggtga

SEQ ID NO: 3659 - DNA, 55 bp, Homo sapiens
  source 1..55: mol_type = unassigned DNA
taaataaaaaaggctgtttcattaaaaattctgggagacactggaacctaggtga

SEQ ID NO: 3660 - DNA, 55 bp, Homo sapiens
  source 1..55: mol_type = unassigned DNA
tcacctaggttccagtgtctcccagaatttttaatgaaacagccttttttattta

SEQ ID NO: 3661 - RNA, 40 nt, Homo sapiens
  source 1..40: mol_type = unassigned RNA
ctctgtacacactgatctagttgttagtgctgtaaaaaca

SEQ ID NO: 3662 - DNA, 40 bp, Homo sapiens
  source 1..40: mol_type = unassigned DNA
ctctgtacacactgatctagttgttagtgctgtaaaaaca

SEQ ID NO: 3663 - DNA, 40 bp, Homo sapiens
  source 1..40: mol_type = unassigned DNA
tgtttttacagcactaacaactagatcagtgtgtacagag

SEQ ID NO: 3664 - RNA, 25 nt, Homo sapiens
  source 1..25: mol_type = unassigned RNA
catggcactggtaaaaataaatgaa

SEQ ID NO: 3665 - DNA, 25 bp, Homo sapiens
  source 1..25: mol_type = unassigned DNA
catggcactggtaaaaataaatgaa

SEQ ID NO: 3666 - DNA, 25 bp, Homo sapiens
  source 1..25: mol_type = unassigned DNA
ttcatttatttttaccagtgccatg

SEQ ID NO: 3667 - RNA, 51 nt, Homo sapiens
  source 1..51: mol_type = unassigned RNA
aaggcaaaggctgaaaagcagcagagtgtcacttgtagaattaactttatg

SEQ ID NO: 3668 - DNA, 51 bp, Homo sapiens
  source 1..51: mol_type = unassigned DNA
aaggcaaaggctgaaaagcagcagagtgtcacttgtagaattaactttatg

SEQ ID NO: 3669 - DNA, 51 bp, Homo sapiens
  source 1..51: mol_type = unassigned DNA
cataaagttaattctacaagtgacactctgctgcttttcagcctttgcctt

SEQ ID NO: 3670 - RNA, 55 nt, Homo sapiens
  source 1..55: mol_type = unassigned RNA
taggttcttatcttggctctttagctgtatgaccttgggcccatcatcctcatgc

SEQ ID NO: 3671 - DNA, 55 bp, Homo sapiens
  source 1..55: mol_type = unassigned DNA
taggttcttatcttggctctttagctgtatgaccttgggcccatcatcctcatgc

SEQ ID NO: 3672 - DNA, 55 bp, Homo sapiens
  source 1..55: mol_type = unassigned DNA
gcatgaggatgatgggcccaaggtcatacagctaaagagccaagataagaaccta

SEQ ID NO: 3673 - RNA, 45 nt, Homo sapiens
  source 1..45: mol_type = unassigned RNA
aacacattcccatggaatagtattcttgtaggacaaccattgtta

SEQ ID NO: 3674 - DNA, 45 bp, Homo sapiens
  source 1..45: mol_type = unassigned DNA
aacacattcccatggaatagtattcttgtaggacaaccattgtta

SEQ ID NO: 3675 - DNA, 45 bp, Homo sapiens
  source 1..45: mol_type = unassigned DNA
taacaatggttgtcctacaagaatactattccatgggaatgtgtt

SEQ ID NO: 3676 - RNA, 45 nt, Homo sapiens
  source 1..45: mol_type = unassigned RNA
tactttagcaacagatgttgaacaagataactctctgggactcag

SEQ ID NO: 3677 - DNA, 45 bp, Homo sapiens
  source 1..45: mol_type = unassigned DNA
tactttagcaacagatgttgaacaagataactctctgggactcag

SEQ ID NO: 3678 - DNA, 45 bp, Homo sapiens
  source 1..45: mol_type = unassigned DNA
ctgagtcccagagagttatcttgttcaacatctgttgctaaagta

SEQ ID NO: 3679 - RNA, 39 nt, Homo sapiens
  source 1..39: mol_type = unassigned RNA
gggagttccagaccgttctgactaacatggagaaacccc

SEQ ID NO: 3680 - DNA, 39 bp, Homo sapiens
  source 1..39: mol_type = unassigned DNA
gggagttccagaccgttctgactaacatggagaaacccc

SEQ ID NO: 3681 - DNA, 39 bp, Homo sapiens
  source 1..39: mol_type = unassigned DNA
ggggtttctccatgttagtcagaacggtctggaactccc

SEQ ID NO: 3682 - RNA, 38 nt, Homo sapiens
  source 1..38: mol_type = unassigned RNA
tgatgaagatgatgatgttgctgtgacctgaagggagg

SEQ ID NO: 3683 - DNA, 38 bp, Homo sapiens
  source 1..38: mol_type = unassigned DNA
tgatgaagatgatgatgttgctgtgacctgaagggagg

SEQ ID NO: 3684 - DNA, 38 bp, Homo sapiens
  source 1..38: mol_type = unassigned DNA
cctcccttcaggtcacagcaacatcatcatcttcatca

SEQ ID NO: 3685 - RNA, 40 nt, Homo sapiens
  source 1..40: mol_type = unassigned RNA
tgctctgcttttctagctgtatggccctgggcaagttacc

SEQ ID NO: 3686 - DNA, 40 bp, Homo sapiens
  source 1..40: mol_type = unassigned DNA
tgctctgcttttctagctgtatggccctgggcaagttacc

SEQ ID NO: 3687 - DNA, 40 bp, Homo sapiens
  source 1..40: mol_type = unassigned DNA
ggtaacttgcccagggccatacagctagaaaagcagagca

SEQ ID NO: 3688 - RNA, 27 nt, Homo sapiens
  source 1..27: mol_type = unassigned RNA
tccattcctcagtacatccaccaattc

SEQ ID NO: 3689 - DNA, 27 bp, Homo sapiens
  source 1..27: mol_type = unassigned DNA
tccattcctcagtacatccaccaattc

SEQ ID NO: 3690 - DNA, 27 bp, Homo sapiens
  source 1..27: mol_type = unassigned DNA
gaattggtggatgtactgaggaatgga

SEQ ID NO: 3691 - RNA, 55 nt, Homo sapiens
  source 1..55: mol_type = unassigned RNA
caatgctgcactgggctagaaactgaagctaaaacagatacgtggtccctgctgc

SEQ ID NO: 3692 - DNA, 55 bp, Homo sapiens
  source 1..55: mol_type = unassigned DNA
caatgctgcactgggctagaaactgaagctaaaacagatacgtggtccctgctgc

SEQ ID NO: 3693 - DNA, 55 bp, Homo sapiens
  source 1..55: mol_type = unassigned DNA
gcagcagggaccacgtatctgttttagcttcagtttctagcccagtgcagcattg

SEQ ID NO: 3694 - RNA, 32 nt, Homo sapiens
  source 1..32: mol_type = unassigned RNA
tcaatgcccagctccagcggaccaggcagatg

SEQ ID NO: 3695 - DNA, 32 bp, Homo sapiens
  source 1..32: mol_type = unassigned DNA
tcaatgcccagctccagcggaccaggcagatg

SEQ ID NO: 3696 - DNA, 32 bp, Homo sapiens
  source 1..32: mol_type = unassigned DNA
catctgcctggtccgctggagctgggcattga

SEQ ID NO: 3697 - RNA, 31 nt, Homo sapiens
  source 1..31: mol_type = unassigned RNA
gtctggtgactacaggtttccttccagacct

SEQ ID NO: 3698 - DNA, 31 bp, Homo sapiens
  source 1..31: mol_type = unassigned DNA
gtctggtgactacaggtttccttccagacct

SEQ ID NO: 3699 - DNA, 31 bp, Homo sapiens
  source 1..31: mol_type = unassigned DNA
aggtctggaaggaaacctgtagtcaccagac

SEQ ID NO: 3700 - RNA, 155 nt, Homo sapiens
  source 1..155: mol_type = unassigned RNA
tataacttgttcatttttattttctagattaatgttattggtgagccatttttaaatgtgaactgtgaacacatcaaatcatttgacaaaaatttgtacagacaactcatctcttacccacaggtaagaatttagctttgaccttgatgaatttt

SEQ ID NO: 3701 - DNA, 155 bp, Homo sapiens
  source 1..155: mol_type = unassigned DNA
tataacttgttcatttttattttctagattaatgttattggtgagccatttttaaatgtgaactgtgaacacatcaaatcatttgacaaaaatttgtacagacaactcatctcttacccacaggtaagaatttagctttgaccttgatgaatttt

SEQ ID NO: 3702 - DNA, 155 bp, Homo sapiens
  source 1..155: mol_type = unassigned DNA
aaaattcatcaaggtcaaagctaaattcttacctgtgggtaagagatgagttgtctgtacaaatttttgtcaaatgatttgatgtgttcacagttcacatttaaaaatggctcaccaataacattaatctagaaaataaaaatgaacaagttata

SEQ ID NO: 3703 - RNA, 56 nt, Homo sapiens
  source 1..56: mol_type = unassigned RNA
ttctgtttctaactagctgtatgatcctgggcaagttaattaacacatttggttct

SEQ ID NO: 3704 - DNA, 56 bp, Homo sapiens
  source 1..56: mol_type = unassigned DNA
ttctgtttctaactagctgtatgatcctgggcaagttaattaacacatttggttct

SEQ ID NO: 3705 - DNA, 56 bp, Homo sapiens
  source 1..56: mol_type = unassigned DNA
agaaccaaatgtgttaattaacttgcccaggatcatacagctagttagaaacagaa

SEQ ID NO: 3706 - RNA, 72 nt, Homo sapiens
  source 1..72: mol_type = unassigned RNA
cacaacctgtttggagtgcaagccagttgggaagttgttgagtgccactgatgggggaaactgaggcacagc

SEQ ID NO: 3707 - DNA, 72 bp, Homo sapiens
  source 1..72: mol_type = unassigned DNA
cacaacctgtttggagtgcaagccagttgggaagttgttgagtgccactgatgggggaaactgaggcacagc

SEQ ID NO: 3708 - DNA, 72 bp, Homo sapiens
  source 1..72: mol_type = unassigned DNA
gctgtgcctcagtttcccccatcagtggcactcaacaacttcccaactggcttgcactccaaacaggttgtg

SEQ ID NO: 3709 - RNA, 33 nt, Homo sapiens
  source 1..33: mol_type = unassigned RNA
tctcagagtagcttaacacactgtgtgtccaca

SEQ ID NO: 3710 - DNA, 33 bp, Homo sapiens
  source 1..33: mol_type = unassigned DNA
tctcagagtagcttaacacactgtgtgtccaca

SEQ ID NO: 3711 - DNA, 33 bp, Homo sapiens
  source 1..33: mol_type = unassigned DNA
tgtggacacacagtgtgttaagctactctgaga

SEQ ID NO: 3712 - RNA, 184 nt, Homo sapiens
  source 1..184: mol_type = unassigned RNA
catcctaatgaatgttgtccccttcaatggtgttaccttaggagctgaacattcaattcagttacaccactatgactaaaaacagtttggatctcttagtattgcctttgaaactgcaacataagcaactcaacaatattagttgcattcctttatagacataccatgtcaaagacgtttttct

SEQ ID NO: 3713 - DNA, 184 bp, Homo sapiens
  source 1..184: mol_type = unassigned DNA
catcctaatgaatgttgtccccttcaatggtgttaccttaggagctgaacattcaattcagttacaccactatgactaaaaacagtttggatctcttagtattgcctttgaaactgcaacataagcaactcaacaatattagttgcattcctttatagacataccatgtcaaagacgtttttct

SEQ ID NO: 3714 - DNA, 184 bp, Homo sapiens
  source 1..184: mol_type = unassigned DNA
agaaaaacgtctttgacatggtatgtctataaaggaatgcaactaatattgttgagttgcttatgttgcagtttcaaaggcaatactaagagatccaaactgtttttagtcatagtggtgtaactgaattgaatgttcagctcctaaggtaacaccattgaaggggacaacattcattaggatg

SEQ ID NO: 3715 - RNA, 30 nt, Homo sapiens
  source 1..30: mol_type = unassigned RNA
aaggacttcatcggctgtatgcgggacctg

SEQ ID NO: 3716 - DNA, 30 bp, Homo sapiens
  source 1..30: mol_type = unassigned DNA
aaggacttcatcggctgtatgcgggacctg

SEQ ID NO: 3717 - DNA, 30 bp, Homo sapiens
  source 1..30: mol_type = unassigned DNA
caggtcccgcatacagccgatgaagtcctt

SEQ ID NO: 3718 - RNA, 32 nt, Homo sapiens
  source 1..32: mol_type = unassigned RNA
gatacaggtctgtgaagcaggcaggttgctca

SEQ ID NO: 3719 - DNA, 32 bp, Homo sapiens
  source 1..32: mol_type = unassigned DNA
gatacaggtctgtgaagcaggcaggttgctca

SEQ ID NO: 3720 - DNA, 32 bp, Homo sapiens
  source 1..32: mol_type = unassigned DNA
tgagcaacctgcctgcttcacagacctgtatc

SEQ ID NO: 3721 - RNA, 54 nt, Homo sapiens
  source 1..54: mol_type = unassigned RNA
actagaaagggaatcgctttctcattcccatctccattgcactcttctggactt

SEQ ID NO: 3722 - DNA, 54 bp, Homo sapiens
  source 1..54: mol_type = unassigned DNA
actagaaagggaatcgctttctcattcccatctccattgcactcttctggactt

SEQ ID NO: 3723 - DNA, 54 bp, Homo sapiens
  source 1..54: mol_type = unassigned DNA
aagtccagaagagtgcaatggagatgggaatgagaaagcgattccctttctagt

SEQ ID NO: 3724 - RNA, 75 nt, Homo sapiens
  source 1..75: mol_type = unassigned RNA
cacacaggtgcctgatacgtgactggaggtgttcgctgatgtggccccaaccctgccttcctccccaccccacga

SEQ ID NO: 3725 - DNA, 75 bp, Homo sapiens
  source 1..75: mol_type = unassigned DNA
cacacaggtgcctgatacgtgactggaggtgttcgctgatgtggccccaaccctgccttcctccccaccccacga

SEQ ID NO: 3726 - DNA, 75 bp, Homo sapiens
  source 1..75: mol_type = unassigned DNA
tcgtggggtggggaggaaggcagggttggggccacatcagcgaacacctccagtcacgtatcaggcacctgtgtg

SEQ ID NO: 3727 - RNA, 31 nt, Homo sapiens
  source 1..31: mol_type = unassigned RNA
cttcagatactctctttgccagatgaagtta

SEQ ID NO: 3728 - DNA, 31 bp, Homo sapiens
  source 1..31: mol_type = unassigned DNA
cttcagatactctctttgccagatgaagtta

SEQ ID NO: 3729 - DNA, 31 bp, Homo sapiens
  source 1..31: mol_type = unassigned DNA
taacttcatctggcaaagagagtatctgaag

SEQ ID NO: 3730 - RNA, 126 nt, Homo sapiens
  source 1..126: mol_type = unassigned RNA
cagcataacagacaaccccaaaatctcagcacttacaacagcctccatttgtttttctcatctctgggtctgtgggatgactggggcagctttgcttcagatgcaggttgggtttcactctgctcc

SEQ ID NO: 3731 - DNA, 126 bp, Homo sapiens
  source 1..126: mol_type = unassigned DNA
cagcataacagacaaccccaaaatctcagcacttacaacagcctccatttgtttttctcatctctgggtctgtgggatgactggggcagctttgcttcagatgcaggttgggtttcactctgctcc

SEQ ID NO: 3732 - DNA, 126 bp, Homo sapiens
  source 1..126: mol_type = unassigned DNA
ggagcagagtgaaacccaacctgcatctgaagcaaagctgccccagtcatcccacagacccagagatgagaaaaacaaatggaggctgttgtaagtgctgagattttggggttgtctgttatgctg

SEQ ID NO: 3733 - RNA, 28 nt, Homo sapiens
  source 1..28: mol_type = unassigned RNA
tgtgatttgcaatggaagaactcttcca

SEQ ID NO: 3734 - DNA, 28 bp, Homo sapiens
  source 1..28: mol_type = unassigned DNA
tgtgatttgcaatggaagaactcttcca

SEQ ID NO: 3735 - DNA, 28 bp, Homo sapiens
  source 1..28: mol_type = unassigned DNA
tggaagagttcttccattgcaaatcaca

SEQ ID NO: 3736 - RNA, 23 nt, Homo sapiens
  source 1..23: mol_type = unassigned RNA
attcccagtggggcaatggaggc

SEQ ID NO: 3737 - DNA, 23 bp, Homo sapiens
  source 1..23: mol_type = unassigned DNA
attcccagtggggcaatggaggc

SEQ ID NO: 3738 - DNA, 23 bp, Homo sapiens
  source 1..23: mol_type = unassigned DNA
gcctccattgccccactgggaat

SEQ ID NO: 3739 - RNA, 33 nt, Homo sapiens
  source 1..33: mol_type = unassigned RNA
aagttgctgtcatagctcaggtctgggaatgag

SEQ ID NO: 3740 - DNA, 33 bp, Homo sapiens
  source 1..33: mol_type = unassigned DNA
aagttgctgtcatagctcaggtctgggaatgag

SEQ ID NO: 3741 - DNA, 33 bp, Homo sapiens
  source 1..33: mol_type = unassigned DNA
ctcattcccagacctgagctatgacagcaactt

SEQ ID NO: 3742 - RNA, 51 nt, Homo sapiens
  source 1..51: mol_type = unassigned RNA
tgaattcatattttgtgtgtatagtttttcatcctgctgtttacatttaat

SEQ ID NO: 3743 - DNA, 51 bp, Homo sapiens
  source 1..51: mol_type = unassigned DNA
tgaattcatattttgtgtgtatagtttttcatcctgctgtttacatttaat

SEQ ID NO: 3744 - DNA, 51 bp, Homo sapiens
  source 1..51: mol_type = unassigned DNA
attaaatgtaaacagcaggatgaaaaactatacacacaaaatatgaattca

SEQ ID NO: 3745 - RNA, 25 nt, Homo sapiens
  source 1..25: mol_type = unassigned RNA
tacctttcaaaaggatgttgaagta

SEQ ID NO: 3746 - DNA, 25 bp, Homo sapiens
  source 1..25: mol_type = unassigned DNA
tacctttcaaaaggatgttgaagta

SEQ ID NO: 3747 - DNA, 25 bp, Homo sapiens
  source 1..25: mol_type = unassigned DNA
tacttcaacatccttttgaaaggta

SEQ ID NO: 3748 - RNA, 23 nt, Homo sapiens
  source 1..23: mol_type = unassigned RNA
ttctcaagttggttgtatatttt

SEQ ID NO: 3749 - DNA, 23 bp, Homo sapiens
  source 1..23: mol_type = unassigned DNA
ttctcaagttggttgtatatttt

SEQ ID NO: 3750 - DNA, 23 bp, Homo sapiens
  source 1..23: mol_type = unassigned DNA
aaaatatacaaccaacttgagaa

SEQ ID NO: 3751 - RNA, 32 nt, Homo sapiens
  source 1..32: mol_type = unassigned RNA
caaggtgcctggagccagaggtcggggagtaa

SEQ ID NO: 3752 - DNA, 32 bp, Homo sapiens
  source 1..32: mol_type = unassigned DNA
caaggtgcctggagccagaggtcggggagtaa

SEQ ID NO: 3753 - DNA, 32 bp, Homo sapiens
  source 1..32: mol_type = unassigned DNA
ttactccccgacctctggctccaggcaccttg

SEQ ID NO: 3754 - RNA, 26 nt, Homo sapiens
  source 1..26: mol_type = unassigned RNA
tttatggcagtgtgagaattaactaa

SEQ ID NO: 3755 - DNA, 26 bp, Homo sapiens
  source 1..26: mol_type = unassigned DNA
tttatggcagtgtgagaattaactaa

SEQ ID NO: 3756 - DNA, 26 bp, Homo sapiens
  source 1..26: mol_type = unassigned DNA
ttagttaattctcacactgccataaa

SEQ ID NO: 3757 - RNA, 25 nt, Homo sapiens
  source 1..25: mol_type = unassigned RNA
cactctatcaactgatgtggaagtg

SEQ ID NO: 3758 - DNA, 25 bp, Homo sapiens
  source 1..25: mol_type = unassigned DNA
cactctatcaactgatgtggaagtg

SEQ ID NO: 3759 - DNA, 25 bp, Homo sapiens
  source 1..25: mol_type = unassigned DNA
cacttccacatcagttgatagagtg

SEQ ID NO: 3760 - RNA, 29 nt, Homo sapiens
  source 1..29: mol_type = unassigned RNA
agtgttctctagagggaagggctaatagg

SEQ ID NO: 3761 - DNA, 29 bp, Homo sapiens
  source 1..29: mol_type = unassigned DNA
agtgttctctagagggaagggctaatagg

SEQ ID NO: 3762 - DNA, 29 bp, Homo sapiens
  source 1..29: mol_type = unassigned DNA
cctattagcccttccctctagagaacact

SEQ ID NO: 3763 - RNA, 54 nt, Homo sapiens
  source 1..54: mol_type = unassigned RNA
agttttatttgcaattgtagaactctgctgcttcattcaattcctttgccaaca

SEQ ID NO: 3764 - DNA, 54 bp, Homo sapiens
  source 1..54: mol_type = unassigned DNA
agttttatttgcaattgtagaactctgctgcttcattcaattcctttgccaaca

SEQ ID NO: 3765 - DNA, 54 bp, Homo sapiens
  source 1..54: mol_type = unassigned DNA
tgttggcaaaggaattgaatgaagcagcagagttctacaattgcaaataaaact

SEQ ID NO: 3766 - RNA, 30 nt, Homo sapiens
  source 1..30: mol_type = unassigned RNA
ttccagatgcccctggacctgtatgcctat

SEQ ID NO: 3767 - DNA, 30 bp, Homo sapiens
  source 1..30: mol_type = unassigned DNA
ttccagatgcccctggacctgtatgcctat

SEQ ID NO: 3768 - DNA, 30 bp, Homo sapiens
  source 1..30: mol_type = unassigned DNA
ataggcatacaggtccaggggcatctggaa

SEQ ID NO: 3769 - RNA, 31 nt, Homo sapiens
  source 1..31: mol_type = unassigned RNA
tcagcccctgcagagctctgaagctgttcac

SEQ ID NO: 3770 - DNA, 31 bp, Homo sapiens
  source 1..31: mol_type = unassigned DNA
tcagcccctgcagagctctgaagctgttcac

SEQ ID NO: 3771 - DNA, 31 bp, Homo sapiens
  source 1..31: mol_type = unassigned DNA
gtgaacagcttcagagctctgcaggggctga

SEQ ID NO: 3772 - RNA, 28 nt, Homo sapiens
  source 1..28: mol_type = unassigned RNA
ggttttggttatcaggatgatgctgacc

SEQ ID NO: 3773 - DNA, 28 bp, Homo sapiens
  source 1..28: mol_type = unassigned DNA
ggttttggttatcaggatgatgctgacc

SEQ ID NO: 3774 - DNA, 28 bp, Homo sapiens
  source 1..28: mol_type = unassigned DNA
ggtcagcatcatcctgataaccaaaacc

SEQ ID NO: 3775 - RNA, 29 nt, Homo sapiens
  source 1..29: mol_type = unassigned RNA
cgcggcccggtgggcgagggccagctgct

SEQ ID NO: 3776 - DNA, 29 bp, Homo sapiens
  source 1..29: mol_type = unassigned DNA
cgcggcccggtgggcgagggccagctgct

SEQ ID NO: 3777 - DNA, 29 bp, Homo sapiens
  source 1..29: mol_type = unassigned DNA
agcagctggccctcgcccaccgggccgcg

SEQ ID NO: 3778 - RNA, 27 nt, Homo sapiens
  source 1..27: mol_type = unassigned RNA
ctccttcctctcctccagtctttatct

SEQ ID NO: 3779 - DNA, 27 bp, Homo sapiens
  source 1..27: mol_type = unassigned DNA
ctccttcctctcctccagtctttatct

SEQ ID NO: 3780 - DNA, 27 bp, Homo sapiens
  source 1..27: mol_type = unassigned DNA
agataaagactggaggagaggaaggag

SEQ ID NO: 3781 - RNA, 43 nt, Homo sapiens
  source 1..43: mol_type = unassigned RNA
cacactgctgttagttcaggtaaacagacaataatgaagtagg

SEQ ID NO: 3782 - DNA, 43 bp, Homo sapiens
  source 1..43: mol_type = unassigned DNA
cacactgctgttagttcaggtaaacagacaataatgaagtagg

SEQ ID NO: 3783 - DNA, 43 bp, Homo sapiens
  source 1..43: mol_type = unassigned DNA
cctacttcattattgtctgtttacctgaactaacagcagtgtg

SEQ ID NO: 3784 - RNA, 28 nt, Homo sapiens
  source 1..28: mol_type = unassigned RNA
ggaattccagctctggaggaccaatttc

SEQ ID NO: 3785 - DNA, 28 bp, Homo sapiens
  source 1..28: mol_type = unassigned DNA
ggaattccagctctggaggaccaatttc

SEQ ID NO: 3786 - DNA, 28 bp, Homo sapiens
  source 1..28: mol_type = unassigned DNA
gaaattggtcctccagagctggaattcc

SEQ ID NO: 3787 - RNA, 53 nt, Homo sapiens
  source 1..53: mol_type = unassigned RNA
ctttgccccagagggatgcagtttagcttacaaggctgtcctctaaacaggca

SEQ ID NO: 3788 - DNA, 53 bp, Homo sapiens
  source 1..53: mol_type = unassigned DNA
ctttgccccagagggatgcagtttagcttacaaggctgtcctctaaacaggca

SEQ ID NO: 3789 - DNA, 53 bp, Homo sapiens
  source 1..53: mol_type = unassigned DNA
tgcctgtttagaggacagccttgtaagctaaactgcatccctctggggcaaag

SEQ ID NO: 3790 - RNA, 23 nt, Homo sapiens
  source 1..23: mol_type = unassigned RNA
tctttttcctacagaactttgct

SEQ ID NO: 3791 - DNA, 23 bp, Homo sapiens
  source 1..23: mol_type = unassigned DNA
tctttttcctacagaactttgct

SEQ ID NO: 3792 - DNA, 23 bp, Homo sapiens
  source 1..23: mol_type = unassigned DNA
agcaaagttctgtaggaaaaaga

SEQ ID NO: 3793 - RNA, 25 nt, Homo sapiens
  source 1..25: mol_type = unassigned RNA
ttagcatactcagactactgtggtg

SEQ ID NO: 3794 - DNA, 25 bp, Homo sapiens
  source 1..25: mol_type = unassigned DNA
ttagcatactcagactactgtggtg

SEQ ID NO: 3795 - DNA, 25 bp, Homo sapiens
  source 1..25: mol_type = unassigned DNA
caccacagtagtctgagtatgctaa

SEQ ID NO: 3796 - RNA, 32 nt, Homo sapiens
  source 1..32: mol_type = unassigned RNA
cacccagccatcctgacccagcgaggagccaa

SEQ ID NO: 3797 - DNA, 32 bp, Homo sapiens
  source 1..32: mol_type = unassigned DNA
cacccagccatcctgacccagcgaggagccaa

SEQ ID NO: 3798 - DNA, 32 bp, Homo sapiens
  source 1..32: mol_type = unassigned DNA
ttggctcctcgctgggtcaggatggctgggtg

SEQ ID NO: 3799 - RNA, 179 nt, Homo sapiens
  source 1..179: mol_type = unassigned RNA
catttagagctaacaattatttctgttttagagtgctggttctcatgagccaataaaaatacaaaccaggtcagaccatggaggatgtgaacttgcatcagttcttcagttaaatccatgtagaactggtaaaataaagtctctacaaaacaaccaaggtgtgtacaccataaacagga

SEQ ID NO: 3800 - DNA, 179 bp, Homo sapiens
  source 1..179: mol_type = unassigned DNA
catttagagctaacaattatttctgttttagagtgctggttctcatgagccaataaaaatacaaaccaggtcagaccatggaggatgtgaacttgcatcagttcttcagttaaatccatgtagaactggtaaaataaagtctctacaaaacaaccaaggtgtgtacaccataaacagga

SEQ ID NO: 3801 - DNA, 179 bp, Homo sapiens
  source 1..179: mol_type = unassigned DNA
tcctgtttatggtgtacacaccttggttgttttgtagagactttattttaccagttctacatggatttaactgaagaactgatgcaagttcacatcctccatggtctgacctggtttgtatttttattggctcatgagaaccagcactctaaaacagaaataattgttagctctaaatg

SEQ ID NO: 3802 - RNA, 175 nt, Homo sapiens
  source 1..175: mol_type = unassigned RNA
tgtcttaagggtctcttttcccaacagaggtcccccctattggaagtaaaggggaacatagaactgaagagacctctgattaaggccccttcccagctgcctctctcaggaagcagactcaagaggaggcctgaccagatggaagatggcctggagcctgagaaggtgagctggg

SEQ ID NO: 3803 - DNA, 175 bp, Homo sapiens
  source 1..175: mol_type = unassigned DNA
tgtcttaagggtctcttttcccaacagaggtcccccctattggaagtaaaggggaacatagaactgaagagacctctgattaaggccccttcccagctgcctctctcaggaagcagactcaagaggaggcctgaccagatggaagatggcctggagcctgagaaggtgagctggg

SEQ ID NO: 3804 - DNA, 175 bp, Homo sapiens
  source 1..175: mol_type = unassigned DNA
cccagctcaccttctcaggctccaggccatcttccatctggtcaggcctcctcttgagtctgcttcctgagagaggcagctgggaaggggccttaatcagaggtctcttcagttctatgttcccctttacttccaataggggggacctctgttgggaaaagagacccttaagaca

SEQ ID NO: 3805 - RNA, 30 nt, Homo sapiens
  source 1..30: mol_type = unassigned RNA
tttctttacctgagaccagttgggagcact

SEQ ID NO: 3806 - DNA, 30 bp, Homo sapiens
  source 1..30: mol_type = unassigned DNA
tttctttacctgagaccagttgggagcact

SEQ ID NO: 3807 - DNA, 30 bp, Homo sapiens
  source 1..30: mol_type = unassigned DNA
agtgctcccaactggtctcaggtaaagaaa

SEQ ID NO: 3808 - RNA, 29 nt, Homo sapiens
  source 1..29: mol_type = unassigned RNA
acttactgtttagactgaatgagggaccg

SEQ ID NO: 3809 - DNA, 29 bp, Homo sapiens
  source 1..29: mol_type = unassigned DNA
acttactgtttagactgaatgagggaccg

SEQ ID NO: 3810 - DNA, 29 bp, Homo sapiens
  source 1..29: mol_type = unassigned DNA
cggtccctcattcagtctaaacagtaagt

SEQ ID NO: 3811 - RNA, 45 nt, Homo sapiens
  source 1..45: mol_type = unassigned RNA
tgtgagtgctatgatggagagtcaaactgagcgctcttagatttg

SEQ ID NO: 3812 - DNA, 45 bp, Homo sapiens
  source 1..45: mol_type = unassigned DNA
tgtgagtgctatgatggagagtcaaactgagcgctcttagatttg

SEQ ID NO: 3813 - DNA, 45 bp, Homo sapiens
  source 1..45: mol_type = unassigned DNA
caaatctaagagcgctcagtttgactctccatcatagcactcaca

SEQ ID NO: 3814 - RNA, 23 nt, Homo sapiens
  source 1..23: mol_type = unassigned RNA
gaccatatcaactgatgctgaaa

SEQ ID NO: 3815 - DNA, 23 bp, Homo sapiens
  source 1..23: mol_type = unassigned DNA
gaccatatcaactgatgctgaaa

SEQ ID NO: 3816 - DNA, 23 bp, Homo sapiens
  source 1..23: mol_type = unassigned DNA
tttcagcatcagttgatatggtc

SEQ ID NO: 3817 - RNA, 54 nt, Homo sapiens
  source 1..54: mol_type = unassigned RNA
aattccctgctcggaggacaaagaaatgggtcaaggggaatttgtttttgaagc

SEQ ID NO: 3818 - DNA, 54 bp, Homo sapiens
  source 1..54: mol_type = unassigned DNA
aattccctgctcggaggacaaagaaatgggtcaaggggaatttgtttttgaagc

SEQ ID NO: 3819 - DNA, 54 bp, Homo sapiens
  source 1..54: mol_type = unassigned DNA
gcttcaaaaacaaattccccttgacccatttctttgtcctccgagcagggaatt

SEQ ID NO: 3820 - RNA, 86 nt, Homo sapiens
  source 1..86: mol_type = unassigned RNA
ctcctgaagcagctggaacgtgacctttggtgtcttgccctgtggcatatgcaaactgatgtttaatggcaaatataaatgtagca

SEQ ID NO: 3821 - DNA, 86 bp, Homo sapiens
  source 1..86: mol_type = unassigned DNA
ctcctgaagcagctggaacgtgacctttggtgtcttgccctgtggcatatgcaaactgatgtttaatggcaaatataaatgtagca

SEQ ID NO: 3822 - DNA, 86 bp, Homo sapiens
  source 1..86: mol_type = unassigned DNA
tgctacatttatatttgccattaaacatcagtttgcatatgccacagggcaagacaccaaaggtcacgttccagctgcttcaggag

SEQ ID NO: 3823 - RNA, 83 nt, Homo sapiens
  source 1..83: mol_type = unassigned RNA
aaaaagcaaaacccagagacagagcctcacgggacaagagtcgcctgtgtctatgtagttgtaggaatgaatggcagcagatt

SEQ ID NO: 3824 - DNA, 83 bp, Homo sapiens
  source 1..83: mol_type = unassigned DNA
aaaaagcaaaacccagagacagagcctcacgggacaagagtcgcctgtgtctatgtagttgtaggaatgaatggcagcagatt

SEQ ID NO: 3825 - DNA, 83 bp, Homo sapiens
  source 1..83: mol_type = unassigned DNA
aatctgctgccattcattcctacaactacatagacacaggcgactcttgtcccgtgaggctctgtctctgggttttgcttttt

SEQ ID NO: 3826 - RNA, 32 nt, Homo sapiens
  source 1..32: mol_type = unassigned RNA
gttcttttgatatgtcgctgtattctgtttgt

SEQ ID NO: 3827 - DNA, 32 bp, Homo sapiens
  source 1..32: mol_type = unassigned DNA
gttcttttgatatgtcgctgtattctgtttgt

SEQ ID NO: 3828 - DNA, 32 bp, Homo sapiens
  source 1..32: mol_type = unassigned DNA
acaaacagaatacagcgacatatcaaaagaac

SEQ ID NO: 3829 - RNA, 56 nt, Homo sapiens
  source 1..56: mol_type = unassigned RNA
atgtttgtactgacttacctagaaggtcaggcaagaaatcggtttcctcatttttc

SEQ ID NO: 3830 - DNA, 56 bp, Homo sapiens
  source 1..56: mol_type = unassigned DNA
atgtttgtactgacttacctagaaggtcaggcaagaaatcggtttcctcatttttc

SEQ ID NO: 3831 - DNA, 56 bp, Homo sapiens
  source 1..56: mol_type = unassigned DNA
gaaaaatgaggaaaccgatttcttgcctgaccttctaggtaagtcagtacaaacat

SEQ ID NO: 3832 - RNA, 40 nt, Homo sapiens
  source 1..40: mol_type = unassigned RNA
ctgttttcctggttgcccagatggtcagaacatatccact

SEQ ID NO: 3833 - DNA, 40 bp, Homo sapiens
  source 1..40: mol_type = unassigned DNA
ctgttttcctggttgcccagatggtcagaacatatccact

SEQ ID NO: 3834 - DNA, 40 bp, Homo sapiens
  source 1..40: mol_type = unassigned DNA
agtggatatgttctgaccatctgggcaaccaggaaaacag

SEQ ID NO: 3835 - RNA, 27 nt, Homo sapiens
  source 1..27: mol_type = unassigned RNA
cgccaggttcggtgaggggtagctttt

SEQ ID NO: 3836 - DNA, 27 bp, Homo sapiens
  source 1..27: mol_type = unassigned DNA
cgccaggttcggtgaggggtagctttt

SEQ ID NO: 3837 - DNA, 27 bp, Homo sapiens
  source 1..27: mol_type = unassigned DNA
aaaagctacccctcaccgaacctggcg

SEQ ID NO: 3838 - RNA, 95 nt, Homo sapiens
  source 1..95: mol_type = unassigned RNA
gcacagatcatcccgtcacccaggtattaagcccagcatccattagctgttcttcctgatcctctccctcctctcatcccgtctcatctgacagg

SEQ ID NO: 3839 - DNA, 95 bp, Homo sapiens
  source 1..95: mol_type = unassigned DNA
gcacagatcatcccgtcacccaggtattaagcccagcatccattagctgttcttcctgatcctctccctcctctcatcccgtctcatctgacagg

SEQ ID NO: 3840 - DNA, 95 bp, Homo sapiens
  source 1..95: mol_type = unassigned DNA
cctgtcagatgagacgggatgagaggagggagaggatcaggaagaacagctaatggatgctgggcttaatacctgggtgacgggatgatctgtgc

SEQ ID NO: 3841 - RNA, 78 nt, Homo sapiens
  source 1..78: mol_type = unassigned RNA
ataggcttctggccaaaagggtgagtgctctgaaatgtccagctgcagtcatctctatagtatccgactttgtctgag

SEQ ID NO: 3842 - DNA, 78 bp, Homo sapiens
  source 1..78: mol_type = unassigned DNA
ataggcttctggccaaaagggtgagtgctctgaaatgtccagctgcagtcatctctatagtatccgactttgtctgag

SEQ ID NO: 3843 - DNA, 78 bp, Homo sapiens
  source 1..78: mol_type = unassigned DNA
ctcagacaaagtcggatactatagagatgactgcagctggacatttcagagcactcacccttttggccagaagcctat

SEQ ID NO: 3844 - RNA, 28 nt, Homo sapiens
  source 1..28: mol_type = unassigned RNA
gcaagcagatatgagggatgtggatatg

SEQ ID NO: 3845 - DNA, 28 bp, Homo sapiens
  source 1..28: mol_type = unassigned DNA
gcaagcagatatgagggatgtggatatg

SEQ ID NO: 3846 - DNA, 28 bp, Homo sapiens
  source 1..28: mol_type = unassigned DNA
catatccacatccctcatatctgcttgc

SEQ ID NO: 3847 - RNA, 83 nt, Homo sapiens
  source 1..83: mol_type = unassigned RNA
tccccgagacattgtctcgctctgttgcccaggctggagtgcagcggcgcgatctctgttcactgcaagctccgcctcccggg

SEQ ID NO: 3848 - DNA, 83 bp, Homo sapiens
  source 1..83: mol_type = unassigned DNA
tccccgagacattgtctcgctctgttgcccaggctggagtgcagcggcgcgatctctgttcactgcaagctccgcctcccggg

SEQ ID NO: 3849 - DNA, 83 bp, Homo sapiens
  source 1..83: mol_type = unassigned DNA
cccgggaggcggagcttgcagtgaacagagatcgcgccgctgcactccagcctgggcaacagagcgagacaatgtctcgggga

SEQ ID NO: 3850 - RNA, 40 nt, Homo sapiens
  source 1..40: mol_type = unassigned RNA
cccttattctaggacatgatgcactggcaaaattcactgg

SEQ ID NO: 3851 - DNA, 40 bp, Homo sapiens
  source 1..40: mol_type = unassigned DNA
cccttattctaggacatgatgcactggcaaaattcactgg

SEQ ID NO: 3852 - DNA, 40 bp, Homo sapiens
  source 1..40: mol_type = unassigned DNA
ccagtgaattttgccagtgcatcatgtcctagaataaggg

SEQ ID NO: 3853 - RNA, 71 nt, Homo sapiens
  source 1..71: mol_type = unassigned RNA
tgggtagctgggcagcgaggaagctgggggagtgaccgccccggcgcgggggccggactcgggacgtggcc

SEQ ID NO: 3854 - DNA, 71 bp, Homo sapiens
  source 1..71: mol_type = unassigned DNA
tgggtagctgggcagcgaggaagctgggggagtgaccgccccggcgcgggggccggactcgggacgtggcc

SEQ ID NO: 3855 - DNA, 71 bp, Homo sapiens
  source 1..71: mol_type = unassigned DNA
ggccacgtcccgagtccggcccccgcgccggggcggtcactcccccagcttcctcgctgcccagctaccca

SEQ ID NO: 3856 - RNA, 199 nt, Homo sapiens
  source 1..199: mol_type = unassigned RNA
actgcaaagaaagaagacataaacctgagtgttagaaagctactcaacagacataatattgtgtttggtgattacacatggactgagtttgatgaaccttttttgaccagaaatgtgcagtctgtgtctattattgacacagaattaaaggttaaagactcacaggtaagttactaatttgctgggccaaggaacagtt

SEQ ID NO: 3857 - DNA, 199 bp, Homo sapiens
  source 1..199: mol_type = unassigned DNA
actgcaaagaaagaagacataaacctgagtgttagaaagctactcaacagacataatattgtgtttggtgattacacatggactgagtttgatgaaccttttttgaccagaaatgtgcagtctgtgtctattattgacacagaattaaaggttaaagactcacaggtaagttactaatttgctgggccaaggaacagtt

SEQ ID NO: 3858 - DNA, 199 bp, Homo sapiens
  source 1..199: mol_type = unassigned DNA
aactgttccttggcccagcaaattagtaacttacctgtgagtctttaacctttaattctgtgtcaataatagacacagactgcacatttctggtcaaaaaaggttcatcaaactcagtccatgtgtaatcaccaaacacaatattatgtctgttgagtagctttctaacactcaggtttatgtcttctttctttgcagt

SEQ ID NO: 3859 - RNA, 60 nt, Homo sapiens
  source 1..60: mol_type = unassigned RNA
aatttttggtctaaccggttgtctagcatcacgttgtttctatggattgtttgtaaccag

SEQ ID NO: 3860 - DNA, 60 bp, Homo sapiens
  source 1..60: mol_type = unassigned DNA
aatttttggtctaaccggttgtctagcatcacgttgtttctatggattgtttgtaaccag

SEQ ID NO: 3861 - DNA, 60 bp, Homo sapiens
  source 1..60: mol_type = unassigned DNA
ctggttacaaacaatccatagaaacaacgtgatgctagacaaccggttagaccaaaaatt

SEQ ID NO: 3862 - RNA, 30 nt, Homo sapiens
  source 1..30: mol_type = unassigned RNA
ggggcaaatttcgggctgagatcaacatct

SEQ ID NO: 3863 - DNA, 30 bp, Homo sapiens
  source 1..30: mol_type = unassigned DNA
ggggcaaatttcgggctgagatcaacatct

SEQ ID NO: 3864 - DNA, 30 bp, Homo sapiens
  source 1..30: mol_type = unassigned DNA
agatgttgatctcagcccgaaatttgcccc

SEQ ID NO: 3865 - RNA, 103 nt, Homo sapiens
  source 1..103: mol_type = unassigned RNA
tttttccattgttagaactcatatttttgtgttttatgtttttgtaaataggtatgtgactgtcttatcaaatttattgacatctcattgaaataagctccga

SEQ ID NO: 3866 - DNA, 103 bp, Homo sapiens
  source 1..103: mol_type = unassigned DNA
tttttccattgttagaactcatatttttgtgttttatgtttttgtaaataggtatgtgactgtcttatcaaatttattgacatctcattgaaataagctccga

SEQ ID NO: 3867 - DNA, 103 bp, Homo sapiens
  source 1..103: mol_type = unassigned DNA
tcggagcttatttcaatgagatgtcaataaatttgataagacagtcacatacctatttacaaaaacataaaacacaaaaatatgagttctaacaatggaaaaa

SEQ ID NO: 3868 - RNA, 56 nt, Homo sapiens
  source 1..56: mol_type = unassigned RNA
tgtatggcacctctcctctctctctcttggtccttctcctgcctggtaagatgcct

SEQ ID NO: 3869 - DNA, 56 bp, Homo sapiens
  source 1..56: mol_type = unassigned DNA
tgtatggcacctctcctctctctctcttggtccttctcctgcctggtaagatgcct

SEQ ID NO: 3870 - DNA, 56 bp, Homo sapiens
  source 1..56: mol_type = unassigned DNA
aggcatcttaccaggcaggagaaggaccaagagagagagaggagaggtgccataca

SEQ ID NO: 3871 - RNA, 31 nt, Homo sapiens
  source 1..31: mol_type = unassigned RNA
aacacaacctggcttggacatgaagaccctc

SEQ ID NO: 3872 - DNA, 31 bp, Homo sapiens
  source 1..31: mol_type = unassigned DNA
aacacaacctggcttggacatgaagaccctc

SEQ ID NO: 3873 - DNA, 31 bp, Homo sapiens
  source 1..31: mol_type = unassigned DNA
gagggtcttcatgtccaagccaggttgtgtt

SEQ ID NO: 3874 - RNA, 34 nt, Homo sapiens
  source 1..34: mol_type = unassigned RNA
ccccacactgggctgtctggctgctggcagcaag

SEQ ID NO: 3875 - DNA, 34 bp, Homo sapiens
  source 1..34: mol_type = unassigned DNA
ccccacactgggctgtctggctgctggcagcaag

SEQ ID NO: 3876 - DNA, 34 bp, Homo sapiens
  source 1..34: mol_type = unassigned DNA
cttgctgccagcagccagacagcccagtgtgggg

SEQ ID NO: 3877 - RNA, 38 nt, Homo sapiens
  source 1..38: mol_type = unassigned RNA
atttgcagttctctgatgatttttgatgtttcgtatgc

SEQ ID NO: 3878 - DNA, 38 bp, Homo sapiens
  source 1..38: mol_type = unassigned DNA
atttgcagttctctgatgatttttgatgtttcgtatgc

SEQ ID NO: 3879 - DNA, 38 bp, Homo sapiens
  source 1..38: mol_type = unassigned DNA
gcatacgaaacatcaaaaatcatcagagaactgcaaat

SEQ ID NO: 3880 - RNA, 31 nt, Homo sapiens
  source 1..31: mol_type = unassigned RNA
tacacttgtgaccagtgtggggcagagacct

SEQ ID NO: 3881 - DNA, 31 bp, Homo sapiens
  source 1..31: mol_type = unassigned DNA
tacacttgtgaccagtgtggggcagagacct

SEQ ID NO: 3882 - DNA, 31 bp, Homo sapiens
  source 1..31: mol_type = unassigned DNA
aggtctctgccccacactggtcacaagtgta

SEQ ID NO: 3883 - RNA, 47 nt, Homo sapiens
  source 1..47: mol_type = unassigned RNA
caccttctttttctgacactctcccctcattccactggaatctggat

SEQ ID NO: 3884 - DNA, 47 bp, Homo sapiens
  source 1..47: mol_type = unassigned DNA
caccttctttttctgacactctcccctcattccactggaatctggat

SEQ ID NO: 3885 - DNA, 47 bp, Homo sapiens
  source 1..47: mol_type = unassigned DNA
atccagattccagtggaatgaggggagagtgtcagaaaaagaaggtg

SEQ ID NO: 3886 - RNA, 25 nt, Homo sapiens
  source 1..25: mol_type = unassigned RNA
tctcttgatggaagcacttcctggc

SEQ ID NO: 3887 - DNA, 25 bp, Homo sapiens
  source 1..25: mol_type = unassigned DNA
tctcttgatggaagcacttcctggc

SEQ ID NO: 3888 - DNA, 25 bp, Homo sapiens
  source 1..25: mol_type = unassigned DNA
gccaggaagtgcttccatcaagaga

SEQ ID NO: 3889 - RNA, 46 nt, Homo sapiens
  source 1..46: mol_type = unassigned RNA
tttattcttgcttaccttatcatactctttttgaaagtcttttttt

SEQ ID NO: 3890 - DNA, 46 bp, Homo sapiens
  source 1..46: mol_type = unassigned DNA
tttattcttgcttaccttatcatactctttttgaaagtcttttttt

SEQ ID NO: 3891 - DNA, 46 bp, Homo sapiens
  source 1..46: mol_type = unassigned DNA
aaaaaaagactttcaaaaagagtatgataaggtaagcaagaataaa

SEQ ID NO: 3892 - RNA, 73 nt, Homo sapiens
  source 1..73: mol_type = unassigned RNA
atccacggtgttggagcaagatctcaggctctcaggctgtggccatctagaggtaagaagcactttctgttgt

SEQ ID NO: 3893 - DNA, 73 bp, Homo sapiens
  source 1..73: mol_type = unassigned DNA
atccacggtgttggagcaagatctcaggctctcaggctgtggccatctagaggtaagaagcactttctgttgt

SEQ ID NO: 3894 - DNA, 73 bp, Homo sapiens
  source 1..73: mol_type = unassigned DNA
acaacagaaagtgcttcttacctctagatggccacagcctgagagcctgagatcttgctccaacaccgtggat

SEQ ID NO: 3895 - RNA, 32 nt, Homo sapiens
  source 1..32: mol_type = unassigned RNA
catcgtgttgcagctcatgaactcggccattc

SEQ ID NO: 3896 - DNA, 32 bp, Homo sapiens
  source 1..32: mol_type = unassigned DNA
catcgtgttgcagctcatgaactcggccattc

SEQ ID NO: 3897 - DNA, 32 bp, Homo sapiens
  source 1..32: mol_type = unassigned DNA
gaatggccgagttcatgagctgcaacacgatg

SEQ ID NO: 3898 - RNA, 22 nt, Homo sapiens
  source 1..22: mol_type = unassigned RNA
tgctggttctcacttacctgga

SEQ ID NO: 3899 - DNA, 22 bp, Homo sapiens
  source 1..22: mol_type = unassigned DNA
tgctggttctcacttacctgga

SEQ ID NO: 3900 - DNA, 22 bp, Homo sapiens
  source 1..22: mol_type = unassigned DNA
tccaggtaagtgagaaccagca

SEQ ID NO: 3901 - RNA, 30 nt, Homo sapiens
  source 1..30: mol_type = unassigned RNA
agactccgtgggcgtaggacctccgagcca

SEQ ID NO: 3902 - DNA, 30 bp, Homo sapiens
  source 1..30: mol_type = unassigned DNA
agactccgtgggcgtaggacctccgagcca

SEQ ID NO: 3903 - DNA, 30 bp, Homo sapiens
  source 1..30: mol_type = unassigned DNA
tggctcggaggtcctacgcccacggagtct

SEQ ID NO: 3904 - RNA, 41 nt, Homo sapiens
  source 1..41: mol_type = unassigned RNA
agagagaaaaagctgtctacctcactggtatattcactgta

SEQ ID NO: 3905 - DNA, 41 bp, Homo sapiens
  source 1..41: mol_type = unassigned DNA
agagagaaaaagctgtctacctcactggtatattcactgta

SEQ ID NO: 3906 - DNA, 41 bp, Homo sapiens
  source 1..41: mol_type = unassigned DNA
tacagtgaatataccagtgaggtagacagctttttctctct

SEQ ID NO: 3907 - RNA, 37 nt, Homo sapiens
  source 1..37: mol_type = unassigned RNA
ttagcacatggttctgtaggctgtacaggaagcatgg

SEQ ID NO: 3908 - DNA, 37 bp, Homo sapiens
  source 1..37: mol_type = unassigned DNA
ttagcacatggttctgtaggctgtacaggaagcatgg

SEQ ID NO: 3909 - DNA, 37 bp, Homo sapiens
  source 1..37: mol_type = unassigned DNA
ccatgcttcctgtacagcctacagaaccatgtgctaa

SEQ ID NO: 3910 - RNA, 26 nt, Homo sapiens
  source 1..26: mol_type = unassigned RNA
tttttcactagtagactcacacttaa

SEQ ID NO: 3911 - DNA, 26 bp, Homo sapiens
  source 1..26: mol_type = unassigned DNA
tttttcactagtagactcacacttaa

SEQ ID NO: 3912 - DNA, 26 bp, Homo sapiens
  source 1..26: mol_type = unassigned DNA
ttaagtgtgagtctactagtgaaaaa

SEQ ID NO: 3913 - RNA, 94 nt, Homo sapiens
  source 1..94: mol_type = unassigned RNA
ttgttcaccctctggctcaaggaccaagtatgcttctactcactctctacctccaagcacctaccctactccgacttaactgcctgacccacaa

SEQ ID NO: 3914 - DNA, 94 bp, Homo sapiens
  source 1..94: mol_type = unassigned DNA
ttgttcaccctctggctcaaggaccaagtatgcttctactcactctctacctccaagcacctaccctactccgacttaactgcctgacccacaa

SEQ ID NO: 3915 - DNA, 94 bp, Homo sapiens
  source 1..94: mol_type = unassigned DNA
ttgtgggtcaggcagttaagtcggagtagggtaggtgcttggaggtagagagtgagtagaagcatacttggtccttgagccagagggtgaacaa

SEQ ID NO: 3916 - RNA, 29 nt, Homo sapiens
  source 1..29: mol_type = unassigned RNA
agctgcgtggtacgtgactggaggcatat

SEQ ID NO: 3917 - DNA, 29 bp, Homo sapiens
  source 1..29: mol_type = unassigned DNA
agctgcgtggtacgtgactggaggcatat

SEQ ID NO: 3918 - DNA, 29 bp, Homo sapiens
  source 1..29: mol_type = unassigned DNA
atatgcctccagtcacgtaccacgcagct

SEQ ID NO: 3919 - RNA, 112 nt, Homo sapiens
  source 1..112: mol_type = unassigned RNA
gagctcagttagaaggttgttatggattaaaaggtatatttttgtttagtggttcattccaggtggtggccgtggagatggcaagaagtgcttggattttgggtatgttttg

SEQ ID NO: 3920 - DNA, 112 bp, Homo sapiens
  source 1..112: mol_type = unassigned DNA
gagctcagttagaaggttgttatggattaaaaggtatatttttgtttagtggttcattccaggtggtggccgtggagatggcaagaagtgcttggattttgggtatgttttg

SEQ ID NO: 3921 - DNA, 112 bp, Homo sapiens
  source 1..112: mol_type = unassigned DNA
caaaacatacccaaaatccaagcacttcttgccatctccacggccaccacctggaatgaaccactaaacaaaaatataccttttaatccataacaaccttctaactgagctc

SEQ ID NO: 3922 - RNA, 50 nt, Homo sapiens
  source 1..50: mol_type = unassigned RNA
tgctgccaccaggttgggaaagaacaaagaacctgagtgccttattacac

SEQ ID NO: 3923 - DNA, 50 bp, Homo sapiens
  source 1..50: mol_type = unassigned DNA
tgctgccaccaggttgggaaagaacaaagaacctgagtgccttattacac

SEQ ID NO: 3924 - DNA, 50 bp, Homo sapiens
  source 1..50: mol_type = unassigned DNA
gtgtaataaggcactcaggttctttgttctttcccaacctggtggcagca

SEQ ID NO: 3925 - RNA, 30 nt, Homo sapiens
  source 1..30: mol_type = unassigned RNA
cttggttttccaggatgtccactgtgcagc

SEQ ID NO: 3926 - DNA, 30 bp, Homo sapiens
  source 1..30: mol_type = unassigned DNA
cttggttttccaggatgtccactgtgcagc

SEQ ID NO: 3927 - DNA, 30 bp, Homo sapiens
  source 1..30: mol_type = unassigned DNA
gctgcacagtggacatcctggaaaaccaag

SEQ ID NO: 3928 - RNA, 33 nt, Homo sapiens
  source 1..33: mol_type = unassigned RNA
cattgactgagcagtgctacagtttgccgtgac

SEQ ID NO: 3929 - DNA, 33 bp, Homo sapiens
  source 1..33: mol_type = unassigned DNA
cattgactgagcagtgctacagtttgccgtgac

SEQ ID NO: 3930 - DNA, 33 bp, Homo sapiens
  source 1..33: mol_type = unassigned DNA
gtcacggcaaactgtagcactgctcagtcaatg

SEQ ID NO: 3931 - RNA, 25 nt, Homo sapiens
  source 1..25: mol_type = unassigned RNA
ttttcgaatggtagaattcatcaaa

SEQ ID NO: 3932 - DNA, 25 bp, Homo sapiens
  source 1..25: mol_type = unassigned DNA
ttttcgaatggtagaattcatcaaa

SEQ ID NO: 3933 - DNA, 25 bp, Homo sapiens
  source 1..25: mol_type = unassigned DNA
tttgatgaattctaccattcgaaaa

SEQ ID NO: 3934 - RNA, 24 nt, Homo sapiens
  source 1..24: mol_type = unassigned RNA
ttttccaattgtagaactaatcat

SEQ ID NO: 3935 - DNA, 24 bp, Homo sapiens
  source 1..24: mol_type = unassigned DNA
ttttccaattgtagaactaatcat

SEQ ID NO: 3936 - DNA, 24 bp, Homo sapiens
  source 1..24: mol_type = unassigned DNA
atgattagttctacaattggaaaa

SEQ ID NO: 3937 - RNA, 26 nt, Homo sapiens
  source 1..26: mol_type = unassigned RNA
cataagaatttcggtgggacacaaac

SEQ ID NO: 3938 - DNA, 26 bp, Homo sapiens
  source 1..26: mol_type = unassigned DNA
cataagaatttcggtgggacacaaac

SEQ ID NO: 3939 - DNA, 26 bp, Homo sapiens
  source 1..26: mol_type = unassigned DNA
gtttgtgtcccaccgaaattcttatg

SEQ ID NO: 3940 - RNA, 99 nt, Homo sapiens
  source 1..99: mol_type = unassigned RNA
ccctttaacctacttacagcacactcaccagtcaccagtaagggtttccagtgtagaagctgaccattgagattttactttagtaggtttgtggatttt

SEQ ID NO: 3941 - DNA, 99 bp, Homo sapiens
  source 1..99: mol_type = unassigned DNA
ccctttaacctacttacagcacactcaccagtcaccagtaagggtttccagtgtagaagctgaccattgagattttactttagtaggtttgtggatttt

SEQ ID NO: 3942 - DNA, 99 bp, Homo sapiens
  source 1..99: mol_type = unassigned DNA
aaaatccacaaacctactaaagtaaaatctcaatggtcagcttctacactggaaacccttactggtgactggtgagtgtgctgtaagtaggttaaaggg

SEQ ID NO: 3943 - RNA, 67 nt, Homo sapiens
  source 1..67: mol_type = unassigned RNA
atgtgccatggtagactcacaaatctttgttgtctaaacttagaggcactttgcagtcactatcttt

SEQ ID NO: 3944 - DNA, 67 bp, Homo sapiens
  source 1..67: mol_type = unassigned DNA
atgtgccatggtagactcacaaatctttgttgtctaaacttagaggcactttgcagtcactatcttt

SEQ ID NO: 3945 - DNA, 67 bp, Homo sapiens
  source 1..67: mol_type = unassigned DNA
aaagatagtgactgcaaagtgcctctaagtttagacaacaaagatttgtgagtctaccatggcacat

SEQ ID NO: 3946 - RNA, 32 nt, Homo sapiens
  source 1..32: mol_type = unassigned RNA
cctctactgagccctgctccttgcctcatggg

SEQ ID NO: 3947 - DNA, 32 bp, Homo sapiens
  source 1..32: mol_type = unassigned DNA
cctctactgagccctgctccttgcctcatggg

SEQ ID NO: 3948 - DNA, 32 bp, Homo sapiens
  source 1..32: mol_type = unassigned DNA
cccatgaggcaaggagcagggctcagtagagg

SEQ ID NO: 3949 - RNA, 29 nt, Homo sapiens
  source 1..29: mol_type = unassigned RNA
aatcccatgacagtctaattaccttatct

SEQ ID NO: 3950 - DNA, 29 bp, Homo sapiens
  source 1..29: mol_type = unassigned DNA
aatcccatgacagtctaattaccttatct

SEQ ID NO: 3951 - DNA, 29 bp, Homo sapiens
  source 1..29: mol_type = unassigned DNA
agataaggtaattagactgtcatgggatt

SEQ ID NO: 3952 - RNA, 44 nt, Homo sapiens
  source 1..44: mol_type = unassigned RNA
ccttagctttgagcctctggtttctcgtttcctctttatgggtt

SEQ ID NO: 3953 - DNA, 44 bp, Homo sapiens
  source 1..44: mol_type = unassigned DNA
ccttagctttgagcctctggtttctcgtttcctctttatgggtt

SEQ ID NO: 3954 - DNA, 44 bp, Homo sapiens
  source 1..44: mol_type = unassigned DNA
aacccataaagaggaaacgagaaaccagaggctcaaagctaagg

SEQ ID NO: 3955 - RNA, 30 nt, Homo sapiens
  source 1..30: mol_type = unassigned RNA
tggctccgccgtagaggggttggcagtggc

SEQ ID NO: 3956 - DNA, 30 bp, Homo sapiens
  source 1..30: mol_type = unassigned DNA
tggctccgccgtagaggggttggcagtggc

SEQ ID NO: 3957 - DNA, 30 bp, Homo sapiens
  source 1..30: mol_type = unassigned DNA
gccactgccaacccctctacggcggagcca

SEQ ID NO: 3958 - RNA, 22 nt, Homo sapiens
  source 1..22: mol_type = unassigned RNA
ttttgcagtggttcaactcacc

SEQ ID NO: 3959 - DNA, 22 bp, Homo sapiens
  source 1..22: mol_type = unassigned DNA
ttttgcagtggttcaactcacc

SEQ ID NO: 3960 - DNA, 22 bp, Homo sapiens
  source 1..22: mol_type = unassigned DNA
ggtgagttgaaccactgcaaaa

SEQ ID NO: 3961 - RNA, 32 nt, Homo sapiens
  source 1..32: mol_type = unassigned RNA
ttaggccatgtcagacctgacaccaggaggga

SEQ ID NO: 3962 - DNA, 32 bp, Homo sapiens
  source 1..32: mol_type = unassigned DNA
ttaggccatgtcagacctgacaccaggaggga

SEQ ID NO: 3963 - DNA, 32 bp, Homo sapiens
  source 1..32: mol_type = unassigned DNA
tccctcctggtgtcaggtctgacatggcctaa

SEQ ID NO: 3964 - RNA, 29 nt, Homo sapiens
  source 1..29: mol_type = unassigned RNA
ttgtgtgcgctcgggcgggctgcaccggg

SEQ ID NO: 3965 - DNA, 29 bp, Homo sapiens
  source 1..29: mol_type = unassigned DNA
ttgtgtgcgctcgggcgggctgcaccggg

SEQ ID NO: 3966 - DNA, 29 bp, Homo sapiens
  source 1..29: mol_type = unassigned DNA
cccggtgcagcccgcccgagcgcacacaa

SEQ ID NO: 3967 - RNA, 83 nt, Homo sapiens
  source 1..83: mol_type = unassigned RNA
aatcgtaagattaatcttgaactgaaaggtctttaaaaaatgtgggaaggtcaaggtcagaaggactttgaaactcatagcca

SEQ ID NO: 3968 - DNA, 83 bp, Homo sapiens
  source 1..83: mol_type = unassigned DNA
aatcgtaagattaatcttgaactgaaaggtctttaaaaaatgtgggaaggtcaaggtcagaaggactttgaaactcatagcca

SEQ ID NO: 3969 - DNA, 83 bp, Homo sapiens
  source 1..83: mol_type = unassigned DNA
tggctatgagtttcaaagtccttctgaccttgaccttcccacattttttaaagacctttcagttcaagattaatcttacgatt

SEQ ID NO: 3970 - RNA, 190 nt, Homo sapiens
  source 1..190: mol_type = unassigned RNA
agtctgatcttattgactgatgttgttttgttctttttcagtaggtgaccatggttatgataattctttgcctagtatgcatccatttctagctgcccacggacctgcatttcacaaaggctacaagcatagcacaattaacattgtggatatttatccaatgatgtgccacatcctgggattaaaacca

SEQ ID NO: 3971 - DNA, 190 bp, Homo sapiens
  source 1..190: mol_type = unassigned DNA
agtctgatcttattgactgatgttgttttgttctttttcagtaggtgaccatggttatgataattctttgcctagtatgcatccatttctagctgcccacggacctgcatttcacaaaggctacaagcatagcacaattaacattgtggatatttatccaatgatgtgccacatcctgggattaaaacca

SEQ ID NO: 3972 - DNA, 190 bp, Homo sapiens
  source 1..190: mol_type = unassigned DNA
tggttttaatcccaggatgtggcacatcattggataaatatccacaatgttaattgtgctatgcttgtagcctttgtgaaatgcaggtccgtgggcagctagaaatggatgcatactaggcaaagaattatcataaccatggtcacctactgaaaaagaacaaaacaacatcagtcaataagatcagact

SEQ ID NO: 3973 - RNA, 49 nt, Homo sapiens
  source 1..49: mol_type = unassigned RNA
aaaaagcagattcggggacatccaacttgacctctctgggggacttggc

SEQ ID NO: 3974 - DNA, 49 bp, Homo sapiens
  source 1..49: mol_type = unassigned DNA
aaaaagcagattcggggacatccaacttgacctctctgggggacttggc

SEQ ID NO: 3975 - DNA, 49 bp, Homo sapiens
  source 1..49: mol_type = unassigned DNA
gccaagtcccccagagaggtcaagttggatgtccccgaatctgcttttt

SEQ ID NO: 3976 - RNA, 66 nt, Homo sapiens
  source 1..66: mol_type = unassigned RNA
acgatcttggcttactgcaacctctacctcatgattaaaatactgtatgaagccaggtgcagtggc

SEQ ID NO: 3977 - DNA, 66 bp, Homo sapiens
  source 1..66: mol_type = unassigned DNA
acgatcttggcttactgcaacctctacctcatgattaaaatactgtatgaagccaggtgcagtggc

SEQ ID NO: 3978 - DNA, 66 bp, Homo sapiens
  source 1..66: mol_type = unassigned DNA
gccactgcacctggcttcatacagtattttaatcatgaggtagaggttgcagtaagccaagatcgt

SEQ ID NO: 3979 - RNA, 37 nt, Homo sapiens
  source 1..37: mol_type = unassigned RNA
aaaatcaggctaaagatttagtaggttgcttatttag

SEQ ID NO: 3980 - DNA, 37 bp, Homo sapiens
  source 1..37: mol_type = unassigned DNA
aaaatcaggctaaagatttagtaggttgcttatttag

SEQ ID NO: 3981 - DNA, 37 bp, Homo sapiens
  source 1..37: mol_type = unassigned DNA
ctaaataagcaacctactaaatctttagcctgatttt

SEQ ID NO: 3982 - RNA, 110 nt, Homo sapiens
  source 1..110: mol_type = unassigned RNA
cactgagcagacccagtcccgggtagacatccatagaaaagagaactctggagctgcagagaagcttgtcaccatccatgccaccccagaggggacttctgaagcatgcc

SEQ ID NO: 3983 - DNA, 110 bp, Homo sapiens
  source 1..110: mol_type = unassigned DNA
cactgagcagacccagtcccgggtagacatccatagaaaagagaactctggagctgcagagaagcttgtcaccatccatgccaccccagaggggacttctgaagcatgcc

SEQ ID NO: 3984 - DNA, 110 bp, Homo sapiens
  source 1..110: mol_type = unassigned DNA
ggcatgcttcagaagtcccctctggggtggcatggatggtgacaagcttctctgcagctccagagttctcttttctatggatgtctacccgggactgggtctgctcagtg

SEQ ID NO: 3985 - RNA, 24 nt, Homo sapiens
  source 1..24: mol_type = unassigned RNA
taggtgcttctctagatgtatgtc

SEQ ID NO: 3986 - DNA, 24 bp, Homo sapiens
  source 1..24: mol_type = unassigned DNA
taggtgcttctctagatgtatgtc

SEQ ID NO: 3987 - DNA, 24 bp, Homo sapiens
  source 1..24: mol_type = unassigned DNA
gacatacatctagagaagcaccta

SEQ ID NO: 3988 - RNA, 43 nt, Homo sapiens
  source 1..43: mol_type = unassigned RNA
ataatactaccccgtgatgatgagactgagagggatatggtca

SEQ ID NO: 3989 - DNA, 43 bp, Homo sapiens
  source 1..43: mol_type = unassigned DNA
ataatactaccccgtgatgatgagactgagagggatatggtca

SEQ ID NO: 3990 - DNA, 43 bp, Homo sapiens
  source 1..43: mol_type = unassigned DNA
tgaccatatccctctcagtctcatcatcacggggtagtattat

SEQ ID NO: 3991 - RNA, 32 nt, Homo sapiens
  source 1..32: mol_type = unassigned RNA
taggccttcaagaatcgtgtgacctgagtgtg

SEQ ID NO: 3992 - DNA, 32 bp, Homo sapiens
  source 1..32: mol_type = unassigned DNA
taggccttcaagaatcgtgtgacctgagtgtg

SEQ ID NO: 3993 - DNA, 32 bp, Homo sapiens
  source 1..32: mol_type = unassigned DNA
cacactcaggtcacacgattcttgaaggccta

SEQ ID NO: 3994 - RNA, 71 nt, Homo sapiens
  source 1..71: mol_type = unassigned RNA
gcagcaagcgccacctcaacccgcccttttctatgacgcagagtctctccccctccctccctgactccgcc

SEQ ID NO: 3995 - DNA, 71 bp, Homo sapiens
  source 1..71: mol_type = unassigned DNA
gcagcaagcgccacctcaacccgcccttttctatgacgcagagtctctccccctccctccctgactccgcc

SEQ ID NO: 3996 - DNA, 71 bp, Homo sapiens
  source 1..71: mol_type = unassigned DNA
ggcggagtcagggagggagggggagagactctgcgtcatagaaaagggcgggttgaggtggcgcttgctgc

SEQ ID NO: 3997 - RNA, 25 nt, Homo sapiens
  source 1..25: mol_type = unassigned RNA
ttttccaagggtagaactgatgagt

SEQ ID NO: 3998 - DNA, 25 bp, Homo sapiens
  source 1..25: mol_type = unassigned DNA
ttttccaagggtagaactgatgagt

SEQ ID NO: 3999 - DNA, 25 bp, Homo sapiens
  source 1..25: mol_type = unassigned DNA
actcatcagttctacccttggaaaa

SEQ ID NO: 4000 - RNA, 118 nt, Homo sapiens
  source 1..118: mol_type = unassigned RNA
cctggttacacctcctctggctcagtcacatagctgcgtggtacgtgactggaggtgtatccttgtcctcgtctgaatcacgctgatgtggccccaaccccacctccctccccacccc

SEQ ID NO: 4001 - DNA, 118 bp, Homo sapiens
  source 1..118: mol_type = unassigned DNA
cctggttacacctcctctggctcagtcacatagctgcgtggtacgtgactggaggtgtatccttgtcctcgtctgaatcacgctgatgtggccccaaccccacctccctccccacccc

SEQ ID NO: 4002 - DNA, 118 bp, Homo sapiens
  source 1..118: mol_type = unassigned DNA
ggggtggggagggaggtggggttggggccacatcagcgtgattcagacgaggacaaggatacacctccagtcacgtaccacgcagctatgtgactgagccagaggaggtgtaaccagg

SEQ ID NO: 4003 - RNA, 31 nt, Homo sapiens
  source 1..31: mol_type = unassigned RNA
ggacaccactggcctgtgactgtcccctgcc

SEQ ID NO: 4004 - DNA, 31 bp, Homo sapiens
  source 1..31: mol_type = unassigned DNA
ggacaccactggcctgtgactgtcccctgcc

SEQ ID NO: 4005 - DNA, 31 bp, Homo sapiens
  source 1..31: mol_type = unassigned DNA
ggcaggggacagtcacaggccagtggtgtcc

SEQ ID NO: 4006 - RNA, 45 nt, Homo sapiens
  source 1..45: mol_type = unassigned RNA
atagcccaggaattgattggtgaatgcatatgggcctgcgaccaa

SEQ ID NO: 4007 - DNA, 45 bp, Homo sapiens
  source 1..45: mol_type = unassigned DNA
atagcccaggaattgattggtgaatgcatatgggcctgcgaccaa

SEQ ID NO: 4008 - DNA, 45 bp, Homo sapiens
  source 1..45: mol_type = unassigned DNA
ttggtcgcaggcccatatgcattcaccaatcaattcctgggctat

SEQ ID NO: 4009 - RNA, 27 nt, Homo sapiens
  source 1..27: mol_type = unassigned RNA
ctttgcactggtagaatttctctgtat

SEQ ID NO: 4010 - DNA, 27 bp, Homo sapiens
  source 1..27: mol_type = unassigned DNA
ctttgcactggtagaatttctctgtat

SEQ ID NO: 4011 - DNA, 27 bp, Homo sapiens
  source 1..27: mol_type = unassigned DNA
atacagagaaattctaccagtgcaaag

SEQ ID NO: 4012 - RNA, 24 nt, Homo sapiens
  source 1..24: mol_type = unassigned RNA
ttctagcaccttctccaaccagct

SEQ ID NO: 4013 - DNA, 24 bp, Homo sapiens
  source 1..24: mol_type = unassigned DNA
ttctagcaccttctccaaccagct

SEQ ID NO: 4014 - DNA, 24 bp, Homo sapiens
  source 1..24: mol_type = unassigned DNA
agctggttggagaaggtgctagaa

SEQ ID NO: 4015 - RNA, 53 nt, Homo sapiens
  source 1..53: mol_type = unassigned RNA
cgcctccctcccctcgccgccgccgccgccgccagcatctgggaccggccgat

SEQ ID NO: 4016 - DNA, 53 bp, Homo sapiens
  source 1..53: mol_type = unassigned DNA
cgcctccctcccctcgccgccgccgccgccgccagcatctgggaccggccgat

SEQ ID NO: 4017 - DNA, 53 bp, Homo sapiens
  source 1..53: mol_type = unassigned DNA
atcggccggtcccagatgctggcggcggcggcggcggcgaggggagggaggcg

SEQ ID NO: 4018 - RNA, 32 nt, Homo sapiens
  source 1..32: mol_type = unassigned RNA
cactcaagcccaggaactggaggctgcaggga

SEQ ID NO: 4019 - DNA, 32 bp, Homo sapiens
  source 1..32: mol_type = unassigned DNA
cactcaagcccaggaactggaggctgcaggga

SEQ ID NO: 4020 - DNA, 32 bp, Homo sapiens
  source 1..32: mol_type = unassigned DNA
tccctgcagcctccagttcctgggcttgagtg

SEQ ID NO: 4021 - RNA, 23 nt, Homo sapiens
  source 1..23: mol_type = unassigned RNA
acttttcttggagccagaaggtg

SEQ ID NO: 4022 - DNA, 23 bp, Homo sapiens
  source 1..23: mol_type = unassigned DNA
acttttcttggagccagaaggtg

SEQ ID NO: 4023 - DNA, 23 bp, Homo sapiens
  source 1..23: mol_type = unassigned DNA
caccttctggctccaagaaaagt

SEQ ID NO: 4024 - RNA, 24 nt, Homo sapiens
  source 1..24: mol_type = unassigned RNA
gttttgaatcttaaactgaaacct

SEQ ID NO: 4025 - DNA, 24 bp, Homo sapiens
  source 1..24: mol_type = unassigned DNA
gttttgaatcttaaactgaaacct

SEQ ID NO: 4026 - DNA, 24 bp, Homo sapiens
  source 1..24: mol_type = unassigned DNA
aggtttcagtttaagattcaaaac

SEQ ID NO: 4027 - RNA, 33 nt, Homo sapiens
  source 1..33: mol_type = unassigned RNA
tttctgccccagaggaaggagctgtagtgtcct

SEQ ID NO: 4028 - DNA, 33 bp, Homo sapiens
  source 1..33: mol_type = unassigned DNA
tttctgccccagaggaaggagctgtagtgtcct

SEQ ID NO: 4029 - DNA, 33 bp, Homo sapiens
  source 1..33: mol_type = unassigned DNA
aggacactacagctccttcctctggggcagaaa

SEQ ID NO: 4030 - RNA, 25 nt, Homo sapiens
  source 1..25: mol_type = unassigned RNA
caagaccaggcgatgggccagcagg

SEQ ID NO: 4031 - DNA, 25 bp, Homo sapiens
  source 1..25: mol_type = unassigned DNA
caagaccaggcgatgggccagcagg

SEQ ID NO: 4032 - DNA, 25 bp, Homo sapiens
  source 1..25: mol_type = unassigned DNA
cctgctggcccatcgcctggtcttg

SEQ ID NO: 4033 - RNA, 30 nt, Homo sapiens
  source 1..30: mol_type = unassigned RNA
tagagcacataggaccagatgaagtgatcg

SEQ ID NO: 4034 - DNA, 30 bp, Homo sapiens
  source 1..30: mol_type = unassigned DNA
tagagcacataggaccagatgaagtgatcg

SEQ ID NO: 4035 - DNA, 30 bp, Homo sapiens
  source 1..30: mol_type = unassigned DNA
cgatcacttcatctggtcctatgtgctcta

SEQ ID NO: 4036 - RNA, 134 nt, Homo sapiens
  source 1..134: mol_type = unassigned RNA
gcacaggtgagaggaggaggcaggacaactcgcttcagaaacagctagaaggagactgggacctcgaaagccgcctcctcgcaggagcaccagctggagcacagctaccgggacctcctgcctggctgtccagt

SEQ ID NO: 4037 - DNA, 134 bp, Homo sapiens
  source 1..134: mol_type = unassigned DNA
gcacaggtgagaggaggaggcaggacaactcgcttcagaaacagctagaaggagactgggacctcgaaagccgcctcctcgcaggagcaccagctggagcacagctaccgggacctcctgcctggctgtccagt

SEQ ID NO: 4038 - DNA, 134 bp, Homo sapiens
  source 1..134: mol_type = unassigned DNA
actggacagccaggcaggaggtcccggtagctgtgctccagctggtgctcctgcgaggaggcggctttcgaggtcccagtctccttctagctgtttctgaagcgagttgtcctgcctcctcctctcacctgtgc

SEQ ID NO: 4039 - RNA, 46 nt, Homo sapiens
  source 1..46: mol_type = unassigned RNA
ctgtactatcttttccaatggttgaactaatttatactcccaccag

SEQ ID NO: 4040 - DNA, 46 bp, Homo sapiens
  source 1..46: mol_type = unassigned DNA
ctgtactatcttttccaatggttgaactaatttatactcccaccag

SEQ ID NO: 4041 - DNA, 46 bp, Homo sapiens
  source 1..46: mol_type = unassigned DNA
ctggtgggagtataaattagttcaaccattggaaaagatagtacag

SEQ ID NO: 4042 - RNA, 40 nt, Homo sapiens
  source 1..40: mol_type = unassigned RNA
ttctcttgcctggtcaatgatgacattgttcactctgatt

SEQ ID NO: 4043 - DNA, 40 bp, Homo sapiens
  source 1..40: mol_type = unassigned DNA
ttctcttgcctggtcaatgatgacattgttcactctgatt

SEQ ID NO: 4044 - DNA, 40 bp, Homo sapiens
  source 1..40: mol_type = unassigned DNA
aatcagagtgaacaatgtcatcattgaccaggcaagagaa

SEQ ID NO: 4045 - RNA, 55 nt, Homo sapiens
  source 1..55: mol_type = unassigned RNA
tcagtgattccaccagagtttgaagctgttgcttgaacttgaggagagtggcagg

SEQ ID NO: 4046 - DNA, 55 bp, Homo sapiens
  source 1..55: mol_type = unassigned DNA
tcagtgattccaccagagtttgaagctgttgcttgaacttgaggagagtggcagg

SEQ ID NO: 4047 - DNA, 55 bp, Homo sapiens
  source 1..55: mol_type = unassigned DNA
cctgccactctcctcaagttcaagcaacagcttcaaactctggtggaatcactga

SEQ ID NO: 4048 - RNA, 24 nt, Homo sapiens
  source 1..24: mol_type = unassigned RNA
ttagtttatacactgattttgaga

SEQ ID NO: 4049 - DNA, 24 bp, Homo sapiens
  source 1..24: mol_type = unassigned DNA
ttagtttatacactgattttgaga

SEQ ID NO: 4050 - DNA, 24 bp, Homo sapiens
  source 1..24: mol_type = unassigned DNA
tctcaaaatcagtgtataaactaa

SEQ ID NO: 4051 - RNA, 43 nt, Homo sapiens
  source 1..43: mol_type = unassigned RNA
gaagttcatttcctcttgcttctactccccttacccccacagc

SEQ ID NO: 4052 - DNA, 43 bp, Homo sapiens
  source 1..43: mol_type = unassigned DNA
gaagttcatttcctcttgcttctactccccttacccccacagc

SEQ ID NO: 4053 - DNA, 43 bp, Homo sapiens
  source 1..43: mol_type = unassigned DNA
gctgtgggggtaaggggagtagaagcaagaggaaatgaacttc

SEQ ID NO: 4054 - RNA, 30 nt, Homo sapiens
  source 1..30: mol_type = unassigned RNA
cctccgctggaaggagtggaacccagactt

SEQ ID NO: 4055 - DNA, 30 bp, Homo sapiens
  source 1..30: mol_type = unassigned DNA
cctccgctggaaggagtggaacccagactt

SEQ ID NO: 4056 - DNA, 30 bp, Homo sapiens
  source 1..30: mol_type = unassigned DNA
aagtctgggttccactccttccagcggagg

SEQ ID NO: 4057 - RNA, 30 nt, Homo sapiens
  source 1..30: mol_type = unassigned RNA
aagcttttgatgaggacactggactaccag

SEQ ID NO: 4058 - DNA, 30 bp, Homo sapiens
  source 1..30: mol_type = unassigned DNA
aagcttttgatgaggacactggactaccag

SEQ ID NO: 4059 - DNA, 30 bp, Homo sapiens
  source 1..30: mol_type = unassigned DNA
ctggtagtccagtgtcctcatcaaaagctt

SEQ ID NO: 4060 - RNA, 23 nt, Homo sapiens
  source 1..23: mol_type = unassigned RNA
tccttccatatgcatatacactt

SEQ ID NO: 4061 - DNA, 23 bp, Homo sapiens
  source 1..23: mol_type = unassigned DNA
tccttccatatgcatatacactt

SEQ ID NO: 4062 - DNA, 23 bp, Homo sapiens
  source 1..23: mol_type = unassigned DNA
aagtgtatatgcatatggaagga

SEQ ID NO: 4063 - RNA, 31 nt, Homo sapiens
  source 1..31: mol_type = unassigned RNA
aggtctgctatggcctggtcaacgatgacaa

SEQ ID NO: 4064 - DNA, 31 bp, Homo sapiens
  source 1..31: mol_type = unassigned DNA
aggtctgctatggcctggtcaacgatgacaa

SEQ ID NO: 4065 - DNA, 31 bp, Homo sapiens
  source 1..31: mol_type = unassigned DNA
ttgtcatcgttgaccaggccatagcagacct

SEQ ID NO: 4066 - RNA, 29 nt, Homo sapiens
  source 1..29: mol_type = unassigned RNA
gagacacatggagagttggtcaggctgct

SEQ ID NO: 4067 - DNA, 29 bp, Homo sapiens
  source 1..29: mol_type = unassigned DNA
gagacacatggagagttggtcaggctgct

SEQ ID NO: 4068 - DNA, 29 bp, Homo sapiens
  source 1..29: mol_type = unassigned DNA
agcagcctgaccaactctccatgtgtctc

SEQ ID NO: 4069 - RNA, 32 nt, Homo sapiens
  source 1..32: mol_type = unassigned RNA
gggacctgttgggaactctgacctctcacctt

SEQ ID NO: 4070 - DNA, 32 bp, Homo sapiens
  source 1..32: mol_type = unassigned DNA
gggacctgttgggaactctgacctctcacctt

SEQ ID NO: 4071 - DNA, 32 bp, Homo sapiens
  source 1..32: mol_type = unassigned DNA
aaggtgagaggtcagagttcccaacaggtccc

SEQ ID NO: 4072 - RNA, 32 nt, Homo sapiens
  source 1..32: mol_type = unassigned RNA
tcactcttaagctgcatcaggtactgatgggc

SEQ ID NO: 4073 - DNA, 32 bp, Homo sapiens
  source 1..32: mol_type = unassigned DNA
tcactcttaagctgcatcaggtactgatgggc

SEQ ID NO: 4074 - DNA, 32 bp, Homo sapiens
  source 1..32: mol_type = unassigned DNA
gcccatcagtacctgatgcagcttaagagtga

SEQ ID NO: 4075 - RNA, 30 nt, Homo sapiens
  source 1..30: mol_type = unassigned RNA
cctagagtgatcaggtgcctgtgggaaata

SEQ ID NO: 4076 - DNA, 30 bp, Homo sapiens
  source 1..30: mol_type = unassigned DNA
cctagagtgatcaggtgcctgtgggaaata

SEQ ID NO: 4077 - DNA, 30 bp, Homo sapiens
  source 1..30: mol_type = unassigned DNA
tatttcccacaggcacctgatcactctagg

SEQ ID NO: 4078 - RNA, 27 nt, Homo sapiens
  source 1..27: mol_type = unassigned RNA
tcaaaattttgcttgggctgtaagtag

SEQ ID NO: 4079 - DNA, 27 bp, Homo sapiens
  source 1..27: mol_type = unassigned DNA
tcaaaattttgcttgggctgtaagtag

SEQ ID NO: 4080 - DNA, 27 bp, Homo sapiens
  source 1..27: mol_type = unassigned DNA
ctacttacagcccaagcaaaattttga

SEQ ID NO: 4081 - RNA, 76 nt, Homo sapiens
  source 1..76: mol_type = unassigned RNA
ctcagcaatggcagatgtcccttcccccaccaagctccagtgtcccagatcgagctcagactgctactgtgctggc

SEQ ID NO: 4082 - DNA, 76 bp, Homo sapiens
  source 1..76: mol_type = unassigned DNA
ctcagcaatggcagatgtcccttcccccaccaagctccagtgtcccagatcgagctcagactgctactgtgctggc

SEQ ID NO: 4083 - DNA, 76 bp, Homo sapiens
  source 1..76: mol_type = unassigned DNA
gccagcacagtagcagtctgagctcgatctgggacactggagcttggtgggggaagggacatctgccattgctgag

SEQ ID NO: 4084 - RNA, 24 nt, Homo sapiens
  source 1..24: mol_type = unassigned RNA
gcccacttagcgcagtcagtctta

SEQ ID NO: 4085 - DNA, 24 bp, Homo sapiens
  source 1..24: mol_type = unassigned DNA
gcccacttagcgcagtcagtctta

SEQ ID NO: 4086 - DNA, 24 bp, Homo sapiens
  source 1..24: mol_type = unassigned DNA
taagactgactgcgctaagtgggc

SEQ ID NO: 4087 - RNA, 84 nt, Homo sapiens
  source 1..84: mol_type = unassigned RNA
tgctccaccaccccccttctatgggctgacaactggaccatctcaggcaaggtcttttgcatcagctcaattcaatgaatcatc

SEQ ID NO: 4088 - DNA, 84 bp, Homo sapiens
  source 1..84: mol_type = unassigned DNA
tgctccaccaccccccttctatgggctgacaactggaccatctcaggcaaggtcttttgcatcagctcaattcaatgaatcatc

SEQ ID NO: 4089 - DNA, 84 bp, Homo sapiens
  source 1..84: mol_type = unassigned DNA
gatgattcattgaattgagctgatgcaaaagaccttgcctgagatggtccagttgtcagcccatagaaggggggtggtggagca

SEQ ID NO: 4090 - RNA, 95 nt, Homo sapiens
  source 1..95: mol_type = unassigned RNA
cagcaccaagaacagatttgtgctggacaagggcctatccctccctggaccggctcccattacacagtcatcattttcacttgttcctgcctgtc

SEQ ID NO: 4091 - DNA, 95 bp, Homo sapiens
  source 1..95: mol_type = unassigned DNA
cagcaccaagaacagatttgtgctggacaagggcctatccctccctggaccggctcccattacacagtcatcattttcacttgttcctgcctgtc

SEQ ID NO: 4092 - DNA, 95 bp, Homo sapiens
  source 1..95: mol_type = unassigned DNA
gacaggcaggaacaagtgaaaatgatgactgtgtaatgggagccggtccagggagggataggcccttgtccagcacaaatctgttcttggtgctg

SEQ ID NO: 4093 - RNA, 90 nt, Homo sapiens
  source 1..90: mol_type = unassigned RNA
ctcttctgcccatctgccccaacattgccagtggattcccaaagtgcttaaacctcaagcatctctcatggccaccttgaagcttgactt

SEQ ID NO: 4094 - DNA, 90 bp, Homo sapiens
  source 1..90: mol_type = unassigned DNA
ctcttctgcccatctgccccaacattgccagtggattcccaaagtgcttaaacctcaagcatctctcatggccaccttgaagcttgactt

SEQ ID NO: 4095 - DNA, 90 bp, Homo sapiens
  source 1..90: mol_type = unassigned DNA
aagtcaagcttcaaggtggccatgagagatgcttgaggtttaagcactttgggaatccactggcaatgttggggcagatgggcagaagag

SEQ ID NO: 4096 - RNA, 24 nt, Homo sapiens
  source 1..24: mol_type = unassigned RNA
atgcattagtagattgtttacttg

SEQ ID NO: 4097 - DNA, 24 bp, Homo sapiens
  source 1..24: mol_type = unassigned DNA
atgcattagtagattgtttacttg

SEQ ID NO: 4098 - DNA, 24 bp, Homo sapiens
  source 1..24: mol_type = unassigned DNA
caagtaaacaatctactaatgcat

SEQ ID NO: 4099 - RNA, 30 nt, Homo sapiens
  source 1..30: mol_type = unassigned RNA
cgcgtccccctctctccctccgggcagccg

SEQ ID NO: 4100 - DNA, 30 bp, Homo sapiens
  source 1..30: mol_type = unassigned DNA
cgcgtccccctctctccctccgggcagccg

SEQ ID NO: 4101 - DNA, 30 bp, Homo sapiens
  source 1..30: mol_type = unassigned DNA
cggctgcccggagggagagagggggacgcg

SEQ ID NO: 4102 - RNA, 31 nt, Homo sapiens
  source 1..31: mol_type = unassigned RNA
gctgaaaatttcaatggtagatctcacttta

SEQ ID NO: 4103 - DNA, 31 bp, Homo sapiens
  source 1..31: mol_type = unassigned DNA
gctgaaaatttcaatggtagatctcacttta

SEQ ID NO: 4104 - DNA, 31 bp, Homo sapiens
  source 1..31: mol_type = unassigned DNA
taaagtgagatctaccattgaaattttcagc

SEQ ID NO: 4105 - RNA, 34 nt, Homo sapiens
  source 1..34: mol_type = unassigned RNA
gcagagctgcgcccaggtcgtgctgcaggcggcc

SEQ ID NO: 4106 - DNA, 34 bp, Homo sapiens
  source 1..34: mol_type = unassigned DNA
gcagagctgcgcccaggtcgtgctgcaggcggcc

SEQ ID NO: 4107 - DNA, 34 bp, Homo sapiens
  source 1..34: mol_type = unassigned DNA
ggccgcctgcagcacgacctgggcgcagctctgc

SEQ ID NO: 4108 - RNA, 23 nt, Homo sapiens
  source 1..23: mol_type = unassigned RNA
tagcataacagatggatgtggag

SEQ ID NO: 4109 - DNA, 23 bp, Homo sapiens
  source 1..23: mol_type = unassigned DNA
tagcataacagatggatgtggag

SEQ ID NO: 4110 - DNA, 23 bp, Homo sapiens
  source 1..23: mol_type = unassigned DNA
ctccacatccatctgttatgcta

SEQ ID NO: 4111 - RNA, 29 nt, Homo sapiens
  source 1..29: mol_type = unassigned RNA
ccgtattctaagtattaacttttccatct

SEQ ID NO: 4112 - DNA, 29 bp, Homo sapiens
  source 1..29: mol_type = unassigned DNA
ccgtattctaagtattaacttttccatct

SEQ ID NO: 4113 - DNA, 29 bp, Homo sapiens
  source 1..29: mol_type = unassigned DNA
agatggaaaagttaatacttagaatacgg

SEQ ID NO: 4114 - RNA, 52 nt, Homo sapiens
  source 1..52: mol_type = unassigned RNA
gtaaggtcacctattaactctgtgtttatggagctgtatttatcacctggaa

SEQ ID NO: 4115 - DNA, 52 bp, Homo sapiens
  source 1..52: mol_type = unassigned DNA
gtaaggtcacctattaactctgtgtttatggagctgtatttatcacctggaa

SEQ ID NO: 4116 - DNA, 52 bp, Homo sapiens
  source 1..52: mol_type = unassigned DNA
ttccaggtgataaatacagctccataaacacagagttaataggtgaccttac

SEQ ID NO: 4117 - RNA, 27 nt, Homo sapiens
  source 1..27: mol_type = unassigned RNA
tggtggcagtgggtcctgagaagaatt

SEQ ID NO: 4118 - DNA, 27 bp, Homo sapiens
  source 1..27: mol_type = unassigned DNA
tggtggcagtgggtcctgagaagaatt

SEQ ID NO: 4119 - DNA, 27 bp, Homo sapiens
  source 1..27: mol_type = unassigned DNA
aattcttctcaggacccactgccacca

SEQ ID NO: 4120 - RNA, 52 nt, Homo sapiens
  source 1..52: mol_type = unassigned RNA
tcagaaaaggtagaactgatacatggtaagaaagctggactagctgctgata

SEQ ID NO: 4121 - DNA, 52 bp, Homo sapiens
  source 1..52: mol_type = unassigned DNA
tcagaaaaggtagaactgatacatggtaagaaagctggactagctgctgata

SEQ ID NO: 4122 - DNA, 52 bp, Homo sapiens
  source 1..52: mol_type = unassigned DNA
tatcagcagctagtccagctttcttaccatgtatcagttctaccttttctga

SEQ ID NO: 4123 - RNA, 176 nt, Homo sapiens
  source 1..176: mol_type = unassigned RNA
atgaggtaaagggggttagataaacgctaaggccctttttggttgtgggggtatctaacaatttggtctgtagctgcctgcttagtctgagtgaacttgtatatctaatttttcagtggttgaaggcctttcactgttggacttgggagtatctccgtattctggagcagtatttc

SEQ ID NO: 4124 - DNA, 176 bp, Homo sapiens
  source 1..176: mol_type = unassigned DNA
atgaggtaaagggggttagataaacgctaaggccctttttggttgtgggggtatctaacaatttggtctgtagctgcctgcttagtctgagtgaacttgtatatctaatttttcagtggttgaaggcctttcactgttggacttgggagtatctccgtattctggagcagtatttc

SEQ ID NO: 4125 - DNA, 176 bp, Homo sapiens
  source 1..176: mol_type = unassigned DNA
gaaatactgctccagaatacggagatactcccaagtccaacagtgaaaggccttcaaccactgaaaaattagatatacaagttcactcagactaagcaggcagctacagaccaaattgttagatacccccacaaccaaaaagggccttagcgtttatctaaccccctttacctcat

SEQ ID NO: 4126 - RNA, 29 nt, Homo sapiens
  source 1..29: mol_type = unassigned RNA
gcctgctgtgctgagccgtgcttcaggcc

SEQ ID NO: 4127 - DNA, 29 bp, Homo sapiens
  source 1..29: mol_type = unassigned DNA
gcctgctgtgctgagccgtgcttcaggcc

SEQ ID NO: 4128 - DNA, 29 bp, Homo sapiens
  source 1..29: mol_type = unassigned DNA
ggcctgaagcacggctcagcacagcaggc

SEQ ID NO: 4129 - RNA, 41 nt, Homo sapiens
  source 1..41: mol_type = unassigned RNA
ttctgagaatttttggtctaaccggttgtctagcttcacgt

SEQ ID NO: 4130 - DNA, 41 bp, Homo sapiens
  source 1..41: mol_type = unassigned DNA
ttctgagaatttttggtctaaccggttgtctagcttcacgt

SEQ ID NO: 4131 - DNA, 41 bp, Homo sapiens
  source 1..41: mol_type = unassigned DNA
acgtgaagctagacaaccggttagaccaaaaattctcagaa

SEQ ID NO: 4132 - RNA, 25 nt, Homo sapiens
  source 1..25: mol_type = unassigned RNA
catttcaatggtcagaactcacata

SEQ ID NO: 4133 - DNA, 25 bp, Homo sapiens
  source 1..25: mol_type = unassigned DNA
catttcaatggtcagaactcacata

SEQ ID NO: 4134 - DNA, 25 bp, Homo sapiens
  source 1..25: mol_type = unassigned DNA
tatgtgagttctgaccattgaaatg

SEQ ID NO: 4135 - RNA, 84 nt, Homo sapiens
  source 1..84: mol_type = unassigned RNA
catcttcagtgattccccctttgatgaatcttctgatgggggaaaaagtgttgttgttttgcttgctcggtgttatttggtgga

SEQ ID NO: 4136 - DNA, 84 bp, Homo sapiens
  source 1..84: mol_type = unassigned DNA
catcttcagtgattccccctttgatgaatcttctgatgggggaaaaagtgttgttgttttgcttgctcggtgttatttggtgga

SEQ ID NO: 4137 - DNA, 84 bp, Homo sapiens
  source 1..84: mol_type = unassigned DNA
tccaccaaataacaccgagcaagcaaaacaacaacactttttcccccatcagaagattcatcaaagggggaatcactgaagatg

SEQ ID NO: 4138 - RNA, 121 nt, Homo sapiens
  source 1..121: mol_type = unassigned RNA
ccccaccgcctcatacctgatgctcccacaactctaagcgacacagattctggatgctctgtactgagtcatgccactgtgccctcttatgctttccctcctgtcagaaatgctgtgcctg

SEQ ID NO: 4139 - DNA, 121 bp, Homo sapiens
  source 1..121: mol_type = unassigned DNA
ccccaccgcctcatacctgatgctcccacaactctaagcgacacagattctggatgctctgtactgagtcatgccactgtgccctcttatgctttccctcctgtcagaaatgctgtgcctg

SEQ ID NO: 4140 - DNA, 121 bp, Homo sapiens
  source 1..121: mol_type = unassigned DNA
caggcacagcatttctgacaggagggaaagcataagagggcacagtggcatgactcagtacagagcatccagaatctgtgtcgcttagagttgtgggagcatcaggtatgaggcggtgggg

SEQ ID NO: 4141 - RNA, 32 nt, Homo sapiens
  source 1..32: mol_type = unassigned RNA
gagcttccagtcgctcgagagcggagagcggc

SEQ ID NO: 4142 - DNA, 32 bp, Homo sapiens
  source 1..32: mol_type = unassigned DNA
gagcttccagtcgctcgagagcggagagcggc

SEQ ID NO: 4143 - DNA, 32 bp, Homo sapiens
  source 1..32: mol_type = unassigned DNA
gccgctctccgctctcgagcgactggaagctc

SEQ ID NO: 4144 - RNA, 58 nt, Homo sapiens
  source 1..58: mol_type = unassigned RNA
tccaacttgcctggaccagcttaatggttctggtaagtattaatgaaaacagtagata

SEQ ID NO: 4145 - DNA, 58 bp, Homo sapiens
  source 1..58: mol_type = unassigned DNA
tccaacttgcctggaccagcttaatggttctggtaagtattaatgaaaacagtagata

SEQ ID NO: 4146 - DNA, 58 bp, Homo sapiens
  source 1..58: mol_type = unassigned DNA
tatctactgttttcattaatacttaccagaaccattaagctggtccaggcaagttgga

SEQ ID NO: 4147 - RNA, 67 nt, Homo sapiens
  source 1..67: mol_type = unassigned RNA
taggtctctttaggattaaggcatactcctgagaatttttggtctaaccggttgtctagcttcacgt

SEQ ID NO: 4148 - DNA, 67 bp, Homo sapiens
  source 1..67: mol_type = unassigned DNA
taggtctctttaggattaaggcatactcctgagaatttttggtctaaccggttgtctagcttcacgt

SEQ ID NO: 4149 - DNA, 67 bp, Homo sapiens
  source 1..67: mol_type = unassigned DNA
acgtgaagctagacaaccggttagaccaaaaattctcaggagtatgccttaatcctaaagagaccta

SEQ ID NO: 4150 - RNA, 48 nt, Homo sapiens
  source 1..48: mol_type = unassigned RNA
ttctcaaactgtctgtagaccaaatagattgccagggactgccattgg

SEQ ID NO: 4151 - DNA, 48 bp, Homo sapiens
  source 1..48: mol_type = unassigned DNA
ttctcaaactgtctgtagaccaaatagattgccagggactgccattgg

SEQ ID NO: 4152 - DNA, 48 bp, Homo sapiens
  source 1..48: mol_type = unassigned DNA
ccaatggcagtccctggcaatctatttggtctacagacagtttgagaa

SEQ ID NO: 4153 - RNA, 73 nt, Homo sapiens
  source 1..73: mol_type = unassigned RNA
aaggtgctgctgaggacatggatgaggatatctgggcaagggccccacatgcccagcagccccatccttgtga

SEQ ID NO: 4154 - DNA, 73 bp, Homo sapiens
  source 1..73: mol_type = unassigned DNA
aaggtgctgctgaggacatggatgaggatatctgggcaagggccccacatgcccagcagccccatccttgtga

SEQ ID NO: 4155 - DNA, 73 bp, Homo sapiens
  source 1..73: mol_type = unassigned DNA
tcacaaggatggggctgctgggcatgtggggcccttgcccagatatcctcatccatgtcctcagcagcacctt

SEQ ID NO: 4156 - RNA, 181 nt, Homo sapiens
  source 1..181: mol_type = unassigned RNA
catttagaaaacatactgtttttttaaatgccaatttagcttccaagttacaagaacttcaagggtactattgaagaactggctccaaatcaatatgtgattagtggtgaagtagctattcttaattctacaaccattgaaatctcagagcttcccgtcagaacatggacccaggtaaata

SEQ ID NO: 4157 - DNA, 181 bp, Homo sapiens
  source 1..181: mol_type = unassigned DNA
catttagaaaacatactgtttttttaaatgccaatttagcttccaagttacaagaacttcaagggtactattgaagaactggctccaaatcaatatgtgattagtggtgaagtagctattcttaattctacaaccattgaaatctcagagcttcccgtcagaacatggacccaggtaaata

SEQ ID NO: 4158 - DNA, 181 bp, Homo sapiens
  source 1..181: mol_type = unassigned DNA
tatttacctgggtccatgttctgacgggaagctctgagatttcaatggttgtagaattaagaatagctacttcaccactaatcacatattgatttggagccagttcttcaatagtacccttgaagttcttgtaacttggaagctaaattggcatttaaaaaaacagtatgttttctaaatg

SEQ ID NO: 4159 - RNA, 38 nt, Homo sapiens
  source 1..38: mol_type = unassigned RNA
aatggcagtggttgaattcaagcccacatcagctgggg

SEQ ID NO: 4160 - DNA, 38 bp, Homo sapiens
  source 1..38: mol_type = unassigned DNA
aatggcagtggttgaattcaagcccacatcagctgggg

SEQ ID NO: 4161 - DNA, 38 bp, Homo sapiens
  source 1..38: mol_type = unassigned DNA
ccccagctgatgtgggcttgaattcaaccactgccatt

SEQ ID NO: 4162 - RNA, 22 nt, Homo sapiens
  source 1..22: mol_type = unassigned RNA
tactcttgtagttgtatagttt

SEQ ID NO: 4163 - DNA, 22 bp, Homo sapiens
  source 1..22: mol_type = unassigned DNA
tactcttgtagttgtatagttt

SEQ ID NO: 4164 - DNA, 22 bp, Homo sapiens
  source 1..22: mol_type = unassigned DNA
aaactatacaactacaagagta

SEQ ID NO: 4165 - RNA, 39 nt, Homo sapiens
  source 1..39: mol_type = unassigned RNA
tgtttttcatggcttacctggactttttctttgatgtca

SEQ ID NO: 4166 - DNA, 39 bp, Homo sapiens
  source 1..39: mol_type = unassigned DNA
tgtttttcatggcttacctggactttttctttgatgtca

SEQ ID NO: 4167 - DNA, 39 bp, Homo sapiens
  source 1..39: mol_type = unassigned DNA
tgacatcaaagaaaaagtccaggtaagccatgaaaaaca

SEQ ID NO: 4168 - RNA, 26 nt, Homo sapiens
  source 1..26: mol_type = unassigned RNA
atctacctggtcctttatgctttaag

SEQ ID NO: 4169 - DNA, 26 bp, Homo sapiens
  source 1..26: mol_type = unassigned DNA
atctacctggtcctttatgctttaag

SEQ ID NO: 4170 - DNA, 26 bp, Homo sapiens
  source 1..26: mol_type = unassigned DNA
cttaaagcataaaggaccaggtagat

SEQ ID NO: 4171 - RNA, 24 nt, Homo sapiens
  source 1..24: mol_type = unassigned RNA
atagcttatagactgctttttatt

SEQ ID NO: 4172 - DNA, 24 bp, Homo sapiens
  source 1..24: mol_type = unassigned DNA
atagcttatagactgctttttatt

SEQ ID NO: 4173 - DNA, 24 bp, Homo sapiens
  source 1..24: mol_type = unassigned DNA
aataaaaagcagtctataagctat

SEQ ID NO: 4174 - RNA, 25 nt, Homo sapiens
  source 1..25: mol_type = unassigned RNA
agttagtttttgggacctagactgg

SEQ ID NO: 4175 - DNA, 25 bp, Homo sapiens
  source 1..25: mol_type = unassigned DNA
agttagtttttgggacctagactgg

SEQ ID NO: 4176 - DNA, 25 bp, Homo sapiens
  source 1..25: mol_type = unassigned DNA
ccagtctaggtcccaaaaactaact

SEQ ID NO: 4177 - RNA, 49 nt, Homo sapiens
  source 1..49: mol_type = unassigned RNA
cctgctccaactgtcttatggggagggtgtgagagaggtgcccaaaggc

SEQ ID NO: 4178 - DNA, 49 bp, Homo sapiens
  source 1..49: mol_type = unassigned DNA
cctgctccaactgtcttatggggagggtgtgagagaggtgcccaaaggc

SEQ ID NO: 4179 - DNA, 49 bp, Homo sapiens
  source 1..49: mol_type = unassigned DNA
gcctttgggcacctctctcacaccctccccataagacagttggagcagg

SEQ ID NO: 4180 - RNA, 41 nt, Homo sapiens
  source 1..41: mol_type = unassigned RNA
agagaggaaactgaagaagtctcagagacatctaccccaaa

SEQ ID NO: 4181 - DNA, 41 bp, Homo sapiens
  source 1..41: mol_type = unassigned DNA
agagaggaaactgaagaagtctcagagacatctaccccaaa

SEQ ID NO: 4182 - DNA, 41 bp, Homo sapiens
  source 1..41: mol_type = unassigned DNA
tttggggtagatgtctctgagacttcttcagtttcctctct

SEQ ID NO: 4183 - RNA, 25 nt, Homo sapiens
  source 1..25: mol_type = unassigned RNA
ttgagctgattcggacactagaaga

SEQ ID NO: 4184 - DNA, 25 bp, Homo sapiens
  source 1..25: mol_type = unassigned DNA
ttgagctgattcggacactagaaga

SEQ ID NO: 4185 - DNA, 25 bp, Homo sapiens
  source 1..25: mol_type = unassigned DNA
tcttctagtgtccgaatcagctcaa

SEQ ID NO: 4186 - RNA, 198 nt, Homo sapiens
  source 1..198: mol_type = unassigned RNA
atcaaatatgtaccgatgcatggcctgggtgccgagacacccacgaccagacagacacagccctgccttcctggggcctgtgatggggtcagccacgtaggtcagtcaggcctggtgggcagcagctaggactttgcatcttcctctccgcaagcccctggggggttctgagccggcaagagatgggatttgacttgc

SEQ ID NO: 4187 - DNA, 198 bp, Homo sapiens
  source 1..198: mol_type = unassigned DNA
atcaaatatgtaccgatgcatggcctgggtgccgagacacccacgaccagacagacacagccctgccttcctggggcctgtgatggggtcagccacgtaggtcagtcaggcctggtgggcagcagctaggactttgcatcttcctctccgcaagcccctggggggttctgagccggcaagagatgggatttgacttgc

SEQ ID NO: 4188 - DNA, 198 bp, Homo sapiens
  source 1..198: mol_type = unassigned DNA
gcaagtcaaatcccatctcttgccggctcagaaccccccaggggcttgcggagaggaagatgcaaagtcctagctgctgcccaccaggcctgactgacctacgtggctgaccccatcacaggccccaggaaggcagggctgtgtctgtctggtcgtgggtgtctcggcacccaggccatgcatcggtacatatttgat

SEQ ID NO: 4189 - RNA, 93 nt, Homo sapiens
  source 1..93: mol_type = unassigned RNA
ttattcagcttataatatgactcgatggaggaaaatttgataagcatgagagaagaccattcttttcatgttcgttacaggtaagactattgc

SEQ ID NO: 4190 - DNA, 93 bp, Homo sapiens
  source 1..93: mol_type = unassigned DNA
ttattcagcttataatatgactcgatggaggaaaatttgataagcatgagagaagaccattcttttcatgttcgttacaggtaagactattgc

SEQ ID NO: 4191 - DNA, 93 bp, Homo sapiens
  source 1..93: mol_type = unassigned DNA
gcaatagtcttacctgtaacgaacatgaaaagaatggtcttctctcatgcttatcaaattttcctccatcgagtcatattataagctgaataa

SEQ ID NO: 4192 - RNA, 129 nt, Homo sapiens
  source 1..129: mol_type = unassigned RNA
tatttttttctcaggagtttgcctaagggtgtgacagatgatctctgtcacttgtcttagttgtgtcctgcaataaactggatgctttataaaatactagacctgtgatttcgtatgctgtaatatttc

SEQ ID NO: 4193 - DNA, 129 bp, Homo sapiens
  source 1..129: mol_type = unassigned DNA
tatttttttctcaggagtttgcctaagggtgtgacagatgatctctgtcacttgtcttagttgtgtcctgcaataaactggatgctttataaaatactagacctgtgatttcgtatgctgtaatatttc

SEQ ID NO: 4194 - DNA, 129 bp, Homo sapiens
  source 1..129: mol_type = unassigned DNA
gaaatattacagcatacgaaatcacaggtctagtattttataaagcatccagtttattgcaggacacaactaagacaagtgacagagatcatctgtcacacccttaggcaaactcctgagaaaaaaata

SEQ ID NO: 4195 - RNA, 52 nt, Homo sapiens
  source 1..52: mol_type = unassigned RNA
ttctgagtgatgagtcctgttggttgattggaggatctgacaggaaaccctt

SEQ ID NO: 4196 - DNA, 52 bp, Homo sapiens
  source 1..52: mol_type = unassigned DNA
ttctgagtgatgagtcctgttggttgattggaggatctgacaggaaaccctt

SEQ ID NO: 4197 - DNA, 52 bp, Homo sapiens
  source 1..52: mol_type = unassigned DNA
aagggtttcctgtcagatcctccaatcaaccaacaggactcatcactcagaa

SEQ ID NO: 4198 - RNA, 29 nt, Homo sapiens
  source 1..29: mol_type = unassigned RNA
tgaaacatccaagttcggccgggcgcagt

SEQ ID NO: 4199 - DNA, 29 bp, Homo sapiens
  source 1..29: mol_type = unassigned DNA
tgaaacatccaagttcggccgggcgcagt

SEQ ID NO: 4200 - DNA, 29 bp, Homo sapiens
  source 1..29: mol_type = unassigned DNA
actgcgcccggccgaacttggatgtttca

SEQ ID NO: 4201 - RNA, 25 nt, Homo sapiens
  source 1..25: mol_type = unassigned RNA
cctcaaaagggaagcgctttctctt

SEQ ID NO: 4202 - DNA, 25 bp, Homo sapiens
  source 1..25: mol_type = unassigned DNA
cctcaaaagggaagcgctttctctt

SEQ ID NO: 4203 - DNA, 25 bp, Homo sapiens
  source 1..25: mol_type = unassigned DNA
aagagaaagcgcttcccttttgagg

SEQ ID NO: 4204 - RNA, 27 nt, Homo sapiens
  source 1..27: mol_type = unassigned RNA
catctctaagggtagaactcacatctt

SEQ ID NO: 4205 - DNA, 27 bp, Homo sapiens
  source 1..27: mol_type = unassigned DNA
catctctaagggtagaactcacatctt

SEQ ID NO: 4206 - DNA, 27 bp, Homo sapiens
  source 1..27: mol_type = unassigned DNA
aagatgtgagttctacccttagagatg

SEQ ID NO: 4207 - RNA, 57 nt, Homo sapiens
  source 1..57: mol_type = unassigned RNA
tagtatagtgactgtagttttttctgtgatatctagctgtaggagaatggtcagtgt

SEQ ID NO: 4208 - DNA, 57 bp, Homo sapiens
  source 1..57: mol_type = unassigned DNA
tagtatagtgactgtagttttttctgtgatatctagctgtaggagaatggtcagtgt

SEQ ID NO: 4209 - DNA, 57 bp, Homo sapiens
  source 1..57: mol_type = unassigned DNA
acactgaccattctcctacagctagatatcacagaaaaaactacagtcactatacta

SEQ ID NO: 4210 - RNA, 26 nt, Homo sapiens
  source 1..26: mol_type = unassigned RNA
tgcttgtttatttagatgtatgaaaa

SEQ ID NO: 4211 - DNA, 26 bp, Homo sapiens
  source 1..26: mol_type = unassigned DNA
tgcttgtttatttagatgtatgaaaa

SEQ ID NO: 4212 - DNA, 26 bp, Homo sapiens
  source 1..26: mol_type = unassigned DNA
ttttcatacatctaaataaacaagca

SEQ ID NO: 4213 - RNA, 31 nt, Homo sapiens
  source 1..31: mol_type = unassigned RNA
agtatccaggtgatgcgggcgcagatgaacc

SEQ ID NO: 4214 - DNA, 31 bp, Homo sapiens
  source 1..31: mol_type = unassigned DNA
agtatccaggtgatgcgggcgcagatgaacc

SEQ ID NO: 4215 - DNA, 31 bp, Homo sapiens
  source 1..31: mol_type = unassigned DNA
ggttcatctgcgcccgcatcacctggatact

SEQ ID NO: 4216 - RNA, 36 nt, Homo sapiens
  source 1..36: mol_type = unassigned RNA
tcgttgcacagatggaaggcctcgggactcggctcc

SEQ ID NO: 4217 - DNA, 36 bp, Homo sapiens
  source 1..36: mol_type = unassigned DNA
tcgttgcacagatggaaggcctcgggactcggctcc

SEQ ID NO: 4218 - DNA, 36 bp, Homo sapiens
  source 1..36: mol_type = unassigned DNA
ggagccgagtcccgaggccttccatctgtgcaacga

SEQ ID NO: 4219 - RNA, 181 nt, Homo sapiens
  source 1..181: mol_type = unassigned RNA
gactccttctgcttccaggacagagacagtgaggtttgatgctgtcttgagcagctccgccttcacagtcacctgtgaagggcagtgttccagaagctccaccccaatagtcacatttcctccgggcctgatgatccctggggctgtcaccagaaaccgaggcctaaagagttcccaacaa

SEQ ID NO: 4220 - DNA, 181 bp, Homo sapiens
  source 1..181: mol_type = unassigned DNA
gactccttctgcttccaggacagagacagtgaggtttgatgctgtcttgagcagctccgccttcacagtcacctgtgaagggcagtgttccagaagctccaccccaatagtcacatttcctccgggcctgatgatccctggggctgtcaccagaaaccgaggcctaaagagttcccaacaa

SEQ ID NO: 4221 - DNA, 181 bp, Homo sapiens
  source 1..181: mol_type = unassigned DNA
ttgttgggaactctttaggcctcggtttctggtgacagccccagggatcatcaggcccggaggaaatgtgactattggggtggagcttctggaacactgcccttcacaggtgactgtgaaggcggagctgctcaagacagcatcaaacctcactgtctctgtcctggaagcagaaggagtc

SEQ ID NO: 4222 - RNA, 175 nt, Homo sapiens
  source 1..175: mol_type = unassigned RNA
acaacttcctgggcctggacttcctgccagaggccgacttagtcttccctccccacgggccagttcctacacctggacctcactctgtccagagcttcaggtaggcctcaggaggtggaactaagatccagctcatggtccgagcctgctcagcctctaacagaatggaactttc

SEQ ID NO: 4223 - DNA, 175 bp, Homo sapiens
  source 1..175: mol_type = unassigned DNA
acaacttcctgggcctggacttcctgccagaggccgacttagtcttccctccccacgggccagttcctacacctggacctcactctgtccagagcttcaggtaggcctcaggaggtggaactaagatccagctcatggtccgagcctgctcagcctctaacagaatggaactttc

SEQ ID NO: 4224 - DNA, 175 bp, Homo sapiens
  source 1..175: mol_type = unassigned DNA
gaaagttccattctgttagaggctgagcaggctcggaccatgagctggatcttagttccacctcctgaggcctacctgaagctctggacagagtgaggtccaggtgtaggaactggcccgtggggagggaagactaagtcggcctctggcaggaagtccaggcccaggaagttgt

SEQ ID NO: 4225 - RNA, 98 nt, Homo sapiens
  source 1..98: mol_type = unassigned RNA
gattactttgctgctgtagctggacatgatgggcaaatagatgctgatgaattgcagagatgtctgacacagtctggcattgctggaggattcaaacc

SEQ ID NO: 4226 - DNA, 98 bp, Homo sapiens
  source 1..98: mol_type = unassigned DNA
gattactttgctgctgtagctggacatgatgggcaaatagatgctgatgaattgcagagatgtctgacacagtctggcattgctggaggattcaaacc

SEQ ID NO: 4227 - DNA, 98 bp, Homo sapiens
  source 1..98: mol_type = unassigned DNA
ggtttgaatcctccagcaatgccagactgtgtcagacatctctgcaattcatcagcatctatttgcccatcatgtccagctacagcagcaaagtaatc

SEQ ID NO: 4228 - RNA, 24 nt, Homo sapiens
  source 1..24: mol_type = unassigned RNA
ctgaagtatttcagaccactagga

SEQ ID NO: 4229 - DNA, 24 bp, Homo sapiens
  source 1..24: mol_type = unassigned DNA
ctgaagtatttcagaccactagga

SEQ ID NO: 4230 - DNA, 24 bp, Homo sapiens
  source 1..24: mol_type = unassigned DNA
tcctagtggtctgaaatacttcag

SEQ ID NO: 4231 - RNA, 32 nt, Homo sapiens
  source 1..32: mol_type = unassigned RNA
gccagtgtccagaccggacctatggagacgtg

SEQ ID NO: 4232 - DNA, 32 bp, Homo sapiens
  source 1..32: mol_type = unassigned DNA
gccagtgtccagaccggacctatggagacgtg

SEQ ID NO: 4233 - DNA, 32 bp, Homo sapiens
  source 1..32: mol_type = unassigned DNA
cacgtctccataggtccggtctggacactggc

SEQ ID NO: 4234 - RNA, 37 nt, Homo sapiens
  source 1..37: mol_type = unassigned RNA
tgtgaatagtgttgagattgagaagctcagagaaata

SEQ ID NO: 4235 - DNA, 37 bp, Homo sapiens
  source 1..37: mol_type = unassigned DNA
tgtgaatagtgttgagattgagaagctcagagaaata

SEQ ID NO: 4236 - DNA, 37 bp, Homo sapiens
  source 1..37: mol_type = unassigned DNA
tatttctctgagcttctcaatctcaacactattcaca

SEQ ID NO: 4237 - RNA, 28 nt, Homo sapiens
  source 1..28: mol_type = unassigned RNA
ctagaaggtttgactctggccagacaac

SEQ ID NO: 4238 - DNA, 28 bp, Homo sapiens
  source 1..28: mol_type = unassigned DNA
ctagaaggtttgactctggccagacaac

SEQ ID NO: 4239 - DNA, 28 bp, Homo sapiens
  source 1..28: mol_type = unassigned DNA
gttgtctggccagagtcaaaccttctag

SEQ ID NO: 4240 - RNA, 28 nt, Homo sapiens
  source 1..28: mol_type = unassigned RNA
agctataggtctcggctagaagacacct

SEQ ID NO: 4241 - DNA, 28 bp, Homo sapiens
  source 1..28: mol_type = unassigned DNA
agctataggtctcggctagaagacacct

SEQ ID NO: 4242 - DNA, 28 bp, Homo sapiens
  source 1..28: mol_type = unassigned DNA
aggtgtcttctagccgagacctatagct

SEQ ID NO: 4243 - RNA, 43 nt, Homo sapiens
  source 1..43: mol_type = unassigned RNA
tctctcatgcgccctgcacttccataggctgggcagttcgtgc

SEQ ID NO: 4244 - DNA, 43 bp, Homo sapiens
  source 1..43: mol_type = unassigned DNA
tctctcatgcgccctgcacttccataggctgggcagttcgtgc

SEQ ID NO: 4245 - DNA, 43 bp, Homo sapiens
  source 1..43: mol_type = unassigned DNA
gcacgaactgcccagcctatggaagtgcagggcgcatgagaga

SEQ ID NO: 4246 - RNA, 32 nt, Homo sapiens
  source 1..32: mol_type = unassigned RNA
cctgtggagtcctgctcagaaggacctatact

SEQ ID NO: 4247 - DNA, 32 bp, Homo sapiens
  source 1..32: mol_type = unassigned DNA
cctgtggagtcctgctcagaaggacctatact

SEQ ID NO: 4248 - DNA, 32 bp, Homo sapiens
  source 1..32: mol_type = unassigned DNA
agtataggtccttctgagcaggactccacagg

SEQ ID NO: 4249 - RNA, 24 nt, Homo sapiens
  source 1..24: mol_type = unassigned RNA
ttatataggattttgtatagtttt

SEQ ID NO: 4250 - DNA, 24 bp, Homo sapiens
  source 1..24: mol_type = unassigned DNA
ttatataggattttgtatagtttt

SEQ ID NO: 4251 - DNA, 24 bp, Homo sapiens
  source 1..24: mol_type = unassigned DNA
aaaactatacaaaatcctatataa

SEQ ID NO: 4252 - RNA, 22 nt, Homo sapiens
  source 1..22: mol_type = unassigned RNA
gtctactcagctccttgaggat

SEQ ID NO: 4253 - DNA, 22 bp, Homo sapiens
  source 1..22: mol_type = unassigned DNA
gtctactcagctccttgaggat

SEQ ID NO: 4254 - DNA, 22 bp, Homo sapiens
  source 1..22: mol_type = unassigned DNA
atcctcaaggagctgagtagac

SEQ ID NO: 4255 - RNA, 150 nt, Homo sapiens
  source 1..150: mol_type = unassigned RNA
atgcaggaagatgacctgcccagaagccgtcgctccagatcatccgtgacccttccgcatataattcgcccagtggaagaaattacagaggaggagttggagaacgtctgcagcaattctcgagagaagatatataaccgttcactggtg

SEQ ID NO: 4256 - DNA, 150 bp, Homo sapiens
  source 1..150: mol_type = unassigned DNA
atgcaggaagatgacctgcccagaagccgtcgctccagatcatccgtgacccttccgcatataattcgcccagtggaagaaattacagaggaggagttggagaacgtctgcagcaattctcgagagaagatatataaccgttcactggtg

SEQ ID NO: 4257 - DNA, 150 bp, Homo sapiens
  source 1..150: mol_type = unassigned DNA
caccagtgaacggttatatatcttctctcgagaattgctgcagacgttctccaactcctcctctgtaatttcttccactgggcgaattatatgcggaagggtcacggatgatctggagcgacggcttctgggcaggtcatcttcctgcat

SEQ ID NO: 4258 - RNA, 37 nt, Homo sapiens
  source 1..37: mol_type = unassigned RNA
tggaagcagcattgtccagctctctggtttgtaaaaa

SEQ ID NO: 4259 - DNA, 37 bp, Homo sapiens
  source 1..37: mol_type = unassigned DNA
tggaagcagcattgtccagctctctggtttgtaaaaa

SEQ ID NO: 4260 - DNA, 37 bp, Homo sapiens
  source 1..37: mol_type = unassigned DNA
tttttacaaaccagagagctggacaatgctgcttcca

SEQ ID NO: 4261 - RNA, 33 nt, Homo sapiens
  source 1..33: mol_type = unassigned RNA
caatgcagaccgtggagctgctggaggagcagg

SEQ ID NO: 4262 - DNA, 33 bp, Homo sapiens
  source 1..33: mol_type = unassigned DNA
caatgcagaccgtggagctgctggaggagcagg

SEQ ID NO: 4263 - DNA, 33 bp, Homo sapiens
  source 1..33: mol_type = unassigned DNA
cctgctcctccagcagctccacggtctgcattg

SEQ ID NO: 4264 - RNA, 25 nt, Homo sapiens
  source 1..25: mol_type = unassigned RNA
gaatagcttgattgagagggcaaga

SEQ ID NO: 4265 - DNA, 25 bp, Homo sapiens
  source 1..25: mol_type = unassigned DNA
gaatagcttgattgagagggcaaga

SEQ ID NO: 4266 - DNA, 25 bp, Homo sapiens
  source 1..25: mol_type = unassigned DNA
tcttgccctctcaatcaagctattc

SEQ ID NO: 4267 - RNA, 64 nt, Homo sapiens
  source 1..64: mol_type = unassigned RNA
accatcaatgaccccttcattgacctcaactaccccttcattgacctcaactacatgatctaca

SEQ ID NO: 4268 - DNA, 64 bp, Homo sapiens
  source 1..64: mol_type = unassigned DNA
accatcaatgaccccttcattgacctcaactaccccttcattgacctcaactacatgatctaca

SEQ ID NO: 4269 - DNA, 64 bp, Homo sapiens
  source 1..64: mol_type = unassigned DNA
tgtagatcatgtagttgaggtcaatgaaggggtagttgaggtcaatgaaggggtcattgatggt

SEQ ID NO: 4270 - RNA, 53 nt, Homo sapiens
  source 1..53: mol_type = unassigned RNA
taaatggcactgggtagaattcaagttatcagtccagatgtgaacttgtttta

SEQ ID NO: 4271 - DNA, 53 bp, Homo sapiens
  source 1..53: mol_type = unassigned DNA
taaatggcactgggtagaattcaagttatcagtccagatgtgaacttgtttta

SEQ ID NO: 4272 - DNA, 53 bp, Homo sapiens
  source 1..53: mol_type = unassigned DNA
taaaacaagttcacatctggactgataacttgaattctacccagtgccattta

SEQ ID NO: 4273 - RNA, 32 nt, Homo sapiens
  source 1..32: mol_type = unassigned RNA
gaagggaccccaggtcagagactggagccatc

SEQ ID NO: 4274 - DNA, 32 bp, Homo sapiens
  source 1..32: mol_type = unassigned DNA
gaagggaccccaggtcagagactggagccatc

SEQ ID NO: 4275 - DNA, 32 bp, Homo sapiens
  source 1..32: mol_type = unassigned DNA
gatggctccagtctctgacctggggtcccttc

SEQ ID NO: 4276 - RNA, 34 nt, Homo sapiens
  source 1..34: mol_type = unassigned RNA
ctgtcttaccctctatcatcactgaatttgttgg

SEQ ID NO: 4277 - DNA, 34 bp, Homo sapiens
  source 1..34: mol_type = unassigned DNA
ctgtcttaccctctatcatcactgaatttgttgg

SEQ ID NO: 4278 - DNA, 34 bp, Homo sapiens
  source 1..34: mol_type = unassigned DNA
ccaacaaattcagtgatgatagagggtaagacag

SEQ ID NO: 4279 - RNA, 33 nt, Homo sapiens
  source 1..33: mol_type = unassigned RNA
aagccacgatgaaaggaagtagctctgcttcca

SEQ ID NO: 4280 - DNA, 33 bp, Homo sapiens
  source 1..33: mol_type = unassigned DNA
aagccacgatgaaaggaagtagctctgcttcca

SEQ ID NO: 4281 - DNA, 33 bp, Homo sapiens
  source 1..33: mol_type = unassigned DNA
tggaagcagagctacttcctttcatcgtggctt

SEQ ID NO: 4282 - RNA, 24 nt, Homo sapiens
  source 1..24: mol_type = unassigned RNA
ctcaccctcagagggctttgatgt

SEQ ID NO: 4283 - DNA, 24 bp, Homo sapiens
  source 1..24: mol_type = unassigned DNA
ctcaccctcagagggctttgatgt

SEQ ID NO: 4284 - DNA, 24 bp, Homo sapiens
  source 1..24: mol_type = unassigned DNA
acatcaaagccctctgagggtgag

SEQ ID NO: 4285 - RNA, 32 nt, Homo sapiens
  source 1..32: mol_type = unassigned RNA
tctctcacttttctccatggtagaaattacag

SEQ ID NO: 4286 - DNA, 32 bp, Homo sapiens
  source 1..32: mol_type = unassigned DNA
tctctcacttttctccatggtagaaattacag

SEQ ID NO: 4287 - DNA, 32 bp, Homo sapiens
  source 1..32: mol_type = unassigned DNA
ctgtaatttctaccatggagaaaagtgagaga

SEQ ID NO: 4288 - RNA, 32 nt, Homo sapiens
  source 1..32: mol_type = unassigned RNA
ggaagagcagaactagggttgtaagctcaaat

SEQ ID NO: 4289 - DNA, 32 bp, Homo sapiens
  source 1..32: mol_type = unassigned DNA
ggaagagcagaactagggttgtaagctcaaat

SEQ ID NO: 4290 - DNA, 32 bp, Homo sapiens
  source 1..32: mol_type = unassigned DNA
atttgagcttacaaccctagttctgctcttcc

SEQ ID NO: 4291 - RNA, 45 nt, Homo sapiens
  source 1..45: mol_type = unassigned RNA
gggaaaggcttgcaggaggccatgggtgttgaccaggaaattcgt

SEQ ID NO: 4292 - DNA, 45 bp, Homo sapiens
  source 1..45: mol_type = unassigned DNA
gggaaaggcttgcaggaggccatgggtgttgaccaggaaattcgt

SEQ ID NO: 4293 - DNA, 45 bp, Homo sapiens
  source 1..45: mol_type = unassigned DNA
acgaatttcctggtcaacacccatggcctcctgcaagcctttccc

SEQ ID NO: 4294 - RNA, 24 nt, Homo sapiens
  source 1..24: mol_type = unassigned RNA
aagggaaatggtagaatccacttt

SEQ ID NO: 4295 - DNA, 24 bp, Homo sapiens
  source 1..24: mol_type = unassigned DNA
aagggaaatggtagaatccacttt

SEQ ID NO: 4296 - DNA, 24 bp, Homo sapiens
  source 1..24: mol_type = unassigned DNA
aaagtggattctaccatttccctt

SEQ ID NO: 4297 - RNA, 51 nt, Homo sapiens
  source 1..51: mol_type = unassigned RNA
cttaggtggcagctggagactctgggccaggagaagctgaagctggaggca

SEQ ID NO: 4298 - DNA, 51 bp, Homo sapiens
  source 1..51: mol_type = unassigned DNA
cttaggtggcagctggagactctgggccaggagaagctgaagctggaggca

SEQ ID NO: 4299 - DNA, 51 bp, Homo sapiens
  source 1..51: mol_type = unassigned DNA
tgcctccagcttcagcttctcctggcccagagtctccagctgccacctaag

SEQ ID NO: 4300 - RNA, 30 nt, Homo sapiens
  source 1..30: mol_type = unassigned RNA
tggtggcccgggaaccctggatgacagtgc

SEQ ID NO: 4301 - DNA, 30 bp, Homo sapiens
  source 1..30: mol_type = unassigned DNA
tggtggcccgggaaccctggatgacagtgc

SEQ ID NO: 4302 - DNA, 30 bp, Homo sapiens
  source 1..30: mol_type = unassigned DNA
gcactgtcatccagggttcccgggccacca

SEQ ID NO: 4303 - RNA, 39 nt, Homo sapiens
  source 1..39: mol_type = unassigned RNA
tgggctgtaaaagtaatggcacaaatgagctgggtgtgg

SEQ ID NO: 4304 - DNA, 39 bp, Homo sapiens
  source 1..39: mol_type = unassigned DNA
tgggctgtaaaagtaatggcacaaatgagctgggtgtgg

SEQ ID NO: 4305 - DNA, 39 bp, Homo sapiens
  source 1..39: mol_type = unassigned DNA
ccacacccagctcatttgtgccattacttttacagccca

SEQ ID NO: 4306 - RNA, 26 nt, Homo sapiens
  source 1..26: mol_type = unassigned RNA
aaacgttcctggaactcaagctcttc

SEQ ID NO: 4307 - DNA, 26 bp, Homo sapiens
  source 1..26: mol_type = unassigned DNA
aaacgttcctggaactcaagctcttc

SEQ ID NO: 4308 - DNA, 26 bp, Homo sapiens
  source 1..26: mol_type = unassigned DNA
gaagagcttgagttccaggaacgttt

SEQ ID NO: 4309 - RNA, 58 nt, Homo sapiens
  source 1..58: mol_type = unassigned RNA
ctagatttgactctactgtctctgttatctctgagctctttcttgggcatgccctctt

SEQ ID NO: 4310 - DNA, 58 bp, Homo sapiens
  source 1..58: mol_type = unassigned DNA
ctagatttgactctactgtctctgttatctctgagctctttcttgggcatgccctctt

SEQ ID NO: 4311 - DNA, 58 bp, Homo sapiens
  source 1..58: mol_type = unassigned DNA
aagagggcatgcccaagaaagagctcagagataacagagacagtagagtcaaatctag

SEQ ID NO: 4312 - RNA, 101 nt, Homo sapiens
  source 1..101: mol_type = unassigned RNA
actcacataaagaacaggaaggacagaacctaggtggcattgctctgcgaggcaggaatgctgtgttttttgttgttggtgttgttattgttgttttttga

SEQ ID NO: 4313 - DNA, 101 bp, Homo sapiens
  source 1..101: mol_type = unassigned DNA
actcacataaagaacaggaaggacagaacctaggtggcattgctctgcgaggcaggaatgctgtgttttttgttgttggtgttgttattgttgttttttga

SEQ ID NO: 4314 - DNA, 101 bp, Homo sapiens
  source 1..101: mol_type = unassigned DNA
tcaaaaaacaacaataacaacaccaacaacaaaaaacacagcattcctgcctcgcagagcaatgccacctaggttctgtccttcctgttctttatgtgagt

SEQ ID NO: 4315 - RNA, 132 nt, Homo sapiens
  source 1..132: mol_type = unassigned RNA
ataacctagatagaacagatgttttgtgtgaaatttagtatctttaacttaataaaccagcaggaactgtatgaacacaacacacccaactgacaaacagagagaactaacatgtttatttagctgtatgta

SEQ ID NO: 4316 - DNA, 132 bp, Homo sapiens
  source 1..132: mol_type = unassigned DNA
ataacctagatagaacagatgttttgtgtgaaatttagtatctttaacttaataaaccagcaggaactgtatgaacacaacacacccaactgacaaacagagagaactaacatgtttatttagctgtatgta

SEQ ID NO: 4317 - DNA, 132 bp, Homo sapiens
  source 1..132: mol_type = unassigned DNA
tacatacagctaaataaacatgttagttctctctgtttgtcagttgggtgtgttgtgttcatacagttcctgctggtttattaagttaaagatactaaatttcacacaaaacatctgttctatctaggttat

SEQ ID NO: 4318 - RNA, 26 nt, Homo sapiens
  source 1..26: mol_type = unassigned RNA
cctttgttttatctagctgtcttaca

SEQ ID NO: 4319 - DNA, 26 bp, Homo sapiens
  source 1..26: mol_type = unassigned DNA
cctttgttttatctagctgtcttaca

SEQ ID NO: 4320 - DNA, 26 bp, Homo sapiens
  source 1..26: mol_type = unassigned DNA
tgtaagacagctagataaaacaaagg

SEQ ID NO: 4321 - RNA, 25 nt, Homo sapiens
  source 1..25: mol_type = unassigned RNA
ttttttctttctgctctctttaatt

SEQ ID NO: 4322 - DNA, 25 bp, Homo sapiens
  source 1..25: mol_type = unassigned DNA
ttttttctttctgctctctttaatt

SEQ ID NO: 4323 - DNA, 25 bp, Homo sapiens
  source 1..25: mol_type = unassigned DNA
aattaaagagagcagaaagaaaaaa

SEQ ID NO: 4324 - RNA, 90 nt, Homo sapiens
  source 1..90: mol_type = unassigned RNA
tttttttctttctgctcacttggctccagccacagtgtcctccctgtctcctgccacagtgtcctccctgtctcctgcagacacaccagc

SEQ ID NO: 4325 - DNA, 90 bp, Homo sapiens
  source 1..90: mol_type = unassigned DNA
tttttttctttctgctcacttggctccagccacagtgtcctccctgtctcctgccacagtgtcctccctgtctcctgcagacacaccagc

SEQ ID NO: 4326 - DNA, 90 bp, Homo sapiens
  source 1..90: mol_type = unassigned DNA
gctggtgtgtctgcaggagacagggaggacactgtggcaggagacagggaggacactgtggctggagccaagtgagcagaaagaaaaaaa

SEQ ID NO: 4327 - RNA, 33 nt, Homo sapiens
  source 1..33: mol_type = unassigned RNA
tggatttttctctctgttctttctcgcgtgaat

SEQ ID NO: 4328 - DNA, 33 bp, Homo sapiens
  source 1..33: mol_type = unassigned DNA
tggatttttctctctgttctttctcgcgtgaat

SEQ ID NO: 4329 - DNA, 33 bp, Homo sapiens
  source 1..33: mol_type = unassigned DNA
attcacgcgagaaagaacagagagaaaaatcca

SEQ ID NO: 4330 - RNA, 22 nt, Homo sapiens
  source 1..22: mol_type = unassigned RNA
taagttacaaagggatgttgaa

SEQ ID NO: 4331 - DNA, 22 bp, Homo sapiens
  source 1..22: mol_type = unassigned DNA
taagttacaaagggatgttgaa

SEQ ID NO: 4332 - DNA, 22 bp, Homo sapiens
  source 1..22: mol_type = unassigned DNA
ttcaacatccctttgtaactta

SEQ ID NO: 4333 - RNA, 45 nt, Homo sapiens
  source 1..45: mol_type = unassigned RNA
ctcttttgttgtgggtagcggcagtttgttcgttctcgtgtgctc

SEQ ID NO: 4334 - DNA, 45 bp, Homo sapiens
  source 1..45: mol_type = unassigned DNA
ctcttttgttgtgggtagcggcagtttgttcgttctcgtgtgctc

SEQ ID NO: 4335 - DNA, 45 bp, Homo sapiens
  source 1..45: mol_type = unassigned DNA
gagcacacgagaacgaacaaactgccgctacccacaacaaaagag

SEQ ID NO: 4336 - RNA, 24 nt, Homo sapiens
  source 1..24: mol_type = unassigned RNA
cttctttcttctgctctcgtgatc

SEQ ID NO: 4337 - DNA, 24 bp, Homo sapiens
  source 1..24: mol_type = unassigned DNA
cttctttcttctgctctcgtgatc

SEQ ID NO: 4338 - DNA, 24 bp, Homo sapiens
  source 1..24: mol_type = unassigned DNA
gatcacgagagcagaagaaagaag

SEQ ID NO: 4339 - RNA, 41 nt, Homo sapiens
  source 1..41: mol_type = unassigned RNA
ggataggagcaggaaacatcagccagaacatctcgtataaa

SEQ ID NO: 4340 - DNA, 41 bp, Homo sapiens
  source 1..41: mol_type = unassigned DNA
ggataggagcaggaaacatcagccagaacatctcgtataaa

SEQ ID NO: 4341 - DNA, 41 bp, Homo sapiens
  source 1..41: mol_type = unassigned DNA
tttatacgagatgttctggctgatgtttcctgctcctatcc

SEQ ID NO: 4342 - RNA, 23 nt, Homo sapiens
  source 1..23: mol_type = unassigned RNA
taatacttcagtgtatgctggtt

SEQ ID NO: 4343 - DNA, 23 bp, Homo sapiens
  source 1..23: mol_type = unassigned DNA
taatacttcagtgtatgctggtt

SEQ ID NO: 4344 - DNA, 23 bp, Homo sapiens
  source 1..23: mol_type = unassigned DNA
aaccagcatacactgaagtatta

SEQ ID NO: 4345 - RNA, 27 nt, Homo sapiens
  source 1..27: mol_type = unassigned RNA
ttgtcagtgcccttcctaattttgtaa

SEQ ID NO: 4346 - DNA, 27 bp, Homo sapiens
  source 1..27: mol_type = unassigned DNA
ttgtcagtgcccttcctaattttgtaa

SEQ ID NO: 4347 - DNA, 27 bp, Homo sapiens
  source 1..27: mol_type = unassigned DNA
ttacaaaattaggaagggcactgacaa

SEQ ID NO: 4348 - RNA, 24 nt, Homo sapiens
  source 1..24: mol_type = unassigned RNA
aatttgttcgttcttgtgtgaaat

SEQ ID NO: 4349 - DNA, 24 bp, Homo sapiens
  source 1..24: mol_type = unassigned DNA
aatttgttcgttcttgtgtgaaat

SEQ ID NO: 4350 - DNA, 24 bp, Homo sapiens
  source 1..24: mol_type = unassigned DNA
atttcacacaagaacgaacaaatt

SEQ ID NO: 4351 - RNA, 26 nt, Homo sapiens
  source 1..26: mol_type = unassigned RNA
ctttgttctttctcatcacgtgaaaa

SEQ ID NO: 4352 - DNA, 26 bp, Homo sapiens
  source 1..26: mol_type = unassigned DNA
ctttgttctttctcatcacgtgaaaa

SEQ ID NO: 4353 - DNA, 26 bp, Homo sapiens
  source 1..26: mol_type = unassigned DNA
ttttcacgtgatgagaaagaacaaag

SEQ ID NO: 4354 - RNA, 24 nt, Homo sapiens
  source 1..24: mol_type = unassigned RNA
tttggttattagtttgtatctttg

SEQ ID NO: 4355 - DNA, 24 bp, Homo sapiens
  source 1..24: mol_type = unassigned DNA
tttggttattagtttgtatctttg

SEQ ID NO: 4356 - DNA, 24 bp, Homo sapiens
  source 1..24: mol_type = unassigned DNA
caaagatacaaactaataaccaaa

SEQ ID NO: 4357 - RNA, 26 nt, Homo sapiens
  source 1..26: mol_type = unassigned RNA
atgcattattagtttttgtggttata

SEQ ID NO: 4358 - DNA, 26 bp, Homo sapiens
  source 1..26: mol_type = unassigned DNA
atgcattattagtttttgtggttata

SEQ ID NO: 4359 - DNA, 26 bp, Homo sapiens
  source 1..26: mol_type = unassigned DNA
tataaccacaaaaactaataatgcat

SEQ ID NO: 4360 - RNA, 35 nt, Homo sapiens
  source 1..35: mol_type = unassigned RNA
ttagtatactatatcagtttgtatagttgtagtat

SEQ ID NO: 4361 - DNA, 35 bp, Homo sapiens
  source 1..35: mol_type = unassigned DNA
ttagtatactatatcagtttgtatagttgtagtat

SEQ ID NO: 4362 - DNA, 35 bp, Homo sapiens
  source 1..35: mol_type = unassigned DNA
atactacaactatacaaactgatatagtatactaa

SEQ ID NO: 4363 - RNA, 81 nt, Homo sapiens
  source 1..81: mol_type = unassigned RNA
atcatatttattccatgtttgtgcctctgtgtatgttggcatgctttgttagtttgtgtggtatgtctgtatgtgcttaga

SEQ ID NO: 4364 - DNA, 81 bp, Homo sapiens
  source 1..81: mol_type = unassigned DNA
atcatatttattccatgtttgtgcctctgtgtatgttggcatgctttgttagtttgtgtggtatgtctgtatgtgcttaga

SEQ ID NO: 4365 - DNA, 81 bp, Homo sapiens
  source 1..81: mol_type = unassigned DNA
tctaagcacatacagacataccacacaaactaacaaagcatgccaacatacacagaggcacaaacatggaataaatatgat

SEQ ID NO: 4366 - RNA, 56 nt, Homo sapiens
  source 1..56: mol_type = unassigned RNA
tagtaattaatcagagattaggtattgagtttgtatggttttctggaagtgtgtga

SEQ ID NO: 4367 - DNA, 56 bp, Homo sapiens
  source 1..56: mol_type = unassigned DNA
tagtaattaatcagagattaggtattgagtttgtatggttttctggaagtgtgtga

SEQ ID NO: 4368 - DNA, 56 bp, Homo sapiens
  source 1..56: mol_type = unassigned DNA
tcacacacttccagaaaaccatacaaactcaatacctaatctctgattaattacta

SEQ ID NO: 4369 - RNA, 30 nt, Homo sapiens
  source 1..30: mol_type = unassigned RNA
ccaaagtccatgccctccctacctttgtta

SEQ ID NO: 4370 - DNA, 30 bp, Homo sapiens
  source 1..30: mol_type = unassigned DNA
ccaaagtccatgccctccctacctttgtta

SEQ ID NO: 4371 - DNA, 30 bp, Homo sapiens
  source 1..30: mol_type = unassigned DNA
taacaaaggtagggagggcatggactttgg

SEQ ID NO: 4372 - RNA, 23 nt, Homo sapiens
  source 1..23: mol_type = unassigned RNA
cagccagaagggttgggcaccag

SEQ ID NO: 4373 - DNA, 23 bp, Homo sapiens
  source 1..23: mol_type = unassigned DNA
cagccagaagggttgggcaccag

SEQ ID NO: 4374 - DNA, 23 bp, Homo sapiens
  source 1..23: mol_type = unassigned DNA
ctggtgcccaacccttctggctg

SEQ ID NO: 4375 - RNA, 24 nt, Homo sapiens
  source 1..24: mol_type = unassigned RNA
gttaggtatagtttgtattgtttt

SEQ ID NO: 4376 - DNA, 24 bp, Homo sapiens
  source 1..24: mol_type = unassigned DNA
gttaggtatagtttgtattgtttt

SEQ ID NO: 4377 - DNA, 24 bp, Homo sapiens
  source 1..24: mol_type = unassigned DNA
aaaacaatacaaactatacctaac

SEQ ID NO: 4378 - RNA, 59 nt, Homo sapiens
  source 1..59: mol_type = unassigned RNA
tcaggtatgtgattttgtagtttgtgtagttttaacttgtgcagcttgtttttttatcc

SEQ ID NO: 4379 - DNA, 59 bp, Homo sapiens
  source 1..59: mol_type = unassigned DNA
tcaggtatgtgattttgtagtttgtgtagttttaacttgtgcagcttgtttttttatcc

SEQ ID NO: 4380 - DNA, 59 bp, Homo sapiens
  source 1..59: mol_type = unassigned DNA
ggataaaaaaacaagctgcacaagttaaaactacacaaactacaaaatcacatacctga

SEQ ID NO: 4381 - RNA, 30 nt, Homo sapiens
  source 1..30: mol_type = unassigned RNA
cagcagaagggtgtgggcaccaacagctgc

SEQ ID NO: 4382 - DNA, 30 bp, Homo sapiens
  source 1..30: mol_type = unassigned DNA
cagcagaagggtgtgggcaccaacagctgc

SEQ ID NO: 4383 - DNA, 30 bp, Homo sapiens
  source 1..30: mol_type = unassigned DNA
gcagctgttggtgcccacacccttctgctg

SEQ ID NO: 4384 - RNA, 112 nt, Homo sapiens
  source 1..112: mol_type = unassigned RNA
tggtgtcaaatcacctggaatcaagtttctgctcgaccacttcccagccagaagacctcatatgaaccattttgaatcgatttgctccctctgaacttgtttctgcatcctt

SEQ ID NO: 4385 - DNA, 112 bp, Homo sapiens
  source 1..112: mol_type = unassigned DNA
tggtgtcaaatcacctggaatcaagtttctgctcgaccacttcccagccagaagacctcatatgaaccattttgaatcgatttgctccctctgaacttgtttctgcatcctt

SEQ ID NO: 4386 - DNA, 112 bp, Homo sapiens
  source 1..112: mol_type = unassigned DNA
aaggatgcagaaacaagttcagagggagcaaatcgattcaaaatggttcatatgaggtcttctggctgggaagtggtcgagcagaaacttgattccaggtgatttgacacca

SEQ ID NO: 4387 - RNA, 23 nt, Homo sapiens
  source 1..23: mol_type = unassigned RNA
ttttttctttctgctctccagac

SEQ ID NO: 4388 - DNA, 23 bp, Homo sapiens
  source 1..23: mol_type = unassigned DNA
ttttttctttctgctctccagac

SEQ ID NO: 4389 - DNA, 23 bp, Homo sapiens
  source 1..23: mol_type = unassigned DNA
gtctggagagcagaaagaaaaaa

SEQ ID NO: 4390 - RNA, 40 nt, Homo sapiens
  source 1..40: mol_type = unassigned RNA
tttttttctttttgctctcctgactagataatttcacaca

SEQ ID NO: 4391 - DNA, 40 bp, Homo sapiens
  source 1..40: mol_type = unassigned DNA
tttttttctttttgctctcctgactagataatttcacaca

SEQ ID NO: 4392 - DNA, 40 bp, Homo sapiens
  source 1..40: mol_type = unassigned DNA
tgtgtgaaattatctagtcaggagagcaaaaagaaaaaaa

SEQ ID NO: 4393 - RNA, 39 nt, Homo sapiens
  source 1..39: mol_type = unassigned RNA
agatcacgcaatttccctttctgagcctcgtatgctgtg

SEQ ID NO: 4394 - DNA, 39 bp, Homo sapiens
  source 1..39: mol_type = unassigned DNA
agatcacgcaatttccctttctgagcctcgtatgctgtg

SEQ ID NO: 4395 - DNA, 39 bp, Homo sapiens
  source 1..39: mol_type = unassigned DNA
cacagcatacgaggctcagaaagggaaattgcgtgatct

SEQ ID NO: 4396 - RNA, 47 nt, Homo sapiens
  source 1..47: mol_type = unassigned RNA
ttttttctttctgctcagctgactggattgtcccttctttgagtctc

SEQ ID NO: 4397 - DNA, 47 bp, Homo sapiens
  source 1..47: mol_type = unassigned DNA
ttttttctttctgctcagctgactggattgtcccttctttgagtctc

SEQ ID NO: 4398 - DNA, 47 bp, Homo sapiens
  source 1..47: mol_type = unassigned DNA
gagactcaaagaagggacaatccagtcagctgagcagaaagaaaaaa

SEQ ID NO: 4399 - RNA, 24 nt, Homo sapiens
  source 1..24: mol_type = unassigned RNA
ttttctctttctgctcccttgact

SEQ ID NO: 4400 - DNA, 24 bp, Homo sapiens
  source 1..24: mol_type = unassigned DNA
ttttctctttctgctcccttgact

SEQ ID NO: 4401 - DNA, 24 bp, Homo sapiens
  source 1..24: mol_type = unassigned DNA
agtcaagggagcagaaagagaaaa

SEQ ID NO: 4402 - RNA, 24 nt, Homo sapiens
  source 1..24: mol_type = unassigned RNA
tgagttattattttatatggtata

SEQ ID NO: 4403 - DNA, 24 bp, Homo sapiens
  source 1..24: mol_type = unassigned DNA
tgagttattattttatatggtata

SEQ ID NO: 4404 - DNA, 24 bp, Homo sapiens
  source 1..24: mol_type = unassigned DNA
tataccatataaaataataactca

SEQ ID NO: 4405 - RNA, 29 nt, Homo sapiens
  source 1..29: mol_type = unassigned RNA
gctgtgacattcgctacacaggacatcat

SEQ ID NO: 4406 - DNA, 29 bp, Homo sapiens
  source 1..29: mol_type = unassigned DNA
gctgtgacattcgctacacaggacatcat

SEQ ID NO: 4407 - DNA, 29 bp, Homo sapiens
  source 1..29: mol_type = unassigned DNA
atgatgtcctgtgtagcgaatgtcacagc

SEQ ID NO: 4408 - RNA, 24 nt, Homo sapiens
  source 1..24: mol_type = unassigned RNA
tctttgccctccataagtttgtaa

SEQ ID NO: 4409 - DNA, 24 bp, Homo sapiens
  source 1..24: mol_type = unassigned DNA
tctttgccctccataagtttgtaa

SEQ ID NO: 4410 - DNA, 24 bp, Homo sapiens
  source 1..24: mol_type = unassigned DNA
ttacaaacttatggagggcaaaga

SEQ ID NO: 4411 - RNA, 42 nt, Homo sapiens
  source 1..42: mol_type = unassigned RNA
aaagaagctgggctcagactgctgaagaccaagaagcacaaa

SEQ ID NO: 4412 - DNA, 42 bp, Homo sapiens
  source 1..42: mol_type = unassigned DNA
aaagaagctgggctcagactgctgaagaccaagaagcacaaa

SEQ ID NO: 4413 - DNA, 42 bp, Homo sapiens
  source 1..42: mol_type = unassigned DNA
tttgtgcttcttggtcttcagcagtctgagcccagcttcttt

SEQ ID NO: 4414 - RNA, 46 nt, Homo sapiens
  source 1..46: mol_type = unassigned RNA
tttatttattagtttgaatggttttctggcagcatctttatggttt

SEQ ID NO: 4415 - DNA, 46 bp, Homo sapiens
  source 1..46: mol_type = unassigned DNA
tttatttattagtttgaatggttttctggcagcatctttatggttt

SEQ ID NO: 4416 - DNA, 46 bp, Homo sapiens
  source 1..46: mol_type = unassigned DNA
aaaccataaagatgctgccagaaaaccattcaaactaataaataaa

SEQ ID NO: 4417 - RNA, 49 nt, Homo sapiens
  source 1..49: mol_type = unassigned RNA
tactttattagtttttatggttgaataattttccattgtaccacattgt

SEQ ID NO: 4418 - DNA, 49 bp, Homo sapiens
  source 1..49: mol_type = unassigned DNA
tactttattagtttttatggttgaataattttccattgtaccacattgt

SEQ ID NO: 4419 - DNA, 49 bp, Homo sapiens
  source 1..49: mol_type = unassigned DNA
acaatgtggtacaatggaaaattattcaaccataaaaactaataaagta

SEQ ID NO: 4420 - RNA, 28 nt, Homo sapiens
  source 1..28: mol_type = unassigned RNA
aaggcttttgagactatggaaataggca

SEQ ID NO: 4421 - DNA, 28 bp, Homo sapiens
  source 1..28: mol_type = unassigned DNA
aaggcttttgagactatggaaataggca

SEQ ID NO: 4422 - DNA, 28 bp, Homo sapiens
  source 1..28: mol_type = unassigned DNA
tgcctatttccatagtctcaaaagcctt

SEQ ID NO: 4423 - RNA, 71 nt, Homo sapiens
  source 1..71: mol_type = unassigned RNA
ttgcccatgatggttttttccttctctctcgtgaagctcaggacacaaaggcaaactgcacggggaggcca

SEQ ID NO: 4424 - DNA, 71 bp, Homo sapiens
  source 1..71: mol_type = unassigned DNA
ttgcccatgatggttttttccttctctctcgtgaagctcaggacacaaaggcaaactgcacggggaggcca

SEQ ID NO: 4425 - DNA, 71 bp, Homo sapiens
  source 1..71: mol_type = unassigned DNA
tggcctccccgtgcagtttgcctttgtgtcctgagcttcacgagagagaaggaaaaaaccatcatgggcaa

SEQ ID NO: 4426 - RNA, 30 nt, Homo sapiens
  source 1..30: mol_type = unassigned RNA
attcactgtccgaacctgaaatggcagctc

SEQ ID NO: 4427 - DNA, 30 bp, Homo sapiens
  source 1..30: mol_type = unassigned DNA
attcactgtccgaacctgaaatggcagctc

SEQ ID NO: 4428 - DNA, 30 bp, Homo sapiens
  source 1..30: mol_type = unassigned DNA
gagctgccatttcaggttcggacagtgaat

SEQ ID NO: 4429 - RNA, 76 nt, Homo sapiens
  source 1..76: mol_type = unassigned RNA
ctctcacaatatatcataagccctctgaccactagggattcactgtaggcatttggtcgtctttgcagcagcaggc

SEQ ID NO: 4430 - DNA, 76 bp, Homo sapiens
  source 1..76: mol_type = unassigned DNA
ctctcacaatatatcataagccctctgaccactagggattcactgtaggcatttggtcgtctttgcagcagcaggc

SEQ ID NO: 4431 - DNA, 76 bp, Homo sapiens
  source 1..76: mol_type = unassigned DNA
gcctgctgctgcaaagacgaccaaatgcctacagtgaatccctagtggtcagagggcttatgatatattgtgagag

SEQ ID NO: 4432 - RNA, 32 nt, Homo sapiens
  source 1..32: mol_type = unassigned RNA
acctcaatgatgatatctgacatggtctattt

SEQ ID NO: 4433 - DNA, 32 bp, Homo sapiens
  source 1..32: mol_type = unassigned DNA
acctcaatgatgatatctgacatggtctattt

SEQ ID NO: 4434 - DNA, 32 bp, Homo sapiens
  source 1..32: mol_type = unassigned DNA
aaatagaccatgtcagatatcatcattgaggt

SEQ ID NO: 4435 - RNA, 43 nt, Homo sapiens
  source 1..43: mol_type = unassigned RNA
ttcggatattactttgtgtggttatgtggccagaggagtttgg

SEQ ID NO: 4436 - DNA, 43 bp, Homo sapiens
  source 1..43: mol_type = unassigned DNA
ttcggatattactttgtgtggttatgtggccagaggagtttgg

SEQ ID NO: 4437 - DNA, 43 bp, Homo sapiens
  source 1..43: mol_type = unassigned DNA
ccaaactcctctggccacataaccacacaaagtaatatccgaa

SEQ ID NO: 4438 - RNA, 27 nt, Homo sapiens
  source 1..27: mol_type = unassigned RNA
tttggtattgtttgtgtggtttaaaaa

SEQ ID NO: 4439 - DNA, 27 bp, Homo sapiens
  source 1..27: mol_type = unassigned DNA
tttggtattgtttgtgtggtttaaaaa

SEQ ID NO: 4440 - DNA, 27 bp, Homo sapiens
  source 1..27: mol_type = unassigned DNA
tttttaaaccacacaaacaataccaaa

SEQ ID NO: 4441 - RNA, 23 nt, Homo sapiens
  source 1..23: mol_type = unassigned RNA
ttaagtattagtttgttcgttga

SEQ ID NO: 4442 - DNA, 23 bp, Homo sapiens
  source 1..23: mol_type = unassigned DNA
ttaagtattagtttgttcgttga

SEQ ID NO: 4443 - DNA, 23 bp, Homo sapiens
  source 1..23: mol_type = unassigned DNA
tcaacgaacaaactaatacttaa

SEQ ID NO: 4444 - RNA, 73 nt, Homo sapiens
  source 1..73: mol_type = unassigned RNA
gcctctgggggaagctggagaggaagaaatgtggaactgccagtgacagcagaggcttttgattaaggaaaac

SEQ ID NO: 4445 - DNA, 73 bp, Homo sapiens
  source 1..73: mol_type = unassigned DNA
gcctctgggggaagctggagaggaagaaatgtggaactgccagtgacagcagaggcttttgattaaggaaaac

SEQ ID NO: 4446 - DNA, 73 bp, Homo sapiens
  source 1..73: mol_type = unassigned DNA
gttttccttaatcaaaagcctctgctgtcactggcagttccacatttcttcctctccagcttcccccagaggc

SEQ ID NO: 4447 - RNA, 24 nt, Homo sapiens
  source 1..24: mol_type = unassigned RNA
ttcagttttagtttgtctggtttt

SEQ ID NO: 4448 - DNA, 24 bp, Homo sapiens
  source 1..24: mol_type = unassigned DNA
ttcagttttagtttgtctggtttt

SEQ ID NO: 4449 - DNA, 24 bp, Homo sapiens
  source 1..24: mol_type = unassigned DNA
aaaaccagacaaactaaaactgaa

SEQ ID NO: 4450 - RNA, 37 nt, Homo sapiens
  source 1..37: mol_type = unassigned RNA
tagtggctcccacttccagatctttctctctgtatat

SEQ ID NO: 4451 - DNA, 37 bp, Homo sapiens
  source 1..37: mol_type = unassigned DNA
tagtggctcccacttccagatctttctctctgtatat

SEQ ID NO: 4452 - DNA, 37 bp, Homo sapiens
  source 1..37: mol_type = unassigned DNA
atatacagagagaaagatctggaagtgggagccacta

SEQ ID NO: 4453 - RNA, 27 nt, Homo sapiens
  source 1..27: mol_type = unassigned RNA
aagctgtgagggaagaaatgtggaaca

SEQ ID NO: 4454 - DNA, 27 bp, Homo sapiens
  source 1..27: mol_type = unassigned DNA
aagctgtgagggaagaaatgtggaaca

SEQ ID NO: 4455 - DNA, 27 bp, Homo sapiens
  source 1..27: mol_type = unassigned DNA
tgttccacatttcttccctcacagctt

SEQ ID NO: 4456 - RNA, 99 nt, Homo sapiens
  source 1..99: mol_type = unassigned RNA
gtttctccctgaggttgaaggaaaatggaaatgaagctaccagctctggacacggctcaacaaggctgaactagctcccattgtaagcgggagatgcca

SEQ ID NO: 4457 - DNA, 99 bp, Homo sapiens
  source 1..99: mol_type = unassigned DNA
gtttctccctgaggttgaaggaaaatggaaatgaagctaccagctctggacacggctcaacaaggctgaactagctcccattgtaagcgggagatgcca

SEQ ID NO: 4458 - DNA, 99 bp, Homo sapiens
  source 1..99: mol_type = unassigned DNA
tggcatctcccgcttacaatgggagctagttcagccttgttgagccgtgtccagagctggtagcttcatttccattttccttcaacctcagggagaaac

SEQ ID NO: 4459 - RNA, 32 nt, Homo sapiens
  source 1..32: mol_type = unassigned RNA
acacacggtggctctggacctggcggccatca

SEQ ID NO: 4460 - DNA, 32 bp, Homo sapiens
  source 1..32: mol_type = unassigned DNA
acacacggtggctctggacctggcggccatca

SEQ ID NO: 4461 - DNA, 32 bp, Homo sapiens
  source 1..32: mol_type = unassigned DNA
tgatggccgccaggtccagagccaccgtgtgt

SEQ ID NO: 4462 - RNA, 37 nt, Homo sapiens
  source 1..37: mol_type = unassigned RNA
attgtagtcagatatttggagtgtagttttaaaatga

SEQ ID NO: 4463 - DNA, 37 bp, Homo sapiens
  source 1..37: mol_type = unassigned DNA
attgtagtcagatatttggagtgtagttttaaaatga

SEQ ID NO: 4464 - DNA, 37 bp, Homo sapiens
  source 1..37: mol_type = unassigned DNA
tcattttaaaactacactccaaatatctgactacaat

SEQ ID NO: 4465 - RNA, 31 nt, Homo sapiens
  source 1..31: mol_type = unassigned RNA
ttttttttttcagctcgcgagactaattttt

SEQ ID NO: 4466 - DNA, 31 bp, Homo sapiens
  source 1..31: mol_type = unassigned DNA
ttttttttttcagctcgcgagactaattttt

SEQ ID NO: 4467 - DNA, 31 bp, Homo sapiens
  source 1..31: mol_type = unassigned DNA
aaaaattagtctcgcgagctgaaaaaaaaaa

SEQ ID NO: 4468 - RNA, 111 nt, Homo sapiens
  source 1..111: mol_type = unassigned RNA
agcgtgagcatttcctgtacagcagctgggcagcctctcagcggactggtgtgagctggggctgcggggaaggttccagaacagcgggctatgtttaacctggcacaggtg

SEQ ID NO: 4469 - DNA, 111 bp, Homo sapiens
  source 1..111: mol_type = unassigned DNA
agcgtgagcatttcctgtacagcagctgggcagcctctcagcggactggtgtgagctggggctgcggggaaggttccagaacagcgggctatgtttaacctggcacaggtg

SEQ ID NO: 4470 - DNA, 111 bp, Homo sapiens
  source 1..111: mol_type = unassigned DNA
cacctgtgccaggttaaacatagcccgctgttctggaaccttccccgcagccccagctcacaccagtccgctgagaggctgcccagctgctgtacaggaaatgctcacgct

SEQ ID NO: 4471 - RNA, 28 nt, Homo sapiens
  source 1..28: mol_type = unassigned RNA
aatataccttatcagacggtatgctggt

SEQ ID NO: 4472 - DNA, 28 bp, Homo sapiens
  source 1..28: mol_type = unassigned DNA
aatataccttatcagacggtatgctggt

SEQ ID NO: 4473 - DNA, 28 bp, Homo sapiens
  source 1..28: mol_type = unassigned DNA
accagcataccgtctgataaggtatatt

SEQ ID NO: 4474 - RNA, 57 nt, Homo sapiens
  source 1..57: mol_type = unassigned RNA
catagaatttgctggttctgaggcctccagacttggactgagccatgctaatggcat

SEQ ID NO: 4475 - DNA, 57 bp, Homo sapiens
  source 1..57: mol_type = unassigned DNA
catagaatttgctggttctgaggcctccagacttggactgagccatgctaatggcat

SEQ ID NO: 4476 - DNA, 57 bp, Homo sapiens
  source 1..57: mol_type = unassigned DNA
atgccattagcatggctcagtccaagtctggaggcctcagaaccagcaaattctatg

SEQ ID NO: 4477 - RNA, 51 nt, Homo sapiens
  source 1..51: mol_type = unassigned RNA
agagaatcgagagttccagaccttggggacaggtttggaactctcaattcc

SEQ ID NO: 4478 - DNA, 51 bp, Homo sapiens
  source 1..51: mol_type = unassigned DNA
agagaatcgagagttccagaccttggggacaggtttggaactctcaattcc

SEQ ID NO: 4479 - DNA, 51 bp, Homo sapiens
  source 1..51: mol_type = unassigned DNA
ggaattgagagttccaaacctgtccccaaggtctggaactctcgattctct

SEQ ID NO: 4480 - RNA, 41 nt, Homo sapiens
  source 1..41: mol_type = unassigned RNA
aagaggactgtgtgctgagctctgagagaaggaaggacttc

SEQ ID NO: 4481 - DNA, 41 bp, Homo sapiens
  source 1..41: mol_type = unassigned DNA
aagaggactgtgtgctgagctctgagagaaggaaggacttc

SEQ ID NO: 4482 - DNA, 41 bp, Homo sapiens
  source 1..41: mol_type = unassigned DNA
gaagtccttccttctctcagagctcagcacacagtcctctt

SEQ ID NO: 4483 - RNA, 25 nt, Homo sapiens
  source 1..25: mol_type = unassigned RNA
ttttgttaattctgctcccctgatt

SEQ ID NO: 4484 - DNA, 25 bp, Homo sapiens
  source 1..25: mol_type = unassigned DNA
ttttgttaattctgctcccctgatt

SEQ ID NO: 4485 - DNA, 25 bp, Homo sapiens
  source 1..25: mol_type = unassigned DNA
aatcaggggagcagaattaacaaaa

SEQ ID NO: 4486 - RNA, 31 nt, Homo sapiens
  source 1..31: mol_type = unassigned RNA
tggaagctgcttctgtttggccacaggcctg

SEQ ID NO: 4487 - DNA, 31 bp, Homo sapiens
  source 1..31: mol_type = unassigned DNA
tggaagctgcttctgtttggccacaggcctg

SEQ ID NO: 4488 - DNA, 31 bp, Homo sapiens
  source 1..31: mol_type = unassigned DNA
caggcctgtggccaaacagaagcagcttcca

SEQ ID NO: 4489 - RNA, 52 nt, Homo sapiens
  source 1..52: mol_type = unassigned RNA
tccctgcactccctcacttggttctcacgacagctctgtgtggacatgaagt

SEQ ID NO: 4490 - DNA, 52 bp, Homo sapiens
  source 1..52: mol_type = unassigned DNA
tccctgcactccctcacttggttctcacgacagctctgtgtggacatgaagt

SEQ ID NO: 4491 - DNA, 52 bp, Homo sapiens
  source 1..52: mol_type = unassigned DNA
acttcatgtccacacagagctgtcgtgagaaccaagtgagggagtgcaggga

SEQ ID NO: 4492 - RNA, 36 nt, Homo sapiens
  source 1..36: mol_type = unassigned RNA
tttttttctttcggctcactgcaacttcccctcccg

SEQ ID NO: 4493 - DNA, 36 bp, Homo sapiens
  source 1..36: mol_type = unassigned DNA
tttttttctttcggctcactgcaacttcccctcccg

SEQ ID NO: 4494 - DNA, 36 bp, Homo sapiens
  source 1..36: mol_type = unassigned DNA
cgggaggggaagttgcagtgagccgaaagaaaaaaa

SEQ ID NO: 4495 - RNA, 51 nt, Homo sapiens
  source 1..51: mol_type = unassigned RNA
cccaggttgctgtcggcaggctgaagacactagaatcctgacctgtacatt

SEQ ID NO: 4496 - DNA, 51 bp, Homo sapiens
  source 1..51: mol_type = unassigned DNA
cccaggttgctgtcggcaggctgaagacactagaatcctgacctgtacatt

SEQ ID NO: 4497 - DNA, 51 bp, Homo sapiens
  source 1..51: mol_type = unassigned DNA
aatgtacaggtcaggattctagtgtcttcagcctgccgacagcaacctggg

SEQ ID NO: 4498 - RNA, 63 nt, Homo sapiens
  source 1..63: mol_type = unassigned RNA
tggaaatgaacaccaggactaacccaactgctgaatgatggctctgaagcagtctggatagtt

SEQ ID NO: 4499 - DNA, 63 bp, Homo sapiens
  source 1..63: mol_type = unassigned DNA
tggaaatgaacaccaggactaacccaactgctgaatgatggctctgaagcagtctggatagtt

SEQ ID NO: 4500 - DNA, 63 bp, Homo sapiens
  source 1..63: mol_type = unassigned DNA
aactatccagactgcttcagagccatcattcagcagttgggttagtcctggtgttcatttcca

SEQ ID NO: 4501 - RNA, 155 nt, Homo sapiens
  source 1..155: mol_type = unassigned RNA
gattttaccataaactcaccccagaaaagtccatccccaattcccaaaccctggaccctgctcacatgccggcacatctccttgccctccctcagtttgtggtgacaggagcagctgggaggagtgtttccgtttactgctggaacagcctttag

SEQ ID NO: 4502 - DNA, 155 bp, Homo sapiens
  source 1..155: mol_type = unassigned DNA
gattttaccataaactcaccccagaaaagtccatccccaattcccaaaccctggaccctgctcacatgccggcacatctccttgccctccctcagtttgtggtgacaggagcagctgggaggagtgtttccgtttactgctggaacagcctttag

SEQ ID NO: 4503 - DNA, 155 bp, Homo sapiens
  source 1..155: mol_type = unassigned DNA
ctaaaggctgttccagcagtaaacggaaacactcctcccagctgctcctgtcaccacaaactgagggagggcaaggagatgtgccggcatgtgagcagggtccagggtttgggaattggggatggacttttctggggtgagtttatggtaaaatc

SEQ ID NO: 4504 - RNA, 34 nt, Homo sapiens
  source 1..34: mol_type = unassigned RNA
tgttttttagaaacattggtctgttactacttaa

SEQ ID NO: 4505 - DNA, 34 bp, Homo sapiens
  source 1..34: mol_type = unassigned DNA
tgttttttagaaacattggtctgttactacttaa

SEQ ID NO: 4506 - DNA, 34 bp, Homo sapiens
  source 1..34: mol_type = unassigned DNA
ttaagtagtaacagaccaatgtttctaaaaaaca

SEQ ID NO: 4507 - RNA, 58 nt, Homo sapiens
  source 1..58: mol_type = unassigned RNA
aggggatcacagaaaacttggctgagcaggtgatgttgagcaggactgaaggcagtga

SEQ ID NO: 4508 - DNA, 58 bp, Homo sapiens
  source 1..58: mol_type = unassigned DNA
aggggatcacagaaaacttggctgagcaggtgatgttgagcaggactgaaggcagtga

SEQ ID NO: 4509 - DNA, 58 bp, Homo sapiens
  source 1..58: mol_type = unassigned DNA
tcactgccttcagtcctgctcaacatcacctgctcagccaagttttctgtgatcccct

SEQ ID NO: 4510 - RNA, 30 nt, Homo sapiens
  source 1..30: mol_type = unassigned RNA
gcatgtgcggattggcaggattgtgtgagc

SEQ ID NO: 4511 - DNA, 30 bp, Homo sapiens
  source 1..30: mol_type = unassigned DNA
gcatgtgcggattggcaggattgtgtgagc

SEQ ID NO: 4512 - DNA, 30 bp, Homo sapiens
  source 1..30: mol_type = unassigned DNA
gctcacacaatcctgccaatccgcacatgc

SEQ ID NO: 4513 - RNA, 27 nt, Homo sapiens
  source 1..27: mol_type = unassigned RNA
gtctccttgctctccccacctttgttg

SEQ ID NO: 4514 - DNA, 27 bp, Homo sapiens
  source 1..27: mol_type = unassigned DNA
gtctccttgctctccccacctttgttg

SEQ ID NO: 4515 - DNA, 27 bp, Homo sapiens
  source 1..27: mol_type = unassigned DNA
caacaaaggtggggagagcaaggagac

SEQ ID NO: 4516 - RNA, 54 nt, Homo sapiens
  source 1..54: mol_type = unassigned RNA
aataatggcaaaactgtggttttgcaatggtctgaccccacatcaccgttcact

SEQ ID NO: 4517 - DNA, 54 bp, Homo sapiens
  source 1..54: mol_type = unassigned DNA
aataatggcaaaactgtggttttgcaatggtctgaccccacatcaccgttcact

SEQ ID NO: 4518 - DNA, 54 bp, Homo sapiens
  source 1..54: mol_type = unassigned DNA
agtgaacggtgatgtggggtcagaccattgcaaaaccacagttttgccattatt

SEQ ID NO: 4519 - RNA, 24 nt, Homo sapiens
  source 1..24: mol_type = unassigned RNA
ttctgtatgaggttataaagttat

SEQ ID NO: 4520 - DNA, 24 bp, Homo sapiens
  source 1..24: mol_type = unassigned DNA
ttctgtatgaggttataaagttat

SEQ ID NO: 4521 - DNA, 24 bp, Homo sapiens
  source 1..24: mol_type = unassigned DNA
ataactttataacctcatacagaa

SEQ ID NO: 4522 - RNA, 62 nt, Homo sapiens
  source 1..62: mol_type = unassigned RNA
agctctgggagcttgagcaggttccttacttaagttccttgagtaacagtttcttgatcttt

SEQ ID NO: 4523 - DNA, 62 bp, Homo sapiens
  source 1..62: mol_type = unassigned DNA
agctctgggagcttgagcaggttccttacttaagttccttgagtaacagtttcttgatcttt

SEQ ID NO: 4524 - DNA, 62 bp, Homo sapiens
  source 1..62: mol_type = unassigned DNA
aaagatcaagaaactgttactcaaggaacttaagtaaggaacctgctcaagctcccagagct

SEQ ID NO: 4525 - RNA, 24 nt, Homo sapiens
  source 1..24: mol_type = unassigned RNA
ctattgcactagtccaggagaata

SEQ ID NO: 4526 - DNA, 24 bp, Homo sapiens
  source 1..24: mol_type = unassigned DNA
ctattgcactagtccaggagaata

SEQ ID NO: 4527 - DNA, 24 bp, Homo sapiens
  source 1..24: mol_type = unassigned DNA
tattctcctggactagtgcaatag

SEQ ID NO: 4528 - RNA, 32 nt, Homo sapiens
  source 1..32: mol_type = unassigned RNA
ctctcagaagtcccggtcccatgtagatagag

SEQ ID NO: 4529 - DNA, 32 bp, Homo sapiens
  source 1..32: mol_type = unassigned DNA
ctctcagaagtcccggtcccatgtagatagag

SEQ ID NO: 4530 - DNA, 32 bp, Homo sapiens
  source 1..32: mol_type = unassigned DNA
ctctatctacatgggaccgggacttctgagag

SEQ ID NO: 4531 - RNA, 29 nt, Homo sapiens
  source 1..29: mol_type = unassigned RNA
ggcatgttagaccagagcttcagggagcg

SEQ ID NO: 4532 - DNA, 29 bp, Homo sapiens
  source 1..29: mol_type = unassigned DNA
ggcatgttagaccagagcttcagggagcg

SEQ ID NO: 4533 - DNA, 29 bp, Homo sapiens
  source 1..29: mol_type = unassigned DNA
cgctccctgaagctctggtctaacatgcc

SEQ ID NO: 4534 - RNA, 32 nt, Homo sapiens
  source 1..32: mol_type = unassigned RNA
gcgctgcccggggtggctgcggccagagtctc

SEQ ID NO: 4535 - DNA, 32 bp, Homo sapiens
  source 1..32: mol_type = unassigned DNA
gcgctgcccggggtggctgcggccagagtctc

SEQ ID NO: 4536 - DNA, 32 bp, Homo sapiens
  source 1..32: mol_type = unassigned DNA
gagactctggccgcagccaccccgggcagcgc

SEQ ID NO: 4537 - RNA, 27 nt, Homo sapiens
  source 1..27: mol_type = unassigned RNA
cgccgctctgagctgcggtagcactcg

SEQ ID NO: 4538 - DNA, 27 bp, Homo sapiens
  source 1..27: mol_type = unassigned DNA
cgccgctctgagctgcggtagcactcg

SEQ ID NO: 4539 - DNA, 27 bp, Homo sapiens
  source 1..27: mol_type = unassigned DNA
cgagtgctaccgcagctcagagcggcg

SEQ ID NO: 4540 - RNA, 17 nt, Homo sapiens
  source 1..17: mol_type = unassigned RNA
actgtaaaagtaatggc

SEQ ID NO: 4541 - DNA, 17 bp, Homo sapiens
  source 1..17: mol_type = unassigned DNA
actgtaaaagtaatggc

SEQ ID NO: 4542 - DNA, 17 bp, Homo sapiens
  source 1..17: mol_type = unassigned DNA
gccattacttttacagt

SEQ ID NO: 4543 - RNA, 37 nt, Homo sapiens
  source 1..37: mol_type = unassigned RNA
aagcttttggccaaatgtcaggggtagaattgactca

SEQ ID NO: 4544 - DNA, 37 bp, Homo sapiens
  source 1..37: mol_type = unassigned DNA
aagcttttggccaaatgtcaggggtagaattgactca

SEQ ID NO: 4545 - DNA, 37 bp, Homo sapiens
  source 1..37: mol_type = unassigned DNA
tgagtcaattctacccctgacatttggccaaaagctt

SEQ ID NO: 4546 - RNA, 41 nt, Homo sapiens
  source 1..41: mol_type = unassigned RNA
cttacagactgttagaattcactgtgttcagaatggagctc

SEQ ID NO: 4547 - DNA, 41 bp, Homo sapiens
  source 1..41: mol_type = unassigned DNA
cttacagactgttagaattcactgtgttcagaatggagctc

SEQ ID NO: 4548 - DNA, 41 bp, Homo sapiens
  source 1..41: mol_type = unassigned DNA
gagctccattctgaacacagtgaattctaacagtctgtaag

SEQ ID NO: 4549 - RNA, 32 nt, Homo sapiens
  source 1..32: mol_type = unassigned RNA
ctcttccaggttgcagactgatgatgacttct

SEQ ID NO: 4550 - DNA, 32 bp, Homo sapiens
  source 1..32: mol_type = unassigned DNA
ctcttccaggttgcagactgatgatgacttct

SEQ ID NO: 4551 - DNA, 32 bp, Homo sapiens
  source 1..32: mol_type = unassigned DNA
agaagtcatcatcagtctgcaacctggaagag

SEQ ID NO: 4552 - RNA, 78 nt, Homo sapiens
  source 1..78: mol_type = unassigned RNA
tttcacaatgatgttaactgagtgttttgaattcattgcactacttactgaaaggggagcttcaatttcaagacatct

SEQ ID NO: 4553 - DNA, 78 bp, Homo sapiens
  source 1..78: mol_type = unassigned DNA
tttcacaatgatgttaactgagtgttttgaattcattgcactacttactgaaaggggagcttcaatttcaagacatct

SEQ ID NO: 4554 - DNA, 78 bp, Homo sapiens
  source 1..78: mol_type = unassigned DNA
agatgtcttgaaattgaagctcccctttcagtaagtagtgcaatgaattcaaaacactcagttaacatcattgtgaaa

SEQ ID NO: 4555 - RNA, 32 nt, Homo sapiens
  source 1..32: mol_type = unassigned RNA
gccgatatccagatcgtggtggacaagagccc

SEQ ID NO: 4556 - DNA, 32 bp, Homo sapiens
  source 1..32: mol_type = unassigned DNA
gccgatatccagatcgtggtggacaagagccc

SEQ ID NO: 4557 - DNA, 32 bp, Homo sapiens
  source 1..32: mol_type = unassigned DNA
gggctcttgtccaccacgatctggatatcggc

SEQ ID NO: 4558 - RNA, 132 nt, Homo sapiens
  source 1..132: mol_type = unassigned RNA
tgagacgtagctgccctgcctgtggggcgtccccactctgcaaggagcaggacttctgctgctgctctacacggccacttcagtaaaagtttctgtctaacaccaccgacatgcacttgaactctttcctgg

SEQ ID NO: 4559 - DNA, 132 bp, Homo sapiens
  source 1..132: mol_type = unassigned DNA
tgagacgtagctgccctgcctgtggggcgtccccactctgcaaggagcaggacttctgctgctgctctacacggccacttcagtaaaagtttctgtctaacaccaccgacatgcacttgaactctttcctgg

SEQ ID NO: 4560 - DNA, 132 bp, Homo sapiens
  source 1..132: mol_type = unassigned DNA
ccaggaaagagttcaagtgcatgtcggtggtgttagacagaaacttttactgaagtggccgtgtagagcagcagcagaagtcctgctccttgcagagtggggacgccccacaggcagggcagctacgtctca

SEQ ID NO: 4561 - RNA, 36 nt, Homo sapiens
  source 1..36: mol_type = unassigned RNA
gctctcaggtgcaggctgagggctggtctcttgggt

SEQ ID NO: 4562 - DNA, 36 bp, Homo sapiens
  source 1..36: mol_type = unassigned DNA
gctctcaggtgcaggctgagggctggtctcttgggt

SEQ ID NO: 4563 - DNA, 36 bp, Homo sapiens
  source 1..36: mol_type = unassigned DNA
acccaagagaccagccctcagcctgcacctgagagc

SEQ ID NO: 4564 - RNA, 28 nt, Homo sapiens
  source 1..28: mol_type = unassigned RNA
ggcctccggatcctggctgggagccatc

SEQ ID NO: 4565 - DNA, 28 bp, Homo sapiens
  source 1..28: mol_type = unassigned DNA
ggcctccggatcctggctgggagccatc

SEQ ID NO: 4566 - DNA, 28 bp, Homo sapiens
  source 1..28: mol_type = unassigned DNA
gatggctcccagccaggatccggaggcc

SEQ ID NO: 4567 - RNA, 54 nt, Homo sapiens
  source 1..54: mol_type = unassigned RNA
attgtgtctgtggggtctaggtctggccagacctcttggccataagcctgcctc

SEQ ID NO: 4568 - DNA, 54 bp, Homo sapiens
  source 1..54: mol_type = unassigned DNA
attgtgtctgtggggtctaggtctggccagacctcttggccataagcctgcctc

SEQ ID NO: 4569 - DNA, 54 bp, Homo sapiens
  source 1..54: mol_type = unassigned DNA
gaggcaggcttatggccaagaggtctggccagacctagaccccacagacacaat

SEQ ID NO: 4570 - RNA, 175 nt, Homo sapiens
  source 1..175: mol_type = unassigned RNA
ccaaaaggccgagaagccatcaaatgctatttttcttcatagtatttaccaaccagtgggtcaggttgccaagctgccactggttggcaaatgctatgaagaaaaatcgtttggagaagaagggaagggtgataggagtgtatatagcaaggcaggtgggaacaagaggaggggc

SEQ ID NO: 4571 - DNA, 175 bp, Homo sapiens
  source 1..175: mol_type = unassigned DNA
ccaaaaggccgagaagccatcaaatgctatttttcttcatagtatttaccaaccagtgggtcaggttgccaagctgccactggttggcaaatgctatgaagaaaaatcgtttggagaagaagggaagggtgataggagtgtatatagcaaggcaggtgggaacaagaggaggggc

SEQ ID NO: 4572 - DNA, 175 bp, Homo sapiens
  source 1..175: mol_type = unassigned DNA
gcccctcctcttgttcccacctgccttgctatatacactcctatcacccttcccttcttctccaaacgatttttcttcatagcatttgccaaccagtggcagcttggcaacctgacccactggttggtaaatactatgaagaaaaatagcatttgatggcttctcggccttttgg

SEQ ID NO: 4573 - RNA, 31 nt, Homo sapiens
  source 1..31: mol_type = unassigned RNA
ctcagtcaagtccccacacatcagcaatctc

SEQ ID NO: 4574 - DNA, 31 bp, Homo sapiens
  source 1..31: mol_type = unassigned DNA
ctcagtcaagtccccacacatcagcaatctc

SEQ ID NO: 4575 - DNA, 31 bp, Homo sapiens
  source 1..31: mol_type = unassigned DNA
gagattgctgatgtgtggggacttgactgag

SEQ ID NO: 4576 - RNA, 18 nt, Homo sapiens
  source 1..18: mol_type = unassigned RNA
actgtaaaagtaatggca

SEQ ID NO: 4577 - DNA, 18 bp, Homo sapiens
  source 1..18: mol_type = unassigned DNA
actgtaaaagtaatggca

SEQ ID NO: 4578 - DNA, 18 bp, Homo sapiens
  source 1..18: mol_type = unassigned DNA
tgccattacttttacagt

SEQ ID NO: 4579 - RNA, 44 nt, Homo sapiens
  source 1..44: mol_type = unassigned RNA
taatacactgttataattcactggagcacgtccctgttttgtgc

SEQ ID NO: 4580 - DNA, 44 bp, Homo sapiens
  source 1..44: mol_type = unassigned DNA
taatacactgttataattcactggagcacgtccctgttttgtgc

SEQ ID NO: 4581 - DNA, 44 bp, Homo sapiens
  source 1..44: mol_type = unassigned DNA
gcacaaaacagggacgtgctccagtgaattataacagtgtatta

SEQ ID NO: 4582 - RNA, 24 nt, Homo sapiens
  source 1..24: mol_type = unassigned RNA
ttagttattaatttgagtggtttt

SEQ ID NO: 4583 - DNA, 24 bp, Homo sapiens
  source 1..24: mol_type = unassigned DNA
ttagttattaatttgagtggtttt

SEQ ID NO: 4584 - DNA, 24 bp, Homo sapiens
  source 1..24: mol_type = unassigned DNA
aaaaccactcaaattaataactaa

SEQ ID NO: 4585 - RNA, 30 nt, Homo sapiens
  source 1..30: mol_type = unassigned RNA
gttctctgtaagttccaagggagaccttgg

SEQ ID NO: 4586 - DNA, 30 bp, Homo sapiens
  source 1..30: mol_type = unassigned DNA
gttctctgtaagttccaagggagaccttgg

SEQ ID NO: 4587 - DNA, 30 bp, Homo sapiens
  source 1..30: mol_type = unassigned DNA
ccaaggtctcccttggaacttacagagaac

SEQ ID NO: 4588 - RNA, 38 nt, Homo sapiens
  source 1..38: mol_type = unassigned RNA
attttcagtgggagaagtcacattttagactgtggtgt

SEQ ID NO: 4589 - DNA, 38 bp, Homo sapiens
  source 1..38: mol_type = unassigned DNA
attttcagtgggagaagtcacattttagactgtggtgt

SEQ ID NO: 4590 - DNA, 38 bp, Homo sapiens
  source 1..38: mol_type = unassigned DNA
acaccacagtctaaaatgtgacttctcccactgaaaat

SEQ ID NO: 4591 - RNA, 39 nt, Homo sapiens
  source 1..39: mol_type = unassigned RNA
taaggaggatgatgaacttgaatttgcactgactttccc

SEQ ID NO: 4592 - DNA, 39 bp, Homo sapiens
  source 1..39: mol_type = unassigned DNA
taaggaggatgatgaacttgaatttgcactgactttccc

SEQ ID NO: 4593 - DNA, 39 bp, Homo sapiens
  source 1..39: mol_type = unassigned DNA
gggaaagtcagtgcaaattcaagttcatcatcctcctta

SEQ ID NO: 4594 - RNA, 31 nt, Homo sapiens
  source 1..31: mol_type = unassigned RNA
gtctggttttgaatggtcgtcaaagaaagtt

SEQ ID NO: 4595 - DNA, 31 bp, Homo sapiens
  source 1..31: mol_type = unassigned DNA
gtctggttttgaatggtcgtcaaagaaagtt

SEQ ID NO: 4596 - DNA, 31 bp, Homo sapiens
  source 1..31: mol_type = unassigned DNA
aactttctttgacgaccattcaaaaccagac

SEQ ID NO: 4597 - RNA, 25 nt, Homo sapiens
  source 1..25: mol_type = unassigned RNA
aatattccactgttagaatacacca

SEQ ID NO: 4598 - DNA, 25 bp, Homo sapiens
  source 1..25: mol_type = unassigned DNA
aatattccactgttagaatacacca

SEQ ID NO: 4599 - DNA, 25 bp, Homo sapiens
  source 1..25: mol_type = unassigned DNA
tggtgtattctaacagtggaatatt

SEQ ID NO: 4600 - RNA, 178 nt, Homo sapiens
  source 1..178: mol_type = unassigned RNA
ttttaaccaatctaatggatgttcttttggtattttggtcagagaggagtgataattaaaggtttagaagaaattacagtacacaacaaggatgaagtctatcaaattttagaaaagggggcagcaaaaaggacaactgcagctactctgatgaatgcatactctaggtaagaaagcc

SEQ ID NO: 4601 - DNA, 178 bp, Homo sapiens
  source 1..178: mol_type = unassigned DNA
ttttaaccaatctaatggatgttcttttggtattttggtcagagaggagtgataattaaaggtttagaagaaattacagtacacaacaaggatgaagtctatcaaattttagaaaagggggcagcaaaaaggacaactgcagctactctgatgaatgcatactctaggtaagaaagcc

SEQ ID NO: 4602 - DNA, 178 bp, Homo sapiens
  source 1..178: mol_type = unassigned DNA
ggctttcttacctagagtatgcattcatcagagtagctgcagttgtcctttttgctgcccccttttctaaaatttgatagacttcatccttgttgtgtactgtaatttcttctaaacctttaattatcactcctctctgaccaaaataccaaaagaacatccattagattggttaaaa

SEQ ID NO: 4603 - RNA, 52 nt, Homo sapiens
  source 1..52: mol_type = unassigned RNA
gccaatgctgttcttacaggtagataacaattggtggaaggagtagaaattg

SEQ ID NO: 4604 - DNA, 52 bp, Homo sapiens
  source 1..52: mol_type = unassigned DNA
gccaatgctgttcttacaggtagataacaattggtggaaggagtagaaattg

SEQ ID NO: 4605 - DNA, 52 bp, Homo sapiens
  source 1..52: mol_type = unassigned DNA
caatttctactccttccaccaattgttatctacctgtaagaacagcattggc

SEQ ID NO: 4606 - RNA, 157 nt, Homo sapiens
  source 1..157: mol_type = unassigned RNA
cagtattggctgaaatgaactgtgggtttaccttaagttacggattctccagtggttaaacaaccaggaagagaatgaacagaatgaacagaaagcgacactgctaggccaggtgaggcagaatagtctggaggcagggaacctaaggccgattcac

SEQ ID NO: 4607 - DNA, 157 bp, Homo sapiens
  source 1..157: mol_type = unassigned DNA
cagtattggctgaaatgaactgtgggtttaccttaagttacggattctccagtggttaaacaaccaggaagagaatgaacagaatgaacagaaagcgacactgctaggccaggtgaggcagaatagtctggaggcagggaacctaaggccgattcac

SEQ ID NO: 4608 - DNA, 157 bp, Homo sapiens
  source 1..157: mol_type = unassigned DNA
gtgaatcggccttaggttccctgcctccagactattctgcctcacctggcctagcagtgtcgctttctgttcattctgttcattctcttcctggttgtttaaccactggagaatccgtaacttaaggtaaacccacagttcatttcagccaatactg

SEQ ID NO: 4609 - RNA, 28 nt, Homo sapiens
  source 1..28: mol_type = unassigned RNA
tctgcataggccatgtagaactcacagg

SEQ ID NO: 4610 - DNA, 28 bp, Homo sapiens
  source 1..28: mol_type = unassigned DNA
tctgcataggccatgtagaactcacagg

SEQ ID NO: 4611 - DNA, 28 bp, Homo sapiens
  source 1..28: mol_type = unassigned DNA
cctgtgagttctacatggcctatgcaga

SEQ ID NO: 4612 - RNA, 60 nt, Homo sapiens
  source 1..60: mol_type = unassigned RNA
aaattaaggactggttttgcagtggttgaacccatgtgttctcctacagaactttataat

SEQ ID NO: 4613 - DNA, 60 bp, Homo sapiens
  source 1..60: mol_type = unassigned DNA
aaattaaggactggttttgcagtggttgaacccatgtgttctcctacagaactttataat

SEQ ID NO: 4614 - DNA, 60 bp, Homo sapiens
  source 1..60: mol_type = unassigned DNA
attataaagttctgtaggagaacacatgggttcaaccactgcaaaaccagtccttaattt

SEQ ID NO: 4615 - RNA, 32 nt, Homo sapiens
  source 1..32: mol_type = unassigned RNA
tgtccatcgtcctgaaactcttttcaacatct

SEQ ID NO: 4616 - DNA, 32 bp, Homo sapiens
  source 1..32: mol_type = unassigned DNA
tgtccatcgtcctgaaactcttttcaacatct

SEQ ID NO: 4617 - DNA, 32 bp, Homo sapiens
  source 1..32: mol_type = unassigned DNA
agatgttgaaaagagtttcaggacgatggaca

SEQ ID NO: 4618 - RNA, 42 nt, Homo sapiens
  source 1..42: mol_type = unassigned RNA
agcaagactgtgagctataaactgtttaggttgtatggttct

SEQ ID NO: 4619 - DNA, 42 bp, Homo sapiens
  source 1..42: mol_type = unassigned DNA
agcaagactgtgagctataaactgtttaggttgtatggttct

SEQ ID NO: 4620 - DNA, 42 bp, Homo sapiens
  source 1..42: mol_type = unassigned DNA
agaaccatacaacctaaacagtttatagctcacagtcttgct

SEQ ID NO: 4621 - RNA, 85 nt, Homo sapiens
  source 1..85: mol_type = unassigned RNA
caaaaaaatgtccctgtctgacagctttgaagagagtggtggttctcccagcacacagactgagatctgagaatggacagactgc

SEQ ID NO: 4622 - DNA, 85 bp, Homo sapiens
  source 1..85: mol_type = unassigned DNA
caaaaaaatgtccctgtctgacagctttgaagagagtggtggttctcccagcacacagactgagatctgagaatggacagactgc

SEQ ID NO: 4623 - DNA, 85 bp, Homo sapiens
  source 1..85: mol_type = unassigned DNA
gcagtctgtccattctcagatctcagtctgtgtgctgggagaaccaccactctcttcaaagctgtcagacagggacatttttttg

SEQ ID NO: 4624 - RNA, 37 nt, Homo sapiens
  source 1..37: mol_type = unassigned RNA
ctttagatcgggccggtgtcggggcatgtaggccagt

SEQ ID NO: 4625 - DNA, 37 bp, Homo sapiens
  source 1..37: mol_type = unassigned DNA
ctttagatcgggccggtgtcggggcatgtaggccagt

SEQ ID NO: 4626 - DNA, 37 bp, Homo sapiens
  source 1..37: mol_type = unassigned DNA
actggcctacatgccccgacaccggcccgatctaaag

SEQ ID NO: 4627 - RNA, 142 nt, Homo sapiens
  source 1..142: mol_type = unassigned RNA
tagcaagtaattaatttcctctccaacaggctgtaaagttgatcttggaggttttgctggtctttttgatttaaaagcagctggtttcaaagatccccttctggcctctggaacagatggcgttggaactaaactaaaggta

SEQ ID NO: 4628 - DNA, 142 bp, Homo sapiens
  source 1..142: mol_type = unassigned DNA
tagcaagtaattaatttcctctccaacaggctgtaaagttgatcttggaggttttgctggtctttttgatttaaaagcagctggtttcaaagatccccttctggcctctggaacagatggcgttggaactaaactaaaggta

SEQ ID NO: 4629 - DNA, 142 bp, Homo sapiens
  source 1..142: mol_type = unassigned DNA
tacctttagtttagttccaacgccatctgttccagaggccagaaggggatctttgaaaccagctgcttttaaatcaaaaagaccagcaaaacctccaagatcaactttacagcctgttggagaggaaattaattacttgcta

SEQ ID NO: 4630 - RNA, 32 nt, Homo sapiens
  source 1..32: mol_type = unassigned RNA
agatcacttccgaaccaagtctgagatggagc

SEQ ID NO: 4631 - DNA, 32 bp, Homo sapiens
  source 1..32: mol_type = unassigned DNA
agatcacttccgaaccaagtctgagatggagc

SEQ ID NO: 4632 - DNA, 32 bp, Homo sapiens
  source 1..32: mol_type = unassigned DNA
gctccatctcagacttggttcggaagtgatct

SEQ ID NO: 4633 - RNA, 25 nt, Homo sapiens
  source 1..25: mol_type = unassigned RNA
ttttgtcattccacagcagtctgct

SEQ ID NO: 4634 - DNA, 25 bp, Homo sapiens
  source 1..25: mol_type = unassigned DNA
ttttgtcattccacagcagtctgct

SEQ ID NO: 4635 - DNA, 25 bp, Homo sapiens
  source 1..25: mol_type = unassigned DNA
agcagactgctgtggaatgacaaaa

SEQ ID NO: 4636 - RNA, 40 nt, Homo sapiens
  source 1..40: mol_type = unassigned RNA
ggtcctgctggtcctccaggtgaagcaggcaaacctggtg

SEQ ID NO: 4637 - DNA, 40 bp, Homo sapiens
  source 1..40: mol_type = unassigned DNA
ggtcctgctggtcctccaggtgaagcaggcaaacctggtg

SEQ ID NO: 4638 - DNA, 40 bp, Homo sapiens
  source 1..40: mol_type = unassigned DNA
caccaggtttgcctgcttcacctggaggaccagcaggacc

SEQ ID NO: 4639 - RNA, 31 nt, Homo sapiens
  source 1..31: mol_type = unassigned RNA
tttgaggagtgcaatgttggccagatcaaaa

SEQ ID NO: 4640 - DNA, 31 bp, Homo sapiens
  source 1..31: mol_type = unassigned DNA
tttgaggagtgcaatgttggccagatcaaaa

SEQ ID NO: 4641 - DNA, 31 bp, Homo sapiens
  source 1..31: mol_type = unassigned DNA
ttttgatctggccaacattgcactcctcaaa

SEQ ID NO: 4642 - RNA, 32 nt, Homo sapiens
  source 1..32: mol_type = unassigned RNA
gtcaacatggtccccttcccacgtctccattt

SEQ ID NO: 4643 - DNA, 32 bp, Homo sapiens
  source 1..32: mol_type = unassigned DNA
gtcaacatggtccccttcccacgtctccattt

SEQ ID NO: 4644 - DNA, 32 bp, Homo sapiens
  source 1..32: mol_type = unassigned DNA
aaatggagacgtgggaaggggaccatgttgac

SEQ ID NO: 4645 - RNA, 80 nt, Homo sapiens
  source 1..80: mol_type = unassigned RNA
caggggcacgccgggagttgaagtcctctctcagagggcggaggggatcgcccacctcacgtggctgctggactgatgcc

SEQ ID NO: 4646 - DNA, 80 bp, Homo sapiens
  source 1..80: mol_type = unassigned DNA
caggggcacgccgggagttgaagtcctctctcagagggcggaggggatcgcccacctcacgtggctgctggactgatgcc

SEQ ID NO: 4647 - DNA, 80 bp, Homo sapiens
  source 1..80: mol_type = unassigned DNA
ggcatcagtccagcagccacgtgaggtgggcgatcccctccgccctctgagagaggacttcaactcccggcgtgcccctg

SEQ ID NO: 4648 - RNA, 30 nt, Homo sapiens
  source 1..30: mol_type = unassigned RNA
ccaaacacatacaggaaggtagaaatatct

SEQ ID NO: 4649 - DNA, 30 bp, Homo sapiens
  source 1..30: mol_type = unassigned DNA
ccaaacacatacaggaaggtagaaatatct

SEQ ID NO: 4650 - DNA, 30 bp, Homo sapiens
  source 1..30: mol_type = unassigned DNA
agatatttctaccttcctgtatgtgtttgg

SEQ ID NO: 4651 - RNA, 51 nt, Homo sapiens
  source 1..51: mol_type = unassigned RNA
gtaccctgccaatctatggctctgtagaactcaaaagaggctggaggaggc

SEQ ID NO: 4652 - DNA, 51 bp, Homo sapiens
  source 1..51: mol_type = unassigned DNA
gtaccctgccaatctatggctctgtagaactcaaaagaggctggaggaggc

SEQ ID NO: 4653 - DNA, 51 bp, Homo sapiens
  source 1..51: mol_type = unassigned DNA
gcctcctccagcctcttttgagttctacagagccatagattggcagggtac

SEQ ID NO: 4654 - RNA, 162 nt, Homo sapiens
  source 1..162: mol_type = unassigned RNA
aagttgctttatagaatctgttgaaaccttaatgactgtggacttcttctgtcagcaaaaccaaatccaacctacaggatgcacctgagcctgactgcaaaatcttttccaagtctggctagagttgtgggaaaccacaggtactgtaaatccttgaagggg

SEQ ID NO: 4655 - DNA, 162 bp, Homo sapiens
  source 1..162: mol_type = unassigned DNA
aagttgctttatagaatctgttgaaaccttaatgactgtggacttcttctgtcagcaaaaccaaatccaacctacaggatgcacctgagcctgactgcaaaatcttttccaagtctggctagagttgtgggaaaccacaggtactgtaaatccttgaagggg

SEQ ID NO: 4656 - DNA, 162 bp, Homo sapiens
  source 1..162: mol_type = unassigned DNA
ccccttcaaggatttacagtacctgtggtttcccacaactctagccagacttggaaaagattttgcagtcaggctcaggtgcatcctgtaggttggatttggttttgctgacagaagaagtccacagtcattaaggtttcaacagattctataaagcaactt

SEQ ID NO: 4657 - RNA, 78 nt, Homo sapiens
  source 1..78: mol_type = unassigned RNA
tgaggcctggcaaggttgataacccgcaccttgccaagtgcttctcacagctcatcgcattcttgcctgaccttcagc

SEQ ID NO: 4658 - DNA, 78 bp, Homo sapiens
  source 1..78: mol_type = unassigned DNA
tgaggcctggcaaggttgataacccgcaccttgccaagtgcttctcacagctcatcgcattcttgcctgaccttcagc

SEQ ID NO: 4659 - DNA, 78 bp, Homo sapiens
  source 1..78: mol_type = unassigned DNA
gctgaaggtcaggcaagaatgcgatgagctgtgagaagcacttggcaaggtgcgggttatcaaccttgccaggcctca

SEQ ID NO: 4660 - RNA, 25 nt, Homo sapiens
  source 1..25: mol_type = unassigned RNA
gtctgtcactggtataattaacacc

SEQ ID NO: 4661 - DNA, 25 bp, Homo sapiens
  source 1..25: mol_type = unassigned DNA
gtctgtcactggtataattaacacc

SEQ ID NO: 4662 - DNA, 25 bp, Homo sapiens
  source 1..25: mol_type = unassigned DNA
ggtgttaattataccagtgacagac

SEQ ID NO: 4663 - RNA, 137 nt, Homo sapiens
  source 1..137: mol_type = unassigned RNA
gcagccgctggctgggccagtcctcctccttcaggcaaagccagccaactgtatgttccctttcaagacagaagggcctcccaggcagcctgaatgggctgccgggagttcccttcaagccacaacttcgaacttat

SEQ ID NO: 4664 - DNA, 137 bp, Homo sapiens
  source 1..137: mol_type = unassigned DNA
gcagccgctggctgggccagtcctcctccttcaggcaaagccagccaactgtatgttccctttcaagacagaagggcctcccaggcagcctgaatgggctgccgggagttcccttcaagccacaacttcgaacttat

SEQ ID NO: 4665 - DNA, 137 bp, Homo sapiens
  source 1..137: mol_type = unassigned DNA
ataagttcgaagttgtggcttgaagggaactcccggcagcccattcaggctgcctgggaggcccttctgtcttgaaagggaacatacagttggctggctttgcctgaaggaggaggactggcccagccagcggctgc

SEQ ID NO: 4666 - RNA, 30 nt, Homo sapiens
  source 1..30: mol_type = unassigned RNA
gggcccaagcgggctgtggacctcatccag

SEQ ID NO: 4667 - DNA, 30 bp, Homo sapiens
  source 1..30: mol_type = unassigned DNA
gggcccaagcgggctgtggacctcatccag

SEQ ID NO: 4668 - DNA, 30 bp, Homo sapiens
  source 1..30: mol_type = unassigned DNA
ctggatgaggtccacagcccgcttgggccc

SEQ ID NO: 4669 - RNA, 24 nt, Homo sapiens
  source 1..24: mol_type = unassigned RNA
aactctgtgtaccctaatttgttt

SEQ ID NO: 4670 - DNA, 24 bp, Homo sapiens
  source 1..24: mol_type = unassigned DNA
aactctgtgtaccctaatttgttt

SEQ ID NO: 4671 - DNA, 24 bp, Homo sapiens
  source 1..24: mol_type = unassigned DNA
aaacaaattagggtacacagagtt

SEQ ID NO: 4672 - RNA, 36 nt, Homo sapiens
  source 1..36: mol_type = unassigned RNA
ataaagtcaagtgaccagcctctgactgtgcctgta

SEQ ID NO: 4673 - DNA, 36 bp, Homo sapiens
  source 1..36: mol_type = unassigned DNA
ataaagtcaagtgaccagcctctgactgtgcctgta

SEQ ID NO: 4674 - DNA, 36 bp, Homo sapiens
  source 1..36: mol_type = unassigned DNA
tacaggcacagtcagaggctggtcacttgactttat

SEQ ID NO: 4675 - RNA, 27 nt, Homo sapiens
  source 1..27: mol_type = unassigned RNA
caacactagacgatgggcatggaaaca

SEQ ID NO: 4676 - DNA, 27 bp, Homo sapiens
  source 1..27: mol_type = unassigned DNA
caacactagacgatgggcatggaaaca

SEQ ID NO: 4677 - DNA, 27 bp, Homo sapiens
  source 1..27: mol_type = unassigned DNA
tgtttccatgcccatcgtctagtgttg

SEQ ID NO: 4678 - RNA, 30 nt, Homo sapiens
  source 1..30: mol_type = unassigned RNA
gtcatgtattatgttgtatatttattatgt

SEQ ID NO: 4679 - DNA, 30 bp, Homo sapiens
  source 1..30: mol_type = unassigned DNA
gtcatgtattatgttgtatatttattatgt

SEQ ID NO: 4680 - DNA, 30 bp, Homo sapiens
  source 1..30: mol_type = unassigned DNA
acataataaatatacaacataatacatgac

SEQ ID NO: 4681 - RNA, 32 nt, Homo sapiens
  source 1..32: mol_type = unassigned RNA
cagccctcacaggccctggggtcgccgcacct

SEQ ID NO: 4682 - DNA, 32 bp, Homo sapiens
  source 1..32: mol_type = unassigned DNA
cagccctcacaggccctggggtcgccgcacct

SEQ ID NO: 4683 - DNA, 32 bp, Homo sapiens
  source 1..32: mol_type = unassigned DNA
aggtgcggcgaccccagggcctgtgagggctg

SEQ ID NO: 4684 - RNA, 31 nt, Homo sapiens
  source 1..31: mol_type = unassigned RNA
aacagcacccaggccagctcaaggacaacgt

SEQ ID NO: 4685 - DNA, 31 bp, Homo sapiens
  source 1..31: mol_type = unassigned DNA
aacagcacccaggccagctcaaggacaacgt

SEQ ID NO: 4686 - DNA, 31 bp, Homo sapiens
  source 1..31: mol_type = unassigned DNA
acgttgtccttgagctggcctgggtgctgtt

SEQ ID NO: 4687 - RNA, 31 nt, Homo sapiens
  source 1..31: mol_type = unassigned RNA
aatggttatgatgaaagctgaaattattatt

SEQ ID NO: 4688 - DNA, 31 bp, Homo sapiens
  source 1..31: mol_type = unassigned DNA
aatggttatgatgaaagctgaaattattatt

SEQ ID NO: 4689 - DNA, 31 bp, Homo sapiens
  source 1..31: mol_type = unassigned DNA
aataataatttcagctttcatcataaccatt

SEQ ID NO: 4690 - RNA, 26 nt, Homo sapiens
  source 1..26: mol_type = unassigned RNA
gcatggcacaggtggaattgactgcc

SEQ ID NO: 4691 - DNA, 26 bp, Homo sapiens
  source 1..26: mol_type = unassigned DNA
gcatggcacaggtggaattgactgcc

SEQ ID NO: 4692 - DNA, 26 bp, Homo sapiens
  source 1..26: mol_type = unassigned DNA
ggcagtcaattccacctgtgccatgc

SEQ ID NO: 4693 - RNA, 28 nt, Homo sapiens
  source 1..28: mol_type = unassigned RNA
attcgctatgaccacaggactgtgtcaa

SEQ ID NO: 4694 - DNA, 28 bp, Homo sapiens
  source 1..28: mol_type = unassigned DNA
attcgctatgaccacaggactgtgtcaa

SEQ ID NO: 4695 - DNA, 28 bp, Homo sapiens
  source 1..28: mol_type = unassigned DNA
ttgacacagtcctgtggtcatagcgaat

SEQ ID NO: 4696 - RNA, 35 nt, Homo sapiens
  source 1..35: mol_type = unassigned RNA
tgtttgtgtgtctgtgtgtgtgacagagaaagaga

SEQ ID NO: 4697 - DNA, 35 bp, Homo sapiens
  source 1..35: mol_type = unassigned DNA
tgtttgtgtgtctgtgtgtgtgacagagaaagaga

SEQ ID NO: 4698 - DNA, 35 bp, Homo sapiens
  source 1..35: mol_type = unassigned DNA
tctctttctctgtcacacacacagacacacaaaca

SEQ ID NO: 4699 - RNA, 30 nt, Homo sapiens
  source 1..30: mol_type = unassigned RNA
caggcgggcgactggaacttgggcacaagc

SEQ ID NO: 4700 - DNA, 30 bp, Homo sapiens
  source 1..30: mol_type = unassigned DNA
caggcgggcgactggaacttgggcacaagc

SEQ ID NO: 4701 - DNA, 30 bp, Homo sapiens
  source 1..30: mol_type = unassigned DNA
gcttgtgcccaagttccagtcgcccgcctg

SEQ ID NO: 4702 - RNA, 27 nt, Homo sapiens
  source 1..27: mol_type = unassigned RNA
acgctagtcctttggccagagggcgga

SEQ ID NO: 4703 - DNA, 27 bp, Homo sapiens
  source 1..27: mol_type = unassigned DNA
acgctagtcctttggccagagggcgga

SEQ ID NO: 4704 - DNA, 27 bp, Homo sapiens
  source 1..27: mol_type = unassigned DNA
tccgccctctggccaaaggactagcgt

SEQ ID NO: 4705 - RNA, 30 nt, Homo sapiens
  source 1..30: mol_type = unassigned RNA
tacagcttgtctttgtaggattttataggg

SEQ ID NO: 4706 - DNA, 30 bp, Homo sapiens
  source 1..30: mol_type = unassigned DNA
tacagcttgtctttgtaggattttataggg

SEQ ID NO: 4707 - DNA, 30 bp, Homo sapiens
  source 1..30: mol_type = unassigned DNA
ccctataaaatcctacaaagacaagctgta

SEQ ID NO: 4708 - RNA, 107 nt, Homo sapiens
  source 1..107: mol_type = unassigned RNA
aaaagaatctggaattgatcaatataaacagcccctaaattatctcgttatcctttaggacaattggcaagagttttaataaggcatgccaggctctaactacaaag

SEQ ID NO: 4709 - DNA, 107 bp, Homo sapiens
  source 1..107: mol_type = unassigned DNA
aaaagaatctggaattgatcaatataaacagcccctaaattatctcgttatcctttaggacaattggcaagagttttaataaggcatgccaggctctaactacaaag

SEQ ID NO: 4710 - DNA, 107 bp, Homo sapiens
  source 1..107: mol_type = unassigned DNA
ctttgtagttagagcctggcatgccttattaaaactcttgccaattgtcctaaaggataacgagataatttaggggctgtttatattgatcaattccagattctttt

SEQ ID NO: 4711 - RNA, 31 nt, Homo sapiens
  source 1..31: mol_type = unassigned RNA
ttcttgattactcggatggaatggaagaaat

SEQ ID NO: 4712 - DNA, 31 bp, Homo sapiens
  source 1..31: mol_type = unassigned DNA
ttcttgattactcggatggaatggaagaaat

SEQ ID NO: 4713 - DNA, 31 bp, Homo sapiens
  source 1..31: mol_type = unassigned DNA
atttcttccattccatccgagtaatcaagaa

SEQ ID NO: 4714 - RNA, 24 nt, Homo sapiens
  source 1..24: mol_type = unassigned RNA
aagggaacaggtagaattgactta

SEQ ID NO: 4715 - DNA, 24 bp, Homo sapiens
  source 1..24: mol_type = unassigned DNA
aagggaacaggtagaattgactta

SEQ ID NO: 4716 - DNA, 24 bp, Homo sapiens
  source 1..24: mol_type = unassigned DNA
taagtcaattctacctgttccctt

SEQ ID NO: 4717 - RNA, 56 nt, Homo sapiens
  source 1..56: mol_type = unassigned RNA
taggaggattatggctgcctctgctgagtcatgcagattgtcaggaagtgtgagaa

SEQ ID NO: 4718 - DNA, 56 bp, Homo sapiens
  source 1..56: mol_type = unassigned DNA
taggaggattatggctgcctctgctgagtcatgcagattgtcaggaagtgtgagaa

SEQ ID NO: 4719 - DNA, 56 bp, Homo sapiens
  source 1..56: mol_type = unassigned DNA
ttctcacacttcctgacaatctgcatgactcagcagaggcagccataatcctccta

SEQ ID NO: 4720 - RNA, 33 nt, Homo sapiens
  source 1..33: mol_type = unassigned RNA
ctccttgttggaagaacatggacaaggtgggaa

SEQ ID NO: 4721 - DNA, 33 bp, Homo sapiens
  source 1..33: mol_type = unassigned DNA
ctccttgttggaagaacatggacaaggtgggaa

SEQ ID NO: 4722 - DNA, 33 bp, Homo sapiens
  source 1..33: mol_type = unassigned DNA
ttcccaccttgtccatgttcttccaacaaggag

SEQ ID NO: 4723 - RNA, 31 nt, Homo sapiens
  source 1..31: mol_type = unassigned RNA
tgctgagctcaggtcagaggactatgaactg

SEQ ID NO: 4724 - DNA, 31 bp, Homo sapiens
  source 1..31: mol_type = unassigned DNA
tgctgagctcaggtcagaggactatgaactg

SEQ ID NO: 4725 - DNA, 31 bp, Homo sapiens
  source 1..31: mol_type = unassigned DNA
cagttcatagtcctctgacctgagctcagca

SEQ ID NO: 4726 - RNA, 31 nt, Homo sapiens
  source 1..31: mol_type = unassigned RNA
cctccacgcaccacttcaaagccgttcatct

SEQ ID NO: 4727 - DNA, 31 bp, Homo sapiens
  source 1..31: mol_type = unassigned DNA
cctccacgcaccacttcaaagccgttcatct

SEQ ID NO: 4728 - DNA, 31 bp, Homo sapiens
  source 1..31: mol_type = unassigned DNA
agatgaacggctttgaagtggtgcgtggagg

SEQ ID NO: 4729 - RNA, 34 nt, Homo sapiens
  source 1..34: mol_type = unassigned RNA
gagcagcatctcaaggacacaggtactgttttgg

SEQ ID NO: 4730 - DNA, 34 bp, Homo sapiens
  source 1..34: mol_type = unassigned DNA
gagcagcatctcaaggacacaggtactgttttgg

SEQ ID NO: 4731 - DNA, 34 bp, Homo sapiens
  source 1..34: mol_type = unassigned DNA
ccaaaacagtacctgtgtccttgagatgctgctc

SEQ ID NO: 4732 - RNA, 31 nt, Homo sapiens
  source 1..31: mol_type = unassigned RNA
ttccggtgggtgaacagttcttgaccatgag

SEQ ID NO: 4733 - DNA, 31 bp, Homo sapiens
  source 1..31: mol_type = unassigned DNA
ttccggtgggtgaacagttcttgaccatgag

SEQ ID NO: 4734 - DNA, 31 bp, Homo sapiens
  source 1..31: mol_type = unassigned DNA
ctcatggtcaagaactgttcacccaccggaa

SEQ ID NO: 4735 - RNA, 46 nt, Homo sapiens
  source 1..46: mol_type = unassigned RNA
actgtgcttgtgacagggactgtatgatctgcaaaacctaaaatat

SEQ ID NO: 4736 - DNA, 46 bp, Homo sapiens
  source 1..46: mol_type = unassigned DNA
actgtgcttgtgacagggactgtatgatctgcaaaacctaaaatat

SEQ ID NO: 4737 - DNA, 46 bp, Homo sapiens
  source 1..46: mol_type = unassigned DNA
atattttaggttttgcagatcatacagtccctgtcacaagcacagt

SEQ ID NO: 4738 - RNA, 47 nt, Homo sapiens
  source 1..47: mol_type = unassigned RNA
tttcctgacagtgactgggaagaccgtgcgcttgctctgaagccttg

SEQ ID NO: 4739 - DNA, 47 bp, Homo sapiens
  source 1..47: mol_type = unassigned DNA
tttcctgacagtgactgggaagaccgtgcgcttgctctgaagccttg

SEQ ID NO: 4740 - DNA, 47 bp, Homo sapiens
  source 1..47: mol_type = unassigned DNA
caaggcttcagagcaagcgcacggtcttcccagtcactgtcaggaaa

SEQ ID NO: 4741 - RNA, 31 nt, Homo sapiens
  source 1..31: mol_type = unassigned RNA
gaggccacggccgactgagaggcgggtgcgc

SEQ ID NO: 4742 - DNA, 31 bp, Homo sapiens
  source 1..31: mol_type = unassigned DNA
gaggccacggccgactgagaggcgggtgcgc

SEQ ID NO: 4743 - DNA, 31 bp, Homo sapiens
  source 1..31: mol_type = unassigned DNA
gcgcacccgcctctcagtcggccgtggcctc

SEQ ID NO: 4744 - RNA, 161 nt, Homo sapiens
  source 1..161: mol_type = unassigned RNA
cactagaaataacaagagccaagtaatttggtttttttcctctggcagtggctattttcaatggacaccagaactctaccttttatgtaaaatccagccttagtccagatgaccagtttttagtcagtggctcaagtgatgaagctgcctacatatggaag

SEQ ID NO: 4745 - DNA, 161 bp, Homo sapiens
  source 1..161: mol_type = unassigned DNA
cactagaaataacaagagccaagtaatttggtttttttcctctggcagtggctattttcaatggacaccagaactctaccttttatgtaaaatccagccttagtccagatgaccagtttttagtcagtggctcaagtgatgaagctgcctacatatggaag

SEQ ID NO: 4746 - DNA, 161 bp, Homo sapiens
  source 1..161: mol_type = unassigned DNA
cttccatatgtaggcagcttcatcacttgagccactgactaaaaactggtcatctggactaaggctggattttacataaaaggtagagttctggtgtccattgaaaatagccactgccagaggaaaaaaaccaaattacttggctcttgttatttctagtg

SEQ ID NO: 4747 - RNA, 49 nt, Homo sapiens
  source 1..49: mol_type = unassigned RNA
aacataaccttgagcagatccttgcccaacataaccttgagcagtaacc

SEQ ID NO: 4748 - DNA, 49 bp, Homo sapiens
  source 1..49: mol_type = unassigned DNA
aacataaccttgagcagatccttgcccaacataaccttgagcagtaacc

SEQ ID NO: 4749 - DNA, 49 bp, Homo sapiens
  source 1..49: mol_type = unassigned DNA
ggttactgctcaaggttatgttgggcaaggatctgctcaaggttatgtt

SEQ ID NO: 4750 - RNA, 35 nt, Homo sapiens
  source 1..35: mol_type = unassigned RNA
cccaatatccaggccgtgctgctgcctaagaaaac

SEQ ID NO: 4751 - DNA, 35 bp, Homo sapiens
  source 1..35: mol_type = unassigned DNA
cccaatatccaggccgtgctgctgcctaagaaaac

SEQ ID NO: 4752 - DNA, 35 bp, Homo sapiens
  source 1..35: mol_type = unassigned DNA
gttttcttaggcagcagcacggcctggatattggg

SEQ ID NO: 4753 - RNA, 29 nt, Homo sapiens
  source 1..29: mol_type = unassigned RNA
gggtctttgtgaagctggactctggcacc

SEQ ID NO: 4754 - DNA, 29 bp, Homo sapiens
  source 1..29: mol_type = unassigned DNA
gggtctttgtgaagctggactctggcacc

SEQ ID NO: 4755 - DNA, 29 bp, Homo sapiens
  source 1..29: mol_type = unassigned DNA
ggtgccagagtccagcttcacaaagaccc

SEQ ID NO: 4756 - RNA, 140 nt, Homo sapiens
  source 1..140: mol_type = unassigned RNA
cttcctcatttagctttccaagctgccattggaacaatttgccagctgttcctctgcatgcacaataaactcttaaaactttaactggaggggactgttaacttttgacaaaatccaaaatgccgcttcacaatcacgtg

SEQ ID NO: 4757 - DNA, 140 bp, Homo sapiens
  source 1..140: mol_type = unassigned DNA
cttcctcatttagctttccaagctgccattggaacaatttgccagctgttcctctgcatgcacaataaactcttaaaactttaactggaggggactgttaacttttgacaaaatccaaaatgccgcttcacaatcacgtg

SEQ ID NO: 4758 - DNA, 140 bp, Homo sapiens
  source 1..140: mol_type = unassigned DNA
cacgtgattgtgaagcggcattttggattttgtcaaaagttaacagtcccctccagttaaagttttaagagtttattgtgcatgcagaggaacagctggcaaattgttccaatggcagcttggaaagctaaatgaggaag

SEQ ID NO: 4759 - RNA, 56 nt, Homo sapiens
  source 1..56: mol_type = unassigned RNA
agcttccacctttgatcccggctggtcttttgctgtgatggatgactgatgacaat

SEQ ID NO: 4760 - DNA, 56 bp, Homo sapiens
  source 1..56: mol_type = unassigned DNA
agcttccacctttgatcccggctggtcttttgctgtgatggatgactgatgacaat

SEQ ID NO: 4761 - DNA, 56 bp, Homo sapiens
  source 1..56: mol_type = unassigned DNA
attgtcatcagtcatccatcacagcaaaagaccagccgggatcaaaggtggaagct

SEQ ID NO: 4762 - RNA, 24 nt, Homo sapiens
  source 1..24: mol_type = unassigned RNA
tatgtgactggtatatttcactta

SEQ ID NO: 4763 - DNA, 24 bp, Homo sapiens
  source 1..24: mol_type = unassigned DNA
tatgtgactggtatatttcactta

SEQ ID NO: 4764 - DNA, 24 bp, Homo sapiens
  source 1..24: mol_type = unassigned DNA
taagtgaaatataccagtcacata

SEQ ID NO: 4765 - RNA, 107 nt, Homo sapiens
  source 1..107: mol_type = unassigned RNA
caattaaacactgagcttctgaacagacacgtctgatcacagaagccctctgtgccgccagatgttcattttcagtcactttccactcagcagcactgttcatagaa

SEQ ID NO: 4766 - DNA, 107 bp, Homo sapiens
  source 1..107: mol_type = unassigned DNA
caattaaacactgagcttctgaacagacacgtctgatcacagaagccctctgtgccgccagatgttcattttcagtcactttccactcagcagcactgttcatagaa

SEQ ID NO: 4767 - DNA, 107 bp, Homo sapiens
  source 1..107: mol_type = unassigned DNA
ttctatgaacagtgctgctgagtggaaagtgactgaaaatgaacatctggcggcacagagggcttctgtgatcagacgtgtctgttcagaagctcagtgtttaattg

SEQ ID NO: 4768 - RNA, 35 nt, Homo sapiens
  source 1..35: mol_type = unassigned RNA
ccttcatttaaacagtcccagctctggtaaatgtt

SEQ ID NO: 4769 - DNA, 35 bp, Homo sapiens
  source 1..35: mol_type = unassigned DNA
ccttcatttaaacagtcccagctctggtaaatgtt

SEQ ID NO: 4770 - DNA, 35 bp, Homo sapiens
  source 1..35: mol_type = unassigned DNA
aacatttaccagagctgggactgtttaaatgaagg

SEQ ID NO: 4771 - RNA, 32 nt, Homo sapiens
  source 1..32: mol_type = unassigned RNA
caaacaccgtgcacgggctgtgacctgcaaaa

SEQ ID NO: 4772 - DNA, 32 bp, Homo sapiens
  source 1..32: mol_type = unassigned DNA
caaacaccgtgcacgggctgtgacctgcaaaa

SEQ ID NO: 4773 - DNA, 32 bp, Homo sapiens
  source 1..32: mol_type = unassigned DNA
ttttgcaggtcacagcccgtgcacggtgtttg

SEQ ID NO: 4774 - RNA, 24 nt, Homo sapiens
  source 1..24: mol_type = unassigned RNA
ttgagttattagtttatataatga

SEQ ID NO: 4775 - DNA, 24 bp, Homo sapiens
  source 1..24: mol_type = unassigned DNA
ttgagttattagtttatataatga

SEQ ID NO: 4776 - DNA, 24 bp, Homo sapiens
  source 1..24: mol_type = unassigned DNA
tcattatataaactaataactcaa

SEQ ID NO: 4777 - RNA, 58 nt, Homo sapiens
  source 1..58: mol_type = unassigned RNA
ctatctgactattatcttctcctgaacattttgtactgctcctctactgtgctgctcc

SEQ ID NO: 4778 - DNA, 58 bp, Homo sapiens
  source 1..58: mol_type = unassigned DNA
ctatctgactattatcttctcctgaacattttgtactgctcctctactgtgctgctcc

SEQ ID NO: 4779 - DNA, 58 bp, Homo sapiens
  source 1..58: mol_type = unassigned DNA
ggagcagcacagtagaggagcagtacaaaatgttcaggagaagataatagtcagatag

SEQ ID NO: 4780 - RNA, 30 nt, Homo sapiens
  source 1..30: mol_type = unassigned RNA
caggaagtggccatgaggactgtgaagaag

SEQ ID NO: 4781 - DNA, 30 bp, Homo sapiens
  source 1..30: mol_type = unassigned DNA
caggaagtggccatgaggactgtgaagaag

SEQ ID NO: 4782 - DNA, 30 bp, Homo sapiens
  source 1..30: mol_type = unassigned DNA
cttcttcacagtcctcatggccacttcctg

SEQ ID NO: 4783 - RNA, 31 nt, Homo sapiens
  source 1..31: mol_type = unassigned RNA
gcctgactctctttccctttggccaaggtgg

SEQ ID NO: 4784 - DNA, 31 bp, Homo sapiens
  source 1..31: mol_type = unassigned DNA
gcctgactctctttccctttggccaaggtgg

SEQ ID NO: 4785 - DNA, 31 bp, Homo sapiens
  source 1..31: mol_type = unassigned DNA
ccaccttggccaaagggaaagagagtcaggc

SEQ ID NO: 4786 - RNA, 29 nt, Homo sapiens
  source 1..29: mol_type = unassigned RNA
ccttgcaactgtgggatctgatggtagat

SEQ ID NO: 4787 - DNA, 29 bp, Homo sapiens
  source 1..29: mol_type = unassigned DNA
ccttgcaactgtgggatctgatggtagat

SEQ ID NO: 4788 - DNA, 29 bp, Homo sapiens
  source 1..29: mol_type = unassigned DNA
atctaccatcagatcccacagttgcaagg

SEQ ID NO: 4789 - RNA, 42 nt, Homo sapiens
  source 1..42: mol_type = unassigned RNA
tattcttgctgtgctctggttttggctgtcctgggcacagaa

SEQ ID NO: 4790 - DNA, 42 bp, Homo sapiens
  source 1..42: mol_type = unassigned DNA
tattcttgctgtgctctggttttggctgtcctgggcacagaa

SEQ ID NO: 4791 - DNA, 42 bp, Homo sapiens
  source 1..42: mol_type = unassigned DNA
ttctgtgcccaggacagccaaaaccagagcacagcaagaata

SEQ ID NO: 4792 - RNA, 24 nt, Homo sapiens
  source 1..24: mol_type = unassigned RNA
aaggggaatggtataattcactct

SEQ ID NO: 4793 - DNA, 24 bp, Homo sapiens
  source 1..24: mol_type = unassigned DNA
aaggggaatggtataattcactct

SEQ ID NO: 4794 - DNA, 24 bp, Homo sapiens
  source 1..24: mol_type = unassigned DNA
agagtgaattataccattcccctt

SEQ ID NO: 4795 - RNA, 30 nt, Homo sapiens
  source 1..30: mol_type = unassigned RNA
gctggagtactgatcagtgggtgggcatat

SEQ ID NO: 4796 - DNA, 30 bp, Homo sapiens
  source 1..30: mol_type = unassigned DNA
gctggagtactgatcagtgggtgggcatat

SEQ ID NO: 4797 - DNA, 30 bp, Homo sapiens
  source 1..30: mol_type = unassigned DNA
atatgcccacccactgatcagtactccagc

SEQ ID NO: 4798 - RNA, 32 nt, Homo sapiens
  source 1..32: mol_type = unassigned RNA
tcccgtagttactcaaggatgggttccaccag

SEQ ID NO: 4799 - DNA, 32 bp, Homo sapiens
  source 1..32: mol_type = unassigned DNA
tcccgtagttactcaaggatgggttccaccag

SEQ ID NO: 4800 - DNA, 32 bp, Homo sapiens
  source 1..32: mol_type = unassigned DNA
ctggtggaacccatccttgagtaactacggga

SEQ ID NO: 4801 - RNA, 73 nt, Homo sapiens
  source 1..73: mol_type = unassigned RNA
aatatattgccattacccctcaagctactgctctgtgcaatgatgctcaagcctgtagactgagcaatgagtt

SEQ ID NO: 4802 - DNA, 73 bp, Homo sapiens
  source 1..73: mol_type = unassigned DNA
aatatattgccattacccctcaagctactgctctgtgcaatgatgctcaagcctgtagactgagcaatgagtt

SEQ ID NO: 4803 - DNA, 73 bp, Homo sapiens
  source 1..73: mol_type = unassigned DNA
aactcattgctcagtctacaggcttgagcatcattgcacagagcagtagcttgaggggtaatggcaatatatt

SEQ ID NO: 4804 - RNA, 109 nt, Homo sapiens
  source 1..109: mol_type = unassigned RNA
ctaaatataaacatttattttcagtttgttcgtggtagcaccttcaaagaaatccccgtgactgtctatagtaagtatataataaatattggccacctgggtggcaagg

SEQ ID NO: 4805 - DNA, 109 bp, Homo sapiens
  source 1..109: mol_type = unassigned DNA
ctaaatataaacatttattttcagtttgttcgtggtagcaccttcaaagaaatccccgtgactgtctatagtaagtatataataaatattggccacctgggtggcaagg

SEQ ID NO: 4806 - DNA, 109 bp, Homo sapiens
  source 1..109: mol_type = unassigned DNA
ccttgccacccaggtggccaatatttattatatacttactatagacagtcacggggatttctttgaaggtgctaccacgaacaaactgaaaataaatgtttatatttag

SEQ ID NO: 4807 - RNA, 31 nt, Homo sapiens
  source 1..31: mol_type = unassigned RNA
agagctgccgggctgcaagaaaactactctg

SEQ ID NO: 4808 - DNA, 31 bp, Homo sapiens
  source 1..31: mol_type = unassigned DNA
agagctgccgggctgcaagaaaactactctg

SEQ ID NO: 4809 - DNA, 31 bp, Homo sapiens
  source 1..31: mol_type = unassigned DNA
cagagtagttttcttgcagcccggcagctct

SEQ ID NO: 4810 - RNA, 29 nt, Homo sapiens
  source 1..29: mol_type = unassigned RNA
aagaagagcgggatctctggatgcaaaaa

SEQ ID NO: 4811 - DNA, 29 bp, Homo sapiens
  source 1..29: mol_type = unassigned DNA
aagaagagcgggatctctggatgcaaaaa

SEQ ID NO: 4812 - DNA, 29 bp, Homo sapiens
  source 1..29: mol_type = unassigned DNA
tttttgcatccagagatcccgctcttctt

SEQ ID NO: 4813 - RNA, 33 nt, Homo sapiens
  source 1..33: mol_type = unassigned RNA
actttgctaccatctttgctctgagcagctgct

SEQ ID NO: 4814 - DNA, 33 bp, Homo sapiens
  source 1..33: mol_type = unassigned DNA
actttgctaccatctttgctctgagcagctgct

SEQ ID NO: 4815 - DNA, 33 bp, Homo sapiens
  source 1..33: mol_type = unassigned DNA
agcagctgctcagagcaaagatggtagcaaagt

SEQ ID NO: 4816 - RNA, 109 nt, Homo sapiens
  source 1..109: mol_type = unassigned RNA
ctctttgctaagaggcccatcaacatgataaaatgctgtgcagtcattacatattactcggctgtaggatgaggcatttctacgtgtttggacatggaaagaccttcaa

SEQ ID NO: 4817 - DNA, 109 bp, Homo sapiens
  source 1..109: mol_type = unassigned DNA
ctctttgctaagaggcccatcaacatgataaaatgctgtgcagtcattacatattactcggctgtaggatgaggcatttctacgtgtttggacatggaaagaccttcaa

SEQ ID NO: 4818 - DNA, 109 bp, Homo sapiens
  source 1..109: mol_type = unassigned DNA
ttgaaggtctttccatgtccaaacacgtagaaatgcctcatcctacagccgagtaatatgtaatgactgcacagcattttatcatgttgatgggcctcttagcaaagag

SEQ ID NO: 4819 - RNA, 40 nt, Homo sapiens
  source 1..40: mol_type = unassigned RNA
ggcatgtgatgaaagtgatgaatttctgaaccatgtttat

SEQ ID NO: 4820 - DNA, 40 bp, Homo sapiens
  source 1..40: mol_type = unassigned DNA
ggcatgtgatgaaagtgatgaatttctgaaccatgtttat

SEQ ID NO: 4821 - DNA, 40 bp, Homo sapiens
  source 1..40: mol_type = unassigned DNA
ataaacatggttcagaaattcatcactttcatcacatgcc

SEQ ID NO: 4822 - RNA, 41 nt, Homo sapiens
  source 1..41: mol_type = unassigned RNA
gcatagcaatacagcgattttgtcagtgatagaaatcacag

SEQ ID NO: 4823 - DNA, 41 bp, Homo sapiens
  source 1..41: mol_type = unassigned DNA
gcatagcaatacagcgattttgtcagtgatagaaatcacag

SEQ ID NO: 4824 - DNA, 41 bp, Homo sapiens
  source 1..41: mol_type = unassigned DNA
ctgtgatttctatcactgacaaaatcgctgtattgctatgc

SEQ ID NO: 4825 - RNA, 30 nt, Homo sapiens
  source 1..30: mol_type = unassigned RNA
tttatactgctcaagatcgtcataaataaa

SEQ ID NO: 4826 - DNA, 30 bp, Homo sapiens
  source 1..30: mol_type = unassigned DNA
tttatactgctcaagatcgtcataaataaa

SEQ ID NO: 4827 - DNA, 30 bp, Homo sapiens
  source 1..30: mol_type = unassigned DNA
tttatttatgacgatcttgagcagtataaa

SEQ ID NO: 4828 - RNA, 32 nt, Homo sapiens
  source 1..32: mol_type = unassigned RNA
ggcggccgggagagtagcagtgccttggaccc

SEQ ID NO: 4829 - DNA, 32 bp, Homo sapiens
  source 1..32: mol_type = unassigned DNA
ggcggccgggagagtagcagtgccttggaccc

SEQ ID NO: 4830 - DNA, 32 bp, Homo sapiens
  source 1..32: mol_type = unassigned DNA
gggtccaaggcactgctactctcccggccgcc

SEQ ID NO: 4831 - RNA, 59 nt, Homo sapiens
  source 1..59: mol_type = unassigned RNA
tttgcttttggatactagcaggacgccaaaatcagaacctctgaaatttcaaagcctaa

SEQ ID NO: 4832 - DNA, 59 bp, Homo sapiens
  source 1..59: mol_type = unassigned DNA
tttgcttttggatactagcaggacgccaaaatcagaacctctgaaatttcaaagcctaa

SEQ ID NO: 4833 - DNA, 59 bp, Homo sapiens
  source 1..59: mol_type = unassigned DNA
ttaggctttgaaatttcagaggttctgattttggcgtcctgctagtatccaaaagcaaa

SEQ ID NO: 4834 - RNA, 29 nt, Homo sapiens
  source 1..29: mol_type = unassigned RNA
ggctgctgctccctctctccaggccactc

SEQ ID NO: 4835 - DNA, 29 bp, Homo sapiens
  source 1..29: mol_type = unassigned DNA
ggctgctgctccctctctccaggccactc

SEQ ID NO: 4836 - DNA, 29 bp, Homo sapiens
  source 1..29: mol_type = unassigned DNA
gagtggcctggagagagggagcagcagcc

SEQ ID NO: 4837 - RNA, 104 nt, Homo sapiens
  source 1..104: mol_type = unassigned RNA
tgcagtccaggttttagcagagtccagagccttaaaggagagtctgccagaatttgggcttttatagtcactcactccaaccctctttttcttttctttaatgg

SEQ ID NO: 4838 - DNA, 104 bp, Homo sapiens
  source 1..104: mol_type = unassigned DNA
tgcagtccaggttttagcagagtccagagccttaaaggagagtctgccagaatttgggcttttatagtcactcactccaaccctctttttcttttctttaatgg

SEQ ID NO: 4839 - DNA, 104 bp, Homo sapiens
  source 1..104: mol_type = unassigned DNA
ccattaaagaaaagaaaaagagggttggagtgagtgactataaaagcccaaattctggcagactctcctttaaggctctggactctgctaaaacctggactgca

SEQ ID NO: 4840 - RNA, 30 nt, Homo sapiens
  source 1..30: mol_type = unassigned RNA
gagacttggcccaggaaaggacagagccat

SEQ ID NO: 4841 - DNA, 30 bp, Homo sapiens
  source 1..30: mol_type = unassigned DNA
gagacttggcccaggaaaggacagagccat

SEQ ID NO: 4842 - DNA, 30 bp, Homo sapiens
  source 1..30: mol_type = unassigned DNA
atggctctgtcctttcctgggccaagtctc

SEQ ID NO: 4843 - RNA, 155 nt, Homo sapiens
  source 1..155: mol_type = unassigned RNA
tcaggcagctactgcaccaatcctggccttcagccgctgctcactctttgccaaccattcagagcccccactaggtctaggagatgtacctttccctcctgccgtatgcagcattttcaggtgatccacggtcatctgcaggatctcggcttttt

SEQ ID NO: 4844 - DNA, 155 bp, Homo sapiens
  source 1..155: mol_type = unassigned DNA
tcaggcagctactgcaccaatcctggccttcagccgctgctcactctttgccaaccattcagagcccccactaggtctaggagatgtacctttccctcctgccgtatgcagcattttcaggtgatccacggtcatctgcaggatctcggcttttt

SEQ ID NO: 4845 - DNA, 155 bp, Homo sapiens
  source 1..155: mol_type = unassigned DNA
aaaaagccgagatcctgcagatgaccgtggatcacctgaaaatgctgcatacggcaggagggaaaggtacatctcctagacctagtgggggctctgaatggttggcaaagagtgagcagcggctgaaggccaggattggtgcagtagctgcctga

SEQ ID NO: 4846 - RNA, 32 nt, Homo sapiens
  source 1..32: mol_type = unassigned RNA
agtcaactctggccaggaactctaaggtacac

SEQ ID NO: 4847 - DNA, 32 bp, Homo sapiens
  source 1..32: mol_type = unassigned DNA
agtcaactctggccaggaactctaaggtacac

SEQ ID NO: 4848 - DNA, 32 bp, Homo sapiens
  source 1..32: mol_type = unassigned DNA
gtgtaccttagagttcctggccagagttgact

SEQ ID NO: 4849 - RNA, 39 nt, Homo sapiens
  source 1..39: mol_type = unassigned RNA
ttgaaagtccggtgtcttgccaggttgaaagtctgttat

SEQ ID NO: 4850 - DNA, 39 bp, Homo sapiens
  source 1..39: mol_type = unassigned DNA
ttgaaagtccggtgtcttgccaggttgaaagtctgttat

SEQ ID NO: 4851 - DNA, 39 bp, Homo sapiens
  source 1..39: mol_type = unassigned DNA
ataacagactttcaacctggcaagacaccggactttcaa

SEQ ID NO: 4852 - RNA, 37 nt, Homo sapiens
  source 1..37: mol_type = unassigned RNA
aggccggtctgacgggtgacagggctctgctgtcagt

SEQ ID NO: 4853 - DNA, 37 bp, Homo sapiens
  source 1..37: mol_type = unassigned DNA
aggccggtctgacgggtgacagggctctgctgtcagt

SEQ ID NO: 4854 - DNA, 37 bp, Homo sapiens
  source 1..37: mol_type = unassigned DNA
actgacagcagagccctgtcacccgtcagaccggcct

SEQ ID NO: 4855 - RNA, 40 nt, Homo sapiens
  source 1..40: mol_type = unassigned RNA
tcaaattggactatgaactaggcagagaactcgtgaaaca

SEQ ID NO: 4856 - DNA, 40 bp, Homo sapiens
  source 1..40: mol_type = unassigned DNA
tcaaattggactatgaactaggcagagaactcgtgaaaca

SEQ ID NO: 4857 - DNA, 40 bp, Homo sapiens
  source 1..40: mol_type = unassigned DNA
tgtttcacgagttctctgcctagttcatagtccaatttga

SEQ ID NO: 4858 - RNA, 178 nt, Homo sapiens
  source 1..178: mol_type = unassigned RNA
aaatgcagaatgatgtggacatagctgatgtggctcattattttgaaaaagatgttaaaggtgaatccttgtttcattcttctaagaaaatggacctgagagtaaatggagaacaactggatctggatcctggtcaaactttaatttattatgttgatagaaatgcacctgaattttc

SEQ ID NO: 4859 - DNA, 178 bp, Homo sapiens
  source 1..178: mol_type = unassigned DNA
aaatgcagaatgatgtggacatagctgatgtggctcattattttgaaaaagatgttaaaggtgaatccttgtttcattcttctaagaaaatggacctgagagtaaatggagaacaactggatctggatcctggtcaaactttaatttattatgttgatagaaatgcacctgaattttc

SEQ ID NO: 4860 - DNA, 178 bp, Homo sapiens
  source 1..178: mol_type = unassigned DNA
gaaaattcaggtgcatttctatcaacataataaattaaagtttgaccaggatccagatccagttgttctccatttactctcaggtccattttcttagaagaatgaaacaaggattcacctttaacatctttttcaaaataatgagccacatcagctatgtccacatcattctgcattt

SEQ ID NO: 4861 - RNA, 71 nt, Homo sapiens
  source 1..71: mol_type = unassigned RNA
atccagaggaggcgttctggagctggtgatgagagcagaatctctgaagccagacagtctcgagtttgaat

SEQ ID NO: 4862 - DNA, 71 bp, Homo sapiens
  source 1..71: mol_type = unassigned DNA
atccagaggaggcgttctggagctggtgatgagagcagaatctctgaagccagacagtctcgagtttgaat

SEQ ID NO: 4863 - DNA, 71 bp, Homo sapiens
  source 1..71: mol_type = unassigned DNA
attcaaactcgagactgtctggcttcagagattctgctctcatcaccagctccagaacgcctcctctggat

SEQ ID NO: 4864 - RNA, 34 nt, Homo sapiens
  source 1..34: mol_type = unassigned RNA
ccatgaccttggactatgggatggaccaggtgag

SEQ ID NO: 4865 - DNA, 34 bp, Homo sapiens
  source 1..34: mol_type = unassigned DNA
ccatgaccttggactatgggatggaccaggtgag

SEQ ID NO: 4866 - DNA, 34 bp, Homo sapiens
  source 1..34: mol_type = unassigned DNA
ctcacctggtccatcccatagtccaaggtcatgg

SEQ ID NO: 4867 - RNA, 32 nt, Homo sapiens
  source 1..32: mol_type = unassigned RNA
tcagcaagacgctgggcaagctctggaggtga

SEQ ID NO: 4868 - DNA, 32 bp, Homo sapiens
  source 1..32: mol_type = unassigned DNA
tcagcaagacgctgggcaagctctggaggtga

SEQ ID NO: 4869 - DNA, 32 bp, Homo sapiens
  source 1..32: mol_type = unassigned DNA
tcacctccagagcttgcccagcgtcttgctga

SEQ ID NO: 4870 - RNA, 29 nt, Homo sapiens
  source 1..29: mol_type = unassigned RNA
tcctggcttgagtagggcagagagcaccg

SEQ ID NO: 4871 - DNA, 29 bp, Homo sapiens
  source 1..29: mol_type = unassigned DNA
tcctggcttgagtagggcagagagcaccg

SEQ ID NO: 4872 - DNA, 29 bp, Homo sapiens
  source 1..29: mol_type = unassigned DNA
cggtgctctctgccctactcaagccagga

SEQ ID NO: 4873 - RNA, 29 nt, Homo sapiens
  source 1..29: mol_type = unassigned RNA
cagtagcaaggaaggggggtgggcgctct

SEQ ID NO: 4874 - DNA, 29 bp, Homo sapiens
  source 1..29: mol_type = unassigned DNA
cagtagcaaggaaggggggtgggcgctct

SEQ ID NO: 4875 - DNA, 29 bp, Homo sapiens
  source 1..29: mol_type = unassigned DNA
agagcgcccaccccccttccttgctactg

SEQ ID NO: 4876 - RNA, 194 nt, Homo sapiens
  source 1..194: mol_type = unassigned RNA
tctctggagaaggaaggggtgtggggaagtggagaagctcacacaacttcacctcctaggtctgcccctgaaggaggaggagatattgccagagcctggaagtgagacccccacggtggcctctgaggccctggctgaactgcttcatggggccctgctgaggaggggcccagagatgggctacctgccaggtg

SEQ ID NO: 4877 - DNA, 194 bp, Homo sapiens
  source 1..194: mol_type = unassigned DNA
tctctggagaaggaaggggtgtggggaagtggagaagctcacacaacttcacctcctaggtctgcccctgaaggaggaggagatattgccagagcctggaagtgagacccccacggtggcctctgaggccctggctgaactgcttcatggggccctgctgaggaggggcccagagatgggctacctgccaggtg

SEQ ID NO: 4878 - DNA, 194 bp, Homo sapiens
  source 1..194: mol_type = unassigned DNA
cacctggcaggtagcccatctctgggcccctcctcagcagggccccatgaagcagttcagccagggcctcagaggccaccgtgggggtctcacttccaggctctggcaatatctcctcctccttcaggggcagacctaggaggtgaagttgtgtgagcttctccacttccccacaccccttccttctccagaga

SEQ ID NO: 4879 - RNA, 23 nt, Homo sapiens
  source 1..23: mol_type = unassigned RNA
ttttgcaatggaaaaacccaact

SEQ ID NO: 4880 - DNA, 23 bp, Homo sapiens
  source 1..23: mol_type = unassigned DNA
ttttgcaatggaaaaacccaact

SEQ ID NO: 4881 - DNA, 23 bp, Homo sapiens
  source 1..23: mol_type = unassigned DNA
agttgggtttttccattgcaaaa

SEQ ID NO: 4882 - RNA, 28 nt, Homo sapiens
  source 1..28: mol_type = unassigned RNA
tgggtgagttatgagtttgtgtctttca

SEQ ID NO: 4883 - DNA, 28 bp, Homo sapiens
  source 1..28: mol_type = unassigned DNA
tgggtgagttatgagtttgtgtctttca

SEQ ID NO: 4884 - DNA, 28 bp, Homo sapiens
  source 1..28: mol_type = unassigned DNA
tgaaagacacaaactcataactcaccca

SEQ ID NO: 4885 - RNA, 30 nt, Homo sapiens
  source 1..30: mol_type = unassigned RNA
gttggcgctacaaggcggactgggtcgctc

SEQ ID NO: 4886 - DNA, 30 bp, Homo sapiens
  source 1..30: mol_type = unassigned DNA
gttggcgctacaaggcggactgggtcgctc

SEQ ID NO: 4887 - DNA, 30 bp, Homo sapiens
  source 1..30: mol_type = unassigned DNA
gagcgacccagtccgccttgtagcgccaac

SEQ ID NO: 4888 - RNA, 126 nt, Homo sapiens
  source 1..126: mol_type = unassigned RNA
ctgggcattacaataggaacatctatattcaggaggcagtatggaaagagcactggattgcaggtctagatgtggattttagccccatttgtgcctctactggagagaccttactcagtgacctgg

SEQ ID NO: 4889 - DNA, 126 bp, Homo sapiens
  source 1..126: mol_type = unassigned DNA
ctgggcattacaataggaacatctatattcaggaggcagtatggaaagagcactggattgcaggtctagatgtggattttagccccatttgtgcctctactggagagaccttactcagtgacctgg

SEQ ID NO: 4890 - DNA, 126 bp, Homo sapiens
  source 1..126: mol_type = unassigned DNA
ccaggtcactgagtaaggtctctccagtagaggcacaaatggggctaaaatccacatctagacctgcaatccagtgctctttccatactgcctcctgaatatagatgttcctattgtaatgcccag

SEQ ID NO: 4891 - RNA, 32 nt, Homo sapiens
  source 1..32: mol_type = unassigned RNA
actgggcgactagggctttgagctgggcagtt

SEQ ID NO: 4892 - DNA, 32 bp, Homo sapiens
  source 1..32: mol_type = unassigned DNA
actgggcgactagggctttgagctgggcagtt

SEQ ID NO: 4893 - DNA, 32 bp, Homo sapiens
  source 1..32: mol_type = unassigned DNA
aactgcccagctcaaagccctagtcgcccagt

SEQ ID NO: 4894 - RNA, 24 nt, Homo sapiens
  source 1..24: mol_type = unassigned RNA
attttgcaatgataaactcccaag

SEQ ID NO: 4895 - DNA, 24 bp, Homo sapiens
  source 1..24: mol_type = unassigned DNA
attttgcaatgataaactcccaag

SEQ ID NO: 4896 - DNA, 24 bp, Homo sapiens
  source 1..24: mol_type = unassigned DNA
cttgggagtttatcattgcaaaat

SEQ ID NO: 4897 - RNA, 52 nt, Homo sapiens
  source 1..52: mol_type = unassigned RNA
caagctggattgagaagtgaagcagcaaatgggaacttagactttgtattat

SEQ ID NO: 4898 - DNA, 52 bp, Homo sapiens
  source 1..52: mol_type = unassigned DNA
caagctggattgagaagtgaagcagcaaatgggaacttagactttgtattat

SEQ ID NO: 4899 - DNA, 52 bp, Homo sapiens
  source 1..52: mol_type = unassigned DNA
ataatacaaagtctaagttcccatttgctgcttcacttctcaatccagcttg

SEQ ID NO: 4900 - RNA, 34 nt, Homo sapiens
  source 1..34: mol_type = unassigned RNA
tgagataatagtttgtctgtttttgcttttgttg

SEQ ID NO: 4901 - DNA, 34 bp, Homo sapiens
  source 1..34: mol_type = unassigned DNA
tgagataatagtttgtctgtttttgcttttgttg

SEQ ID NO: 4902 - DNA, 34 bp, Homo sapiens
  source 1..34: mol_type = unassigned DNA
caacaaaagcaaaaacagacaaactattatctca

SEQ ID NO: 4903 - RNA, 50 nt, Homo sapiens
  source 1..50: mol_type = unassigned RNA
caaaccccagtccatggcctgttaggaaccaaccgcacagcaggaggtga

SEQ ID NO: 4904 - DNA, 50 bp, Homo sapiens
  source 1..50: mol_type = unassigned DNA
caaaccccagtccatggcctgttaggaaccaaccgcacagcaggaggtga

SEQ ID NO: 4905 - DNA, 50 bp, Homo sapiens
  source 1..50: mol_type = unassigned DNA
tcacctcctgctgtgcggttggttcctaacaggccatggactggggtttg

SEQ ID NO: 4906 - RNA, 30 nt, Homo sapiens
  source 1..30: mol_type = unassigned RNA
ctcatctgtccctcagaaggctctgacacc

SEQ ID NO: 4907 - DNA, 30 bp, Homo sapiens
  source 1..30: mol_type = unassigned DNA
ctcatctgtccctcagaaggctctgacacc

SEQ ID NO: 4908 - DNA, 30 bp, Homo sapiens
  source 1..30: mol_type = unassigned DNA
ggtgtcagagccttctgagggacagatgag

SEQ ID NO: 4909 - RNA, 33 nt, Homo sapiens
  source 1..33: mol_type = unassigned RNA
ttccaagtgatgatcagagggggctgatggagt

SEQ ID NO: 4910 - DNA, 33 bp, Homo sapiens
  source 1..33: mol_type = unassigned DNA
ttccaagtgatgatcagagggggctgatggagt

SEQ ID NO: 4911 - DNA, 33 bp, Homo sapiens
  source 1..33: mol_type = unassigned DNA
actccatcagccccctctgatcatcacttggaa

SEQ ID NO: 4912 - RNA, 188 nt, Homo sapiens
  source 1..188: mol_type = unassigned RNA
tttcctcattgaaattgcctcctattttgataggtaaatgatacacttctggtgaatgaattgaaatcaaaagaatctgacatcatgacaacaaatggtgtaattcatgttgtagataaactcctctatccagcaggtttgtaattattgaactcattgataggctaagtctttttttaatatgaacc

SEQ ID NO: 4913 - DNA, 188 bp, Homo sapiens
  source 1..188: mol_type = unassigned DNA
tttcctcattgaaattgcctcctattttgataggtaaatgatacacttctggtgaatgaattgaaatcaaaagaatctgacatcatgacaacaaatggtgtaattcatgttgtagataaactcctctatccagcaggtttgtaattattgaactcattgataggctaagtctttttttaatatgaacc

SEQ ID NO: 4914 - DNA, 188 bp, Homo sapiens
  source 1..188: mol_type = unassigned DNA
ggttcatattaaaaaaagacttagcctatcaatgagttcaataattacaaacctgctggatagaggagtttatctacaacatgaattacaccatttgttgtcatgatgtcagattcttttgatttcaattcattcaccagaagtgtatcatttacctatcaaaataggaggcaatttcaatgaggaaa

SEQ ID NO: 4915 - RNA, 30 nt, Homo sapiens
  source 1..30: mol_type = unassigned RNA
atcaagcagacgtcgctggccaggatccta

SEQ ID NO: 4916 - DNA, 30 bp, Homo sapiens
  source 1..30: mol_type = unassigned DNA
atcaagcagacgtcgctggccaggatccta

SEQ ID NO: 4917 - DNA, 30 bp, Homo sapiens
  source 1..30: mol_type = unassigned DNA
taggatcctggccagcgacgtctgcttgat

SEQ ID NO: 4918 - RNA, 27 nt, Homo sapiens
  source 1..27: mol_type = unassigned RNA
tgagtaagccagtatcccaggaggagc

SEQ ID NO: 4919 - DNA, 27 bp, Homo sapiens
  source 1..27: mol_type = unassigned DNA
tgagtaagccagtatcccaggaggagc

SEQ ID NO: 4920 - DNA, 27 bp, Homo sapiens
  source 1..27: mol_type = unassigned DNA
gctcctcctgggatactggcttactca

SEQ ID NO: 4921 - RNA, 39 nt, Homo sapiens
  source 1..39: mol_type = unassigned RNA
ctttctgtgctgtgatgaggactttcaatctgatatcac

SEQ ID NO: 4922 - DNA, 39 bp, Homo sapiens
  source 1..39: mol_type = unassigned DNA
ctttctgtgctgtgatgaggactttcaatctgatatcac

SEQ ID NO: 4923 - DNA, 39 bp, Homo sapiens
  source 1..39: mol_type = unassigned DNA
gtgatatcagattgaaagtcctcatcacagcacagaaag

SEQ ID NO: 4924 - RNA, 31 nt, Homo sapiens
  source 1..31: mol_type = unassigned RNA
gaagaaacagagggccgggttgtctggggca

SEQ ID NO: 4925 - DNA, 31 bp, Homo sapiens
  source 1..31: mol_type = unassigned DNA
gaagaaacagagggccgggttgtctggggca

SEQ ID NO: 4926 - DNA, 31 bp, Homo sapiens
  source 1..31: mol_type = unassigned DNA
tgccccagacaacccggccctctgtttcttc

SEQ ID NO: 4927 - RNA, 31 nt, Homo sapiens
  source 1..31: mol_type = unassigned RNA
tctgctgggggtcggatgggaccgggacctc

SEQ ID NO: 4928 - DNA, 31 bp, Homo sapiens
  source 1..31: mol_type = unassigned DNA
tctgctgggggtcggatgggaccgggacctc

SEQ ID NO: 4929 - DNA, 31 bp, Homo sapiens
  source 1..31: mol_type = unassigned DNA
gaggtcccggtcccatccgacccccagcaga

SEQ ID NO: 4930 - RNA, 188 nt, Homo sapiens
  source 1..188: mol_type = unassigned RNA
tttctgttgttcgttctttgtagaaggatattttggaacctattagcctattagtaccagtgacatcttttcatcctttaatttataggcctttagcaaaaaacagatagatgatcgaaaggaatggttaactaatttcatggaggatagaagacaacgaaagttacttgggcttcctgaggtaaaag

SEQ ID NO: 4931 - DNA, 188 bp, Homo sapiens
  source 1..188: mol_type = unassigned DNA
tttctgttgttcgttctttgtagaaggatattttggaacctattagcctattagtaccagtgacatcttttcatcctttaatttataggcctttagcaaaaaacagatagatgatcgaaaggaatggttaactaatttcatggaggatagaagacaacgaaagttacttgggcttcctgaggtaaaag

SEQ ID NO: 4932 - DNA, 188 bp, Homo sapiens
  source 1..188: mol_type = unassigned DNA
cttttacctcaggaagcccaagtaactttcgttgtcttctatcctccatgaaattagttaaccattcctttcgatcatctatctgttttttgctaaaggcctataaattaaaggatgaaaagatgtcactggtactaataggctaataggttccaaaatatccttctacaaagaacgaacaacagaaa

SEQ ID NO: 4933 - RNA, 30 nt, Homo sapiens
  source 1..30: mol_type = unassigned RNA
gagctcccctgaacagcagctgcagcagcc

SEQ ID NO: 4934 - DNA, 30 bp, Homo sapiens
  source 1..30: mol_type = unassigned DNA
gagctcccctgaacagcagctgcagcagcc

SEQ ID NO: 4935 - DNA, 30 bp, Homo sapiens
  source 1..30: mol_type = unassigned DNA
ggctgctgcagctgctgttcaggggagctc

SEQ ID NO: 4936 - RNA, 31 nt, Homo sapiens
  source 1..31: mol_type = unassigned RNA
aggtccaggaggctgaccaggtggaagaggc

SEQ ID NO: 4937 - DNA, 31 bp, Homo sapiens
  source 1..31: mol_type = unassigned DNA
aggtccaggaggctgaccaggtggaagaggc

SEQ ID NO: 4938 - DNA, 31 bp, Homo sapiens
  source 1..31: mol_type = unassigned DNA
gcctcttccacctggtcagcctcctggacct

SEQ ID NO: 4939 - RNA, 65 nt, Homo sapiens
  source 1..65: mol_type = unassigned RNA
gacttgggaagcagaggtgggaagatcacttgagcctaggagagcaaggctgtggtgagctatga

SEQ ID NO: 4940 - DNA, 65 bp, Homo sapiens
  source 1..65: mol_type = unassigned DNA
gacttgggaagcagaggtgggaagatcacttgagcctaggagagcaaggctgtggtgagctatga

SEQ ID NO: 4941 - DNA, 65 bp, Homo sapiens
  source 1..65: mol_type = unassigned DNA
tcatagctcaccacagccttgctctcctaggctcaagtgatcttcccacctctgcttcccaagtc

SEQ ID NO: 4942 - RNA, 133 nt, Homo sapiens
  source 1..133: mol_type = unassigned RNA
ttcaccacttctacagacagcaggttattttctgtacactgtagaatgtgactgtgtcaagagggcataaaaaggaaccagctgaaattactggagagaacacagggaatactttaatgaacctggctaaaat

SEQ ID NO: 4943 - DNA, 133 bp, Homo sapiens
  source 1..133: mol_type = unassigned DNA
ttcaccacttctacagacagcaggttattttctgtacactgtagaatgtgactgtgtcaagagggcataaaaaggaaccagctgaaattactggagagaacacagggaatactttaatgaacctggctaaaat

SEQ ID NO: 4944 - DNA, 133 bp, Homo sapiens
  source 1..133: mol_type = unassigned DNA
attttagccaggttcattaaagtattccctgtgttctctccagtaatttcagctggttcctttttatgccctcttgacacagtcacattctacagtgtacagaaaataacctgctgtctgtagaagtggtgaa

SEQ ID NO: 4945 - RNA, 35 nt, Homo sapiens
  source 1..35: mol_type = unassigned RNA
tcctggctagcttaggaggatgatgatgcatgaaa

SEQ ID NO: 4946 - DNA, 35 bp, Homo sapiens
  source 1..35: mol_type = unassigned DNA
tcctggctagcttaggaggatgatgatgcatgaaa

SEQ ID NO: 4947 - DNA, 35 bp, Homo sapiens
  source 1..35: mol_type = unassigned DNA
tttcatgcatcatcatcctcctaagctagccagga

SEQ ID NO: 4948 - RNA, 31 nt, Homo sapiens
  source 1..31: mol_type = unassigned RNA
gagatggtgcactggaagagttcactggtgg

SEQ ID NO: 4949 - DNA, 31 bp, Homo sapiens
  source 1..31: mol_type = unassigned DNA
gagatggtgcactggaagagttcactggtgg

SEQ ID NO: 4950 - DNA, 31 bp, Homo sapiens
  source 1..31: mol_type = unassigned DNA
ccaccagtgaactcttccagtgcaccatctc

SEQ ID NO: 4951 - RNA, 32 nt, Homo sapiens
  source 1..32: mol_type = unassigned RNA
taggtttttacactggtaaaatttactgagga

SEQ ID NO: 4952 - DNA, 32 bp, Homo sapiens
  source 1..32: mol_type = unassigned DNA
taggtttttacactggtaaaatttactgagga

SEQ ID NO: 4953 - DNA, 32 bp, Homo sapiens
  source 1..32: mol_type = unassigned DNA
tcctcagtaaattttaccagtgtaaaaaccta

SEQ ID NO: 4954 - RNA, 23 nt, Homo sapiens
  source 1..23: mol_type = unassigned RNA
ttctttatttgtttgtatggtat

SEQ ID NO: 4955 - DNA, 23 bp, Homo sapiens
  source 1..23: mol_type = unassigned DNA
ttctttatttgtttgtatggtat

SEQ ID NO: 4956 - DNA, 23 bp, Homo sapiens
  source 1..23: mol_type = unassigned DNA
ataccatacaaacaaataaagaa

SEQ ID NO: 4957 - RNA, 23 nt, Homo sapiens
  source 1..23: mol_type = unassigned RNA
ttttgcccttgtaggactcacat

SEQ ID NO: 4958 - DNA, 23 bp, Homo sapiens
  source 1..23: mol_type = unassigned DNA
ttttgcccttgtaggactcacat

SEQ ID NO: 4959 - DNA, 23 bp, Homo sapiens
  source 1..23: mol_type = unassigned DNA
atgtgagtcctacaagggcaaaa

SEQ ID NO: 4960 - RNA, 32 nt, Homo sapiens
  source 1..32: mol_type = unassigned RNA
cagcttgggctgtccccttgagaccaggacaa

SEQ ID NO: 4961 - DNA, 32 bp, Homo sapiens
  source 1..32: mol_type = unassigned DNA
cagcttgggctgtccccttgagaccaggacaa

SEQ ID NO: 4962 - DNA, 32 bp, Homo sapiens
  source 1..32: mol_type = unassigned DNA
ttgtcctggtctcaaggggacagcccaagctg

SEQ ID NO: 4963 - RNA, 36 nt, Homo sapiens
  source 1..36: mol_type = unassigned RNA
cggtgcggccaaggaggaagcagtgctgccaggctc

SEQ ID NO: 4964 - DNA, 36 bp, Homo sapiens
  source 1..36: mol_type = unassigned DNA
cggtgcggccaaggaggaagcagtgctgccaggctc

SEQ ID NO: 4965 - DNA, 36 bp, Homo sapiens
  source 1..36: mol_type = unassigned DNA
gagcctggcagcactgcttcctccttggccgcaccg

SEQ ID NO: 4966 - RNA, 84 nt, Homo sapiens
  source 1..84: mol_type = unassigned RNA
ctggctcagctgggacgctgtgggctaaggcagctggcacttccttggcccacagtgtcccagcttggctctggctttcttggc

SEQ ID NO: 4967 - DNA, 84 bp, Homo sapiens
  source 1..84: mol_type = unassigned DNA
ctggctcagctgggacgctgtgggctaaggcagctggcacttccttggcccacagtgtcccagcttggctctggctttcttggc

SEQ ID NO: 4968 - DNA, 84 bp, Homo sapiens
  source 1..84: mol_type = unassigned DNA
gccaagaaagccagagccaagctgggacactgtgggccaaggaagtgccagctgccttagcccacagcgtcccagctgagccag

SEQ ID NO: 4969 - RNA, 30 nt, Homo sapiens
  source 1..30: mol_type = unassigned RNA
tcttctgctaggacctgccaagcagaacag

SEQ ID NO: 4970 - DNA, 30 bp, Homo sapiens
  source 1..30: mol_type = unassigned DNA
tcttctgctaggacctgccaagcagaacag

SEQ ID NO: 4971 - DNA, 30 bp, Homo sapiens
  source 1..30: mol_type = unassigned DNA
ctgttctgcttggcaggtcctagcagaaga

SEQ ID NO: 4972 - RNA, 30 nt, Homo sapiens
  source 1..30: mol_type = unassigned RNA
ctactcaaactgtggaatgtacgcaaactg

SEQ ID NO: 4973 - DNA, 30 bp, Homo sapiens
  source 1..30: mol_type = unassigned DNA
ctactcaaactgtggaatgtacgcaaactg

SEQ ID NO: 4974 - DNA, 30 bp, Homo sapiens
  source 1..30: mol_type = unassigned DNA
cagtttgcgtacattccacagtttgagtag

SEQ ID NO: 4975 - RNA, 60 nt, Homo sapiens
  source 1..60: mol_type = unassigned RNA
tcttcttggagctgtaggtcttgaagcagcaacgtctttcaggggttggagacagaaacc

SEQ ID NO: 4976 - DNA, 60 bp, Homo sapiens
  source 1..60: mol_type = unassigned DNA
tcttcttggagctgtaggtcttgaagcagcaacgtctttcaggggttggagacagaaacc

SEQ ID NO: 4977 - DNA, 60 bp, Homo sapiens
  source 1..60: mol_type = unassigned DNA
ggtttctgtctccaacccctgaaagacgttgctgcttcaagacctacagctccaagaaga

SEQ ID NO: 4978 - RNA, 53 nt, Homo sapiens
  source 1..53: mol_type = unassigned RNA
tgagttattacttttatggttcttgttttgaatctctggatttcatccttgac

SEQ ID NO: 4979 - DNA, 53 bp, Homo sapiens
  source 1..53: mol_type = unassigned DNA
tgagttattacttttatggttcttgttttgaatctctggatttcatccttgac

SEQ ID NO: 4980 - DNA, 53 bp, Homo sapiens
  source 1..53: mol_type = unassigned DNA
gtcaaggatgaaatccagagattcaaaacaagaaccataaaagtaataactca

SEQ ID NO: 4981 - RNA, 185 nt, Homo sapiens
  source 1..185: mol_type = unassigned RNA
ctctgccaggcgtttctcagaggacaagacctaatgagctggctgctgccagcctggtcctcacagttcatcagtaggattccagacaggcatcaggctcagggacagcgcagagacagctgccttctcctctttcccggaggcacctgagacctgagcgcaccgagggggccggtgcatgggct

SEQ ID NO: 4982 - DNA, 185 bp, Homo sapiens
  source 1..185: mol_type = unassigned DNA
ctctgccaggcgtttctcagaggacaagacctaatgagctggctgctgccagcctggtcctcacagttcatcagtaggattccagacaggcatcaggctcagggacagcgcagagacagctgccttctcctctttcccggaggcacctgagacctgagcgcaccgagggggccggtgcatgggct

SEQ ID NO: 4983 - DNA, 185 bp, Homo sapiens
  source 1..185: mol_type = unassigned DNA
agcccatgcaccggccccctcggtgcgctcaggtctcaggtgcctccgggaaagaggagaaggcagctgtctctgcgctgtccctgagcctgatgcctgtctggaatcctactgatgaactgtgaggaccaggctggcagcagccagctcattaggtcttgtcctctgagaaacgcctggcagag

SEQ ID NO: 4984 - RNA, 30 nt, Homo sapiens
  source 1..30: mol_type = unassigned RNA
ttactttcatgtttcctcaccccatcatct

SEQ ID NO: 4985 - DNA, 30 bp, Homo sapiens
  source 1..30: mol_type = unassigned DNA
ttactttcatgtttcctcaccccatcatct

SEQ ID NO: 4986 - DNA, 30 bp, Homo sapiens
  source 1..30: mol_type = unassigned DNA
agatgatggggtgaggaaacatgaaagtaa

SEQ ID NO: 4987 - RNA, 82 nt, Homo sapiens
  source 1..82: mol_type = unassigned RNA
tgttgttgatgaaacactttgactcagttcctggtttcgattctctgcttcctggagtctctgaatcatgaaattctgaagt

SEQ ID NO: 4988 - DNA, 82 bp, Homo sapiens
  source 1..82: mol_type = unassigned DNA
tgttgttgatgaaacactttgactcagttcctggtttcgattctctgcttcctggagtctctgaatcatgaaattctgaagt

SEQ ID NO: 4989 - DNA, 82 bp, Homo sapiens
  source 1..82: mol_type = unassigned DNA
acttcagaatttcatgattcagagactccaggaagcagagaatcgaaaccaggaactgagtcaaagtgtttcatcaacaaca

SEQ ID NO: 4990 - RNA, 25 nt, Homo sapiens
  source 1..25: mol_type = unassigned RNA
tttgtcagaggtagaactgacagaa

SEQ ID NO: 4991 - DNA, 25 bp, Homo sapiens
  source 1..25: mol_type = unassigned DNA
tttgtcagaggtagaactgacagaa

SEQ ID NO: 4992 - DNA, 25 bp, Homo sapiens
  source 1..25: mol_type = unassigned DNA
ttctgtcagttctacctctgacaaa

SEQ ID NO: 4993 - RNA, 38 nt, Homo sapiens
  source 1..38: mol_type = unassigned RNA
agtagacacagttcctgaggtattagtatgtatccaca

SEQ ID NO: 4994 - DNA, 38 bp, Homo sapiens
  source 1..38: mol_type = unassigned DNA
agtagacacagttcctgaggtattagtatgtatccaca

SEQ ID NO: 4995 - DNA, 38 bp, Homo sapiens
  source 1..38: mol_type = unassigned DNA
tgtggatacatactaatacctcaggaactgtgtctact

SEQ ID NO: 4996 - RNA, 23 nt, Homo sapiens
  source 1..23: mol_type = unassigned RNA
agtgtgcgtgagacagcgaaagc

SEQ ID NO: 4997 - DNA, 23 bp, Homo sapiens
  source 1..23: mol_type = unassigned DNA
agtgtgcgtgagacagcgaaagc

SEQ ID NO: 4998 - DNA, 23 bp, Homo sapiens
  source 1..23: mol_type = unassigned DNA
gctttcgctgtctcacgcacact

SEQ ID NO: 4999 - RNA, 35 nt, Homo sapiens
  source 1..35: mol_type = unassigned RNA
taattcattagactatgttgataacttatcagatt

SEQ ID NO: 5000 - DNA, 35 bp, Homo sapiens
  source 1..35: mol_type = unassigned DNA
taattcattagactatgttgataacttatcagatt

SEQ ID NO: 5001 - DNA, 35 bp, Homo sapiens
  source 1..35: mol_type = unassigned DNA
aatctgataagttatcaacatagtctaatgaatta

SEQ ID NO: 5002 - RNA, 34 nt, Homo sapiens
  source 1..34: mol_type = unassigned RNA
aattgctgggtgatgtagtaagtttgtgtttaaa

SEQ ID NO: 5003 - DNA, 34 bp, Homo sapiens
  source 1..34: mol_type = unassigned DNA
aattgctgggtgatgtagtaagtttgtgtttaaa

SEQ ID NO: 5004 - DNA, 34 bp, Homo sapiens
  source 1..34: mol_type = unassigned DNA
tttaaacacaaacttactacatcacccagcaatt

SEQ ID NO: 5005 - RNA, 42 nt, Homo sapiens
  source 1..42: mol_type = unassigned RNA
gagaattgcttgaacccaggtggcggaagttgcagtgagctg

SEQ ID NO: 5006 - DNA, 42 bp, Homo sapiens
  source 1..42: mol_type = unassigned DNA
gagaattgcttgaacccaggtggcggaagttgcagtgagctg

SEQ ID NO: 5007 - DNA, 42 bp, Homo sapiens
  source 1..42: mol_type = unassigned DNA
cagctcactgcaacttccgccacctgggttcaagcaattctc

SEQ ID NO: 5008 - RNA, 31 nt, Homo sapiens
  source 1..31: mol_type = unassigned RNA
tttagtgggtctgattggagctgtaaaacat

SEQ ID NO: 5009 - DNA, 31 bp, Homo sapiens
  source 1..31: mol_type = unassigned DNA
tttagtgggtctgattggagctgtaaaacat

SEQ ID NO: 5010 - DNA, 31 bp, Homo sapiens
  source 1..31: mol_type = unassigned DNA
atgttttacagctccaatcagacccactaaa

SEQ ID NO: 5011 - RNA, 34 nt, Homo sapiens
  source 1..34: mol_type = unassigned RNA
ctcagagcaaaagtcccagagccagcagagcagg

SEQ ID NO: 5012 - DNA, 34 bp, Homo sapiens
  source 1..34: mol_type = unassigned DNA
ctcagagcaaaagtcccagagccagcagagcagg

SEQ ID NO: 5013 - DNA, 34 bp, Homo sapiens
  source 1..34: mol_type = unassigned DNA
cctgctctgctggctctgggacttttgctctgag

SEQ ID NO: 5014 - RNA, 75 nt, Homo sapiens
  source 1..75: mol_type = unassigned RNA
ctgtaagcatggccctgttagaaagcactgatgctgcaatttcattacagtgatctctcaacagaatggacttgc

SEQ ID NO: 5015 - DNA, 75 bp, Homo sapiens
  source 1..75: mol_type = unassigned DNA
ctgtaagcatggccctgttagaaagcactgatgctgcaatttcattacagtgatctctcaacagaatggacttgc

SEQ ID NO: 5016 - DNA, 75 bp, Homo sapiens
  source 1..75: mol_type = unassigned DNA
gcaagtccattctgttgagagatcactgtaatgaaattgcagcatcagtgctttctaacagggccatgcttacag

SEQ ID NO: 5017 - RNA, 35 nt, Homo sapiens
  source 1..35: mol_type = unassigned RNA
tgtcctcttcagcctcagggattggttccaccata

SEQ ID NO: 5018 - DNA, 35 bp, Homo sapiens
  source 1..35: mol_type = unassigned DNA
tgtcctcttcagcctcagggattggttccaccata

SEQ ID NO: 5019 - DNA, 35 bp, Homo sapiens
  source 1..35: mol_type = unassigned DNA
tatggtggaaccaatccctgaggctgaagaggaca

SEQ ID NO: 5020 - RNA, 24 nt, Homo sapiens
  source 1..24: mol_type = unassigned RNA
ttttacaatggtggagctcacctt

SEQ ID NO: 5021 - DNA, 24 bp, Homo sapiens
  source 1..24: mol_type = unassigned DNA
ttttacaatggtggagctcacctt

SEQ ID NO: 5022 - DNA, 24 bp, Homo sapiens
  source 1..24: mol_type = unassigned DNA
aaggtgagctccaccattgtaaaa

SEQ ID NO: 5023 - RNA, 59 nt, Homo sapiens
  source 1..59: mol_type = unassigned RNA
caggtattcgtggacaccgtagggatgccagagacataccaggcgcggctgcagcaaag

SEQ ID NO: 5024 - DNA, 59 bp, Homo sapiens
  source 1..59: mol_type = unassigned DNA
caggtattcgtggacaccgtagggatgccagagacataccaggcgcggctgcagcaaag

SEQ ID NO: 5025 - DNA, 59 bp, Homo sapiens
  source 1..59: mol_type = unassigned DNA
ctttgctgcagccgcgcctggtatgtctctggcatccctacggtgtccacgaatacctg

SEQ ID NO: 5026 - RNA, 30 nt, Homo sapiens
  source 1..30: mol_type = unassigned RNA
ttccctccaggactgtatgaatgatgcagt

SEQ ID NO: 5027 - DNA, 30 bp, Homo sapiens
  source 1..30: mol_type = unassigned DNA
ttccctccaggactgtatgaatgatgcagt

SEQ ID NO: 5028 - DNA, 30 bp, Homo sapiens
  source 1..30: mol_type = unassigned DNA
actgcatcattcatacagtcctggagggaa

SEQ ID NO: 5029 - RNA, 36 nt, Homo sapiens
  source 1..36: mol_type = unassigned RNA
gcaaccattgattagaagtatgcgaactgtaaaaag

SEQ ID NO: 5030 - DNA, 36 bp, Homo sapiens
  source 1..36: mol_type = unassigned DNA
gcaaccattgattagaagtatgcgaactgtaaaaag

SEQ ID NO: 5031 - DNA, 36 bp, Homo sapiens
  source 1..36: mol_type = unassigned DNA
ctttttacagttcgcatacttctaatcaatggttgc

SEQ ID NO: 5032 - RNA, 46 nt, Homo sapiens
  source 1..46: mol_type = unassigned RNA
tatgtattgagttattgtttgtttggttggttggttggttttaaag

SEQ ID NO: 5033 - DNA, 46 bp, Homo sapiens
  source 1..46: mol_type = unassigned DNA
tatgtattgagttattgtttgtttggttggttggttggttttaaag

SEQ ID NO: 5034 - DNA, 46 bp, Homo sapiens
  source 1..46: mol_type = unassigned DNA
ctttaaaaccaaccaaccaaccaaacaaacaataactcaatacata

SEQ ID NO: 5035 - RNA, 55 nt, Homo sapiens
  source 1..55: mol_type = unassigned RNA
gttatttcagtggaagaattaactggtacacccaagccaatggactggattccta

SEQ ID NO: 5036 - DNA, 55 bp, Homo sapiens
  source 1..55: mol_type = unassigned DNA
gttatttcagtggaagaattaactggtacacccaagccaatggactggattccta

SEQ ID NO: 5037 - DNA, 55 bp, Homo sapiens
  source 1..55: mol_type = unassigned DNA
taggaatccagtccattggcttgggtgtaccagttaattcttccactgaaataac

SEQ ID NO: 5038 - RNA, 62 nt, Homo sapiens
  source 1..62: mol_type = unassigned RNA
acaactttaaatatgcccaccatcactctggtacgacagtggcattggtagaactctctttc

SEQ ID NO: 5039 - DNA, 62 bp, Homo sapiens
  source 1..62: mol_type = unassigned DNA
acaactttaaatatgcccaccatcactctggtacgacagtggcattggtagaactctctttc

SEQ ID NO: 5040 - DNA, 62 bp, Homo sapiens
  source 1..62: mol_type = unassigned DNA
gaaagagagttctaccaatgccactgtcgtaccagagtgatggtgggcatatttaaagttgt

SEQ ID NO: 5041 - RNA, 62 nt, Homo sapiens
  source 1..62: mol_type = unassigned RNA
tgcgaataacagtccccgtggccatccctgtgagggtgacgttagcattacccccaacctca

SEQ ID NO: 5042 - DNA, 62 bp, Homo sapiens
  source 1..62: mol_type = unassigned DNA
tgcgaataacagtccccgtggccatccctgtgagggtgacgttagcattacccccaacctca

SEQ ID NO: 5043 - DNA, 62 bp, Homo sapiens
  source 1..62: mol_type = unassigned DNA
tgaggttgggggtaatgctaacgtcaccctcacagggatggccacggggactgttattcgca

SEQ ID NO: 5044 - RNA, 27 nt, Homo sapiens
  source 1..27: mol_type = unassigned RNA
ccaaatggcaattgtagaattcagaaa

SEQ ID NO: 5045 - DNA, 27 bp, Homo sapiens
  source 1..27: mol_type = unassigned DNA
ccaaatggcaattgtagaattcagaaa

SEQ ID NO: 5046 - DNA, 27 bp, Homo sapiens
  source 1..27: mol_type = unassigned DNA
tttctgaattctacaattgccatttgg

SEQ ID NO: 5047 - RNA, 29 nt, Homo sapiens
  source 1..29: mol_type = unassigned RNA
cgtaatcttacctggacactttctaatct

SEQ ID NO: 5048 - DNA, 29 bp, Homo sapiens
  source 1..29: mol_type = unassigned DNA
cgtaatcttacctggacactttctaatct

SEQ ID NO: 5049 - DNA, 29 bp, Homo sapiens
  source 1..29: mol_type = unassigned DNA
agattagaaagtgtccaggtaagattacg

SEQ ID NO: 5050 - RNA, 43 nt, Homo sapiens
  source 1..43: mol_type = unassigned RNA
cactgggagaaaccagttcttgacctcatggtgctgatggttt

SEQ ID NO: 5051 - DNA, 43 bp, Homo sapiens
  source 1..43: mol_type = unassigned DNA
cactgggagaaaccagttcttgacctcatggtgctgatggttt

SEQ ID NO: 5052 - DNA, 43 bp, Homo sapiens
  source 1..43: mol_type = unassigned DNA
aaaccatcagcaccatgaggtcaagaactggtttctcccagtg

SEQ ID NO: 5053 - RNA, 35 nt, Homo sapiens
  source 1..35: mol_type = unassigned RNA
ttcctggagaccttggcgcccctggcccctctgga

SEQ ID NO: 5054 - DNA, 35 bp, Homo sapiens
  source 1..35: mol_type = unassigned DNA
ttcctggagaccttggcgcccctggcccctctgga

SEQ ID NO: 5055 - DNA, 35 bp, Homo sapiens
  source 1..35: mol_type = unassigned DNA
tccagaggggccaggggcgccaaggtctccaggaa

SEQ ID NO: 5056 - RNA, 23 nt, Homo sapiens
  source 1..23: mol_type = unassigned RNA
gccacaccagtgctgggctaaca

SEQ ID NO: 5057 - DNA, 23 bp, Homo sapiens
  source 1..23: mol_type = unassigned DNA
gccacaccagtgctgggctaaca

SEQ ID NO: 5058 - DNA, 23 bp, Homo sapiens
  source 1..23: mol_type = unassigned DNA
tgttagcccagcactggtgtggc

SEQ ID NO: 5059 - RNA, 24 nt, Homo sapiens
  source 1..24: mol_type = unassigned RNA
ttgaggtatttgtttgactggtga

SEQ ID NO: 5060 - DNA, 24 bp, Homo sapiens
  source 1..24: mol_type = unassigned DNA
ttgaggtatttgtttgactggtga

SEQ ID NO: 5061 - DNA, 24 bp, Homo sapiens
  source 1..24: mol_type = unassigned DNA
tcaccagtcaaacaaatacctcaa

SEQ ID NO: 5062 - RNA, 30 nt, Homo sapiens
  source 1..30: mol_type = unassigned RNA
gaaaagagctcccggaccttcagaagctgc

SEQ ID NO: 5063 - DNA, 30 bp, Homo sapiens
  source 1..30: mol_type = unassigned DNA
gaaaagagctcccggaccttcagaagctgc

SEQ ID NO: 5064 - DNA, 30 bp, Homo sapiens
  source 1..30: mol_type = unassigned DNA
gcagcttctgaaggtccgggagctcttttc

SEQ ID NO: 5065 - RNA, 29 nt, Homo sapiens
  source 1..29: mol_type = unassigned RNA
agaacagttaacagatcgctctgaaatta

SEQ ID NO: 5066 - DNA, 29 bp, Homo sapiens
  source 1..29: mol_type = unassigned DNA
agaacagttaacagatcgctctgaaatta

SEQ ID NO: 5067 - DNA, 29 bp, Homo sapiens
  source 1..29: mol_type = unassigned DNA
taatttcagagcgatctgttaactgttct

SEQ ID NO: 5068 - RNA, 58 nt, Homo sapiens
  source 1..58: mol_type = unassigned RNA
catggttctggaggctgagaagtccaagattaaggcactggtagattcaatgtctggt

SEQ ID NO: 5069 - DNA, 58 bp, Homo sapiens
  source 1..58: mol_type = unassigned DNA
catggttctggaggctgagaagtccaagattaaggcactggtagattcaatgtctggt

SEQ ID NO: 5070 - DNA, 58 bp, Homo sapiens
  source 1..58: mol_type = unassigned DNA
accagacattgaatctaccagtgccttaatcttggacttctcagcctccagaaccatg

SEQ ID NO: 5071 - RNA, 129 nt, Homo sapiens
  source 1..129: mol_type = unassigned RNA
atggggtttcttcatgttggccaggatggtctcgatgtcttgacctcatgatccacctgccttggcctcccaaagtgctgggattacaagcatgagccaccgtgcctggcctgagccattctactttta

SEQ ID NO: 5072 - DNA, 129 bp, Homo sapiens
  source 1..129: mol_type = unassigned DNA
atggggtttcttcatgttggccaggatggtctcgatgtcttgacctcatgatccacctgccttggcctcccaaagtgctgggattacaagcatgagccaccgtgcctggcctgagccattctactttta

SEQ ID NO: 5073 - DNA, 129 bp, Homo sapiens
  source 1..129: mol_type = unassigned DNA
taaaagtagaatggctcaggccaggcacggtggctcatgcttgtaatcccagcactttgggaggccaaggcaggtggatcatgaggtcaagacatcgagaccatcctggccaacatgaagaaaccccat

SEQ ID NO: 5074 - RNA, 45 nt, Homo sapiens
  source 1..45: mol_type = unassigned RNA
tttgcatgatgacaaaacaggactgaaaagctcaatacatattgc

SEQ ID NO: 5075 - DNA, 45 bp, Homo sapiens
  source 1..45: mol_type = unassigned DNA
tttgcatgatgacaaaacaggactgaaaagctcaatacatattgc

SEQ ID NO: 5076 - DNA, 45 bp, Homo sapiens
  source 1..45: mol_type = unassigned DNA
gcaatatgtattgagcttttcagtcctgttttgtcatcatgcaaa

SEQ ID NO: 5077 - RNA, 31 nt, Homo sapiens
  source 1..31: mol_type = unassigned RNA
tgtttgtaatggtataactcaggggttagca

SEQ ID NO: 5078 - DNA, 31 bp, Homo sapiens
  source 1..31: mol_type = unassigned DNA
tgtttgtaatggtataactcaggggttagca

SEQ ID NO: 5079 - DNA, 31 bp, Homo sapiens
  source 1..31: mol_type = unassigned DNA
tgctaacccctgagttataccattacaaaca

SEQ ID NO: 5080 - RNA, 39 nt, Homo sapiens
  source 1..39: mol_type = unassigned RNA
aagtcgagagcttgctgtcactggtaggattcaagcaag

SEQ ID NO: 5081 - DNA, 39 bp, Homo sapiens
  source 1..39: mol_type = unassigned DNA
aagtcgagagcttgctgtcactggtaggattcaagcaag

SEQ ID NO: 5082 - DNA, 39 bp, Homo sapiens
  source 1..39: mol_type = unassigned DNA
cttgcttgaatcctaccagtgacagcaagctctcgactt

SEQ ID NO: 5083 - RNA, 23 nt, Homo sapiens
  source 1..23: mol_type = unassigned RNA
tagtgtataaggttgttcgtttc

SEQ ID NO: 5084 - DNA, 23 bp, Homo sapiens
  source 1..23: mol_type = unassigned DNA
tagtgtataaggttgttcgtttc

SEQ ID NO: 5085 - DNA, 23 bp, Homo sapiens
  source 1..23: mol_type = unassigned DNA
gaaacgaacaaccttatacacta

SEQ ID NO: 5086 - RNA, 80 nt, Homo sapiens
  source 1..80: mol_type = unassigned RNA
ctcaaacaccactgtcccagataggcctcgtgaccgcaggactagaccacggttctctgcggagggcgtcagctccgtga

SEQ ID NO: 5087 - DNA, 80 bp, Homo sapiens
  source 1..80: mol_type = unassigned DNA
ctcaaacaccactgtcccagataggcctcgtgaccgcaggactagaccacggttctctgcggagggcgtcagctccgtga

SEQ ID NO: 5088 - DNA, 80 bp, Homo sapiens
  source 1..80: mol_type = unassigned DNA
tcacggagctgacgccctccgcagagaaccgtggtctagtcctgcggtcacgaggcctatctgggacagtggtgtttgag

SEQ ID NO: 5089 - RNA, 29 nt, Homo sapiens
  source 1..29: mol_type = unassigned RNA
ggagtctctgttagagcgaggtgagaagc

SEQ ID NO: 5090 - DNA, 29 bp, Homo sapiens
  source 1..29: mol_type = unassigned DNA
ggagtctctgttagagcgaggtgagaagc

SEQ ID NO: 5091 - DNA, 29 bp, Homo sapiens
  source 1..29: mol_type = unassigned DNA
gcttctcacctcgctctaacagagactcc

SEQ ID NO: 5092 - RNA, 91 nt, Homo sapiens
  source 1..91: mol_type = unassigned RNA
tttgctctgttttgttttgtttgacagcctgggttggtggttttatagccatttccatcatcagtttcctgtctctgctgggggttatctt

SEQ ID NO: 5093 - DNA, 91 bp, Homo sapiens
  source 1..91: mol_type = unassigned DNA
tttgctctgttttgttttgtttgacagcctgggttggtggttttatagccatttccatcatcagtttcctgtctctgctgggggttatctt

SEQ ID NO: 5094 - DNA, 91 bp, Homo sapiens
  source 1..91: mol_type = unassigned DNA
aagataacccccagcagagacaggaaactgatgatggaaatggctataaaaccaccaacccaggctgtcaaacaaaacaaaacagagcaaa

SEQ ID NO: 5095 - RNA, 24 nt, Homo sapiens
  source 1..24: mol_type = unassigned RNA
cattttgcactggtggaagtcagg

SEQ ID NO: 5096 - DNA, 24 bp, Homo sapiens
  source 1..24: mol_type = unassigned DNA
cattttgcactggtggaagtcagg

SEQ ID NO: 5097 - DNA, 24 bp, Homo sapiens
  source 1..24: mol_type = unassigned DNA
cctgacttccaccagtgcaaaatg

SEQ ID NO: 5098 - RNA, 84 nt, Homo sapiens
  source 1..84: mol_type = unassigned RNA
agcattgttcaatagaatttctgcaatgatgaaaatgtagctactgagcacttccaatgtgactagtacaactgaggaattgag

SEQ ID NO: 5099 - DNA, 84 bp, Homo sapiens
  source 1..84: mol_type = unassigned DNA
agcattgttcaatagaatttctgcaatgatgaaaatgtagctactgagcacttccaatgtgactagtacaactgaggaattgag

SEQ ID NO: 5100 - DNA, 84 bp, Homo sapiens
  source 1..84: mol_type = unassigned DNA
ctcaattcctcagttgtactagtcacattggaagtgctcagtagctacattttcatcattgcagaaattctattgaacaatgct

SEQ ID NO: 5101 - RNA, 29 nt, Homo sapiens
  source 1..29: mol_type = unassigned RNA
tagaaatacaggacatgatagttggaggt

SEQ ID NO: 5102 - DNA, 29 bp, Homo sapiens
  source 1..29: mol_type = unassigned DNA
tagaaatacaggacatgatagttggaggt

SEQ ID NO: 5103 - DNA, 29 bp, Homo sapiens
  source 1..29: mol_type = unassigned DNA
acctccaactatcatgtcctgtatttcta

SEQ ID NO: 5104 - RNA, 28 nt, Homo sapiens
  source 1..28: mol_type = unassigned RNA
tctcgctggctacctgacaccggggctt

SEQ ID NO: 5105 - DNA, 28 bp, Homo sapiens
  source 1..28: mol_type = unassigned DNA
tctcgctggctacctgacaccggggctt

SEQ ID NO: 5106 - DNA, 28 bp, Homo sapiens
  source 1..28: mol_type = unassigned DNA
aagccccggtgtcaggtagccagcgaga

SEQ ID NO: 5107 - RNA, 58 nt, Homo sapiens
  source 1..58: mol_type = unassigned RNA
taggttagcagacatggtgacttttcaaagcggctgtgctcctggggaggataaatgg

SEQ ID NO: 5108 - DNA, 58 bp, Homo sapiens
  source 1..58: mol_type = unassigned DNA
taggttagcagacatggtgacttttcaaagcggctgtgctcctggggaggataaatgg

SEQ ID NO: 5109 - DNA, 58 bp, Homo sapiens
  source 1..58: mol_type = unassigned DNA
ccatttatcctccccaggagcacagccgctttgaaaagtcaccatgtctgctaaccta

SEQ ID NO: 5110 - RNA, 23 nt, Homo sapiens
  source 1..23: mol_type = unassigned RNA
tgatatattagtttgtctgttta

SEQ ID NO: 5111 - DNA, 23 bp, Homo sapiens
  source 1..23: mol_type = unassigned DNA
tgatatattagtttgtctgttta

SEQ ID NO: 5112 - DNA, 23 bp, Homo sapiens
  source 1..23: mol_type = unassigned DNA
taaacagacaaactaatatatca

SEQ ID NO: 5113 - RNA, 31 nt, Homo sapiens
  source 1..31: mol_type = unassigned RNA
acatcctgcgcggactccacccaaggcaacc

SEQ ID NO: 5114 - DNA, 31 bp, Homo sapiens
  source 1..31: mol_type = unassigned DNA
acatcctgcgcggactccacccaaggcaacc

SEQ ID NO: 5115 - DNA, 31 bp, Homo sapiens
  source 1..31: mol_type = unassigned DNA
ggttgccttgggtggagtccgcgcaggatgt

SEQ ID NO: 5116 - RNA, 38 nt, Homo sapiens
  source 1..38: mol_type = unassigned RNA
gatcaaaacgttgtaccagaaactacctctgaaggcta

SEQ ID NO: 5117 - DNA, 38 bp, Homo sapiens
  source 1..38: mol_type = unassigned DNA
gatcaaaacgttgtaccagaaactacctctgaaggcta

SEQ ID NO: 5118 - DNA, 38 bp, Homo sapiens
  source 1..38: mol_type = unassigned DNA
tagccttcagaggtagtttctggtacaacgttttgatc

SEQ ID NO: 5119 - RNA, 73 nt, Homo sapiens
  source 1..73: mol_type = unassigned RNA
tttaatcactattctactttctctctctctgattttgactattctaagtatctcgtatgagtggaaccacaca

SEQ ID NO: 5120 - DNA, 73 bp, Homo sapiens
  source 1..73: mol_type = unassigned DNA
tttaatcactattctactttctctctctctgattttgactattctaagtatctcgtatgagtggaaccacaca

SEQ ID NO: 5121 - DNA, 73 bp, Homo sapiens
  source 1..73: mol_type = unassigned DNA
tgtgtggttccactcatacgagatacttagaatagtcaaaatcagagagagagaaagtagaatagtgattaaa

SEQ ID NO: 5122 - RNA, 179 nt, Homo sapiens
  source 1..179: mol_type = unassigned RNA
ttatgacaaaggaggaattgagcaaacaatttgtatgttggatggtgtgtttgcatttgttttactggatactgccaataagaaagtgttcctgggtagagatacatatggagtcagacctttgtttaaagcaatgacagaagatggatttttggctgtatgttcagaagctaaaggta

SEQ ID NO: 5123 - DNA, 179 bp, Homo sapiens
  source 1..179: mol_type = unassigned DNA
ttatgacaaaggaggaattgagcaaacaatttgtatgttggatggtgtgtttgcatttgttttactggatactgccaataagaaagtgttcctgggtagagatacatatggagtcagacctttgtttaaagcaatgacagaagatggatttttggctgtatgttcagaagctaaaggta

SEQ ID NO: 5124 - DNA, 179 bp, Homo sapiens
  source 1..179: mol_type = unassigned DNA
tacctttagcttctgaacatacagccaaaaatccatcttctgtcattgctttaaacaaaggtctgactccatatgtatctctacccaggaacactttcttattggcagtatccagtaaaacaaatgcaaacacaccatccaacatacaaattgtttgctcaattcctcctttgtcataa

SEQ ID NO: 5125 - RNA, 33 nt, Homo sapiens
  source 1..33: mol_type = unassigned RNA
cccacagatgtccagaccaagatagaacctgtc

SEQ ID NO: 5126 - DNA, 33 bp, Homo sapiens
  source 1..33: mol_type = unassigned DNA
cccacagatgtccagaccaagatagaacctgtc

SEQ ID NO: 5127 - DNA, 33 bp, Homo sapiens
  source 1..33: mol_type = unassigned DNA
gacaggttctatcttggtctggacatctgtggg

SEQ ID NO: 5128 - RNA, 32 nt, Homo sapiens
  source 1..32: mol_type = unassigned RNA
ccatttgttgttctctgaggaacctccatatt

SEQ ID NO: 5129 - DNA, 32 bp, Homo sapiens
  source 1..32: mol_type = unassigned DNA
ccatttgttgttctctgaggaacctccatatt

SEQ ID NO: 5130 - DNA, 32 bp, Homo sapiens
  source 1..32: mol_type = unassigned DNA
aatatggaggttcctcagagaacaacaaatgg

SEQ ID NO: 5131 - RNA, 31 nt, Homo sapiens
  source 1..31: mol_type = unassigned RNA
catgtgctatgatctctgaaaagacgttatc

SEQ ID NO: 5132 - DNA, 31 bp, Homo sapiens
  source 1..31: mol_type = unassigned DNA
catgtgctatgatctctgaaaagacgttatc

SEQ ID NO: 5133 - DNA, 31 bp, Homo sapiens
  source 1..31: mol_type = unassigned DNA
gataacgtcttttcagagatcatagcacatg

SEQ ID NO: 5134 - RNA, 29 nt, Homo sapiens
  source 1..29: mol_type = unassigned RNA
aaaccagcttggcaaggactctggctgct

SEQ ID NO: 5135 - DNA, 29 bp, Homo sapiens
  source 1..29: mol_type = unassigned DNA
aaaccagcttggcaaggactctggctgct

SEQ ID NO: 5136 - DNA, 29 bp, Homo sapiens
  source 1..29: mol_type = unassigned DNA
agcagccagagtccttgccaagctggttt

SEQ ID NO: 5137 - RNA, 33 nt, Homo sapiens
  source 1..33: mol_type = unassigned RNA
gatgattcgtgaccttctgaatctggcaggttt

SEQ ID NO: 5138 - DNA, 33 bp, Homo sapiens
  source 1..33: mol_type = unassigned DNA
gatgattcgtgaccttctgaatctggcaggttt

SEQ ID NO: 5139 - DNA, 33 bp, Homo sapiens
  source 1..33: mol_type = unassigned DNA
aaacctgccagattcagaaggtcacgaatcatc

SEQ ID NO: 5140 - RNA, 31 nt, Homo sapiens
  source 1..31: mol_type = unassigned RNA
gtgccttctgtctgctcgttagctttaatca

SEQ ID NO: 5141 - DNA, 31 bp, Homo sapiens
  source 1..31: mol_type = unassigned DNA
gtgccttctgtctgctcgttagctttaatca

SEQ ID NO: 5142 - DNA, 31 bp, Homo sapiens
  source 1..31: mol_type = unassigned DNA
tgattaaagctaacgagcagacagaaggcac

SEQ ID NO: 5143 - RNA, 112 nt, Homo sapiens
  source 1..112: mol_type = unassigned RNA
gcacagaaagtggctgacctggagtcatgtgcttgaatggtagatctcacaacaagtggttgtggaatgggggtgggcagtggaggaagtgggcccagagccaggtccccca

SEQ ID NO: 5144 - DNA, 112 bp, Homo sapiens
  source 1..112: mol_type = unassigned DNA
gcacagaaagtggctgacctggagtcatgtgcttgaatggtagatctcacaacaagtggttgtggaatgggggtgggcagtggaggaagtgggcccagagccaggtccccca

SEQ ID NO: 5145 - DNA, 112 bp, Homo sapiens
  source 1..112: mol_type = unassigned DNA
tgggggacctggctctgggcccacttcctccactgcccacccccattccacaaccacttgttgtgagatctaccattcaagcacatgactccaggtcagccactttctgtgc

SEQ ID NO: 5146 - RNA, 42 nt, Homo sapiens
  source 1..42: mol_type = unassigned RNA
tactgtattagtttttatcattgctgtgacaaatcaccaaaa

SEQ ID NO: 5147 - DNA, 42 bp, Homo sapiens
  source 1..42: mol_type = unassigned DNA
tactgtattagtttttatcattgctgtgacaaatcaccaaaa

SEQ ID NO: 5148 - DNA, 42 bp, Homo sapiens
  source 1..42: mol_type = unassigned DNA
ttttggtgatttgtcacagcaatgataaaaactaatacagta

SEQ ID NO: 5149 - RNA, 39 nt, Homo sapiens
  source 1..39: mol_type = unassigned RNA
tttcctgatcagctgtcttttcattctgctcgcttgtat

SEQ ID NO: 5150 - DNA, 39 bp, Homo sapiens
  source 1..39: mol_type = unassigned DNA
tttcctgatcagctgtcttttcattctgctcgcttgtat

SEQ ID NO: 5151 - DNA, 39 bp, Homo sapiens
  source 1..39: mol_type = unassigned DNA
atacaagcgagcagaatgaaaagacagctgatcaggaaa

SEQ ID NO: 5152 - RNA, 146 nt, Homo sapiens
  source 1..146: mol_type = unassigned RNA
gagacattgcattatttgaccagagttgaagtgacagaatttgaagatattaaatcaggttacagagtagatttttattttgatgaaaatccttactttgaaaataaagttctctccaaagaatttcatctgaatgagagtggtaa

SEQ ID NO: 5153 - DNA, 146 bp, Homo sapiens
  source 1..146: mol_type = unassigned DNA
gagacattgcattatttgaccagagttgaagtgacagaatttgaagatattaaatcaggttacagagtagatttttattttgatgaaaatccttactttgaaaataaagttctctccaaagaatttcatctgaatgagagtggtaa

SEQ ID NO: 5154 - DNA, 146 bp, Homo sapiens
  source 1..146: mol_type = unassigned DNA
ttaccactctcattcagatgaaattctttggagagaactttattttcaaagtaaggattttcatcaaaataaaaatctactctgtaacctgatttaatatcttcaaattctgtcacttcaactctggtcaaataatgcaatgtctc

SEQ ID NO: 5155 - RNA, 26 nt, Homo sapiens
  source 1..26: mol_type = unassigned RNA
ctggtgaatgtgaacgctccgggtaa

SEQ ID NO: 5156 - DNA, 26 bp, Homo sapiens
  source 1..26: mol_type = unassigned DNA
ctggtgaatgtgaacgctccgggtaa

SEQ ID NO: 5157 - DNA, 26 bp, Homo sapiens
  source 1..26: mol_type = unassigned DNA
ttacccggagcgttcacattcaccag

SEQ ID NO: 5158 - RNA, 30 nt, Homo sapiens
  source 1..30: mol_type = unassigned RNA
ttacactatggcaatgataaatctcacaca

SEQ ID NO: 5159 - DNA, 30 bp, Homo sapiens
  source 1..30: mol_type = unassigned DNA
ttacactatggcaatgataaatctcacaca

SEQ ID NO: 5160 - DNA, 30 bp, Homo sapiens
  source 1..30: mol_type = unassigned DNA
tgtgtgagatttatcattgccatagtgtaa

SEQ ID NO: 5161 - RNA, 30 nt, Homo sapiens
  source 1..30: mol_type = unassigned RNA
cagccaagatcctgagctccctgacaaaaa

SEQ ID NO: 5162 - DNA, 30 bp, Homo sapiens
  source 1..30: mol_type = unassigned DNA
cagccaagatcctgagctccctgacaaaaa

SEQ ID NO: 5163 - DNA, 30 bp, Homo sapiens
  source 1..30: mol_type = unassigned DNA
tttttgtcagggagctcaggatcttggctg

SEQ ID NO: 5164 - RNA, 29 nt, Homo sapiens
  source 1..29: mol_type = unassigned RNA
agggcaacatgcaaccagacctcggctct

SEQ ID NO: 5165 - DNA, 29 bp, Homo sapiens
  source 1..29: mol_type = unassigned DNA
agggcaacatgcaaccagacctcggctct

SEQ ID NO: 5166 - DNA, 29 bp, Homo sapiens
  source 1..29: mol_type = unassigned DNA
agagccgaggtctggttgcatgttgccct

SEQ ID NO: 5167 - RNA, 29 nt, Homo sapiens
  source 1..29: mol_type = unassigned RNA
gccgttttttcgtccggctccagttggag

SEQ ID NO: 5168 - DNA, 29 bp, Homo sapiens
  source 1..29: mol_type = unassigned DNA
gccgttttttcgtccggctccagttggag

SEQ ID NO: 5169 - DNA, 29 bp, Homo sapiens
  source 1..29: mol_type = unassigned DNA
ctccaactggagccggacgaaaaaacggc

SEQ ID NO: 5170 - RNA, 42 nt, Homo sapiens
  source 1..42: mol_type = unassigned RNA
gcttcgctggaaacctctggaggtcatctcggctgttcctga

SEQ ID NO: 5171 - DNA, 42 bp, Homo sapiens
  source 1..42: mol_type = unassigned DNA
gcttcgctggaaacctctggaggtcatctcggctgttcctga

SEQ ID NO: 5172 - DNA, 42 bp, Homo sapiens
  source 1..42: mol_type = unassigned DNA
tcaggaacagccgagatgacctccagaggtttccagcgaagc

SEQ ID NO: 5173 - RNA, 34 nt, Homo sapiens
  source 1..34: mol_type = unassigned RNA
agaaactgaagccagacactccttacactatcac

SEQ ID NO: 5174 - DNA, 34 bp, Homo sapiens
  source 1..34: mol_type = unassigned DNA
agaaactgaagccagacactccttacactatcac

SEQ ID NO: 5175 - DNA, 34 bp, Homo sapiens
  source 1..34: mol_type = unassigned DNA
gtgatagtgtaaggagtgtctggcttcagtttct

SEQ ID NO: 5176 - RNA, 112 nt, Homo sapiens
  source 1..112: mol_type = unassigned RNA
ataaaaatctgctgcattctgccgcaggccaccttttcccttttggacacctctctctcacaaaagacagacctgctctcctctctcctttctcctgcctattaaactttcc

SEQ ID NO: 5177 - DNA, 112 bp, Homo sapiens
  source 1..112: mol_type = unassigned DNA
ataaaaatctgctgcattctgccgcaggccaccttttcccttttggacacctctctctcacaaaagacagacctgctctcctctctcctttctcctgcctattaaactttcc

SEQ ID NO: 5178 - DNA, 112 bp, Homo sapiens
  source 1..112: mol_type = unassigned DNA
ggaaagtttaataggcaggagaaaggagagaggagagcaggtctgtcttttgtgagagagaggtgtccaaaagggaaaaggtggcctgcggcagaatgcagcagatttttat

SEQ ID NO: 5179 - RNA, 162 nt, Homo sapiens
  source 1..162: mol_type = unassigned RNA
aggcgaccaagagaaaactgccccctgcgtcgagactgtgccatagacggtactataatgccatgaatatttttgtgcataaaaccttctctgcacttagcattctctgcagagtgctaaaaggagatgctgtatgtggctcctttcctccaacccccaact

SEQ ID NO: 5180 - DNA, 162 bp, Homo sapiens
  source 1..162: mol_type = unassigned DNA
aggcgaccaagagaaaactgccccctgcgtcgagactgtgccatagacggtactataatgccatgaatatttttgtgcataaaaccttctctgcacttagcattctctgcagagtgctaaaaggagatgctgtatgtggctcctttcctccaacccccaact

SEQ ID NO: 5181 - DNA, 162 bp, Homo sapiens
  source 1..162: mol_type = unassigned DNA
agttgggggttggaggaaaggagccacatacagcatctccttttagcactctgcagagaatgctaagtgcagagaaggttttatgcacaaaaatattcatggcattatagtaccgtctatggcacagtctcgacgcagggggcagttttctcttggtcgcct

SEQ ID NO: 5182 - RNA, 31 nt, Homo sapiens
  source 1..31: mol_type = unassigned RNA
ttaactcctggcctaacagcagcagccgttc

SEQ ID NO: 5183 - DNA, 31 bp, Homo sapiens
  source 1..31: mol_type = unassigned DNA
ttaactcctggcctaacagcagcagccgttc

SEQ ID NO: 5184 - DNA, 31 bp, Homo sapiens
  source 1..31: mol_type = unassigned DNA
gaacggctgctgctgttaggccaggagttaa

SEQ ID NO: 5185 - RNA, 50 nt, Homo sapiens
  source 1..50: mol_type = unassigned RNA
gcagaaagatcgtttgagcccaggtaggaggctgcagtgagctatgattg

SEQ ID NO: 5186 - DNA, 50 bp, Homo sapiens
  source 1..50: mol_type = unassigned DNA
gcagaaagatcgtttgagcccaggtaggaggctgcagtgagctatgattg

SEQ ID NO: 5187 - DNA, 50 bp, Homo sapiens
  source 1..50: mol_type = unassigned DNA
caatcatagctcactgcagcctcctacctgggctcaaacgatctttctgc

SEQ ID NO: 5188 - RNA, 31 nt, Homo sapiens
  source 1..31: mol_type = unassigned RNA
cattctggtggacctggaacccggaaccatg

SEQ ID NO: 5189 - DNA, 31 bp, Homo sapiens
  source 1..31: mol_type = unassigned DNA
cattctggtggacctggaacccggaaccatg

SEQ ID NO: 5190 - DNA, 31 bp, Homo sapiens
  source 1..31: mol_type = unassigned DNA
catggttccgggttccaggtccaccagaatg

SEQ ID NO: 5191 - RNA, 77 nt, Homo sapiens
  source 1..77: mol_type = unassigned RNA
atttctcaaaggaagaactcccactcgaggatggaagaatcaccagtgcctgctcccgcccttcctgaaggaccagg

SEQ ID NO: 5192 - DNA, 77 bp, Homo sapiens
  source 1..77: mol_type = unassigned DNA
atttctcaaaggaagaactcccactcgaggatggaagaatcaccagtgcctgctcccgcccttcctgaaggaccagg

SEQ ID NO: 5193 - DNA, 77 bp, Homo sapiens
  source 1..77: mol_type = unassigned DNA
cctggtccttcaggaagggcgggagcaggcactggtgattcttccatcctcgagtgggagttcttcctttgagaaat

SEQ ID NO: 5194 - RNA, 29 nt, Homo sapiens
  source 1..29: mol_type = unassigned RNA
tcgcgcgctctggcctggctggggccagt

SEQ ID NO: 5195 - DNA, 29 bp, Homo sapiens
  source 1..29: mol_type = unassigned DNA
tcgcgcgctctggcctggctggggccagt

SEQ ID NO: 5196 - DNA, 29 bp, Homo sapiens
  source 1..29: mol_type = unassigned DNA
actggccccagccaggccagagcgcgcga

SEQ ID NO: 5197 - RNA, 55 nt, Homo sapiens
  source 1..55: mol_type = unassigned RNA
tagtctgaaatgtagaactcacagcttgcactttctcctgtcccaagctccaatt

SEQ ID NO: 5198 - DNA, 55 bp, Homo sapiens
  source 1..55: mol_type = unassigned DNA
tagtctgaaatgtagaactcacagcttgcactttctcctgtcccaagctccaatt

SEQ ID NO: 5199 - DNA, 55 bp, Homo sapiens
  source 1..55: mol_type = unassigned DNA
aattggagcttgggacaggagaaagtgcaagctgtgagttctacatttcagacta

SEQ ID NO: 5200 - RNA, 199 nt, Homo sapiens
  source 1..199: mol_type = unassigned RNA
catttctctatgaaatgtctggctggagattctcccaaactatgttcatcttagctgcacagtgtatcaacacttccagagacccttaacctcacccctccctctggaaacttcctcaccatcaactgctactactggcaggtctggattcattccttccctccttccaaatccacaatttaaaaggccagcacagtgg

SEQ ID NO: 5201 - DNA, 199 bp, Homo sapiens
  source 1..199: mol_type = unassigned DNA
catttctctatgaaatgtctggctggagattctcccaaactatgttcatcttagctgcacagtgtatcaacacttccagagacccttaacctcacccctccctctggaaacttcctcaccatcaactgctactactggcaggtctggattcattccttccctccttccaaatccacaatttaaaaggccagcacagtgg

SEQ ID NO: 5202 - DNA, 199 bp, Homo sapiens
  source 1..199: mol_type = unassigned DNA
ccactgtgctggccttttaaattgtggatttggaaggagggaaggaatgaatccagacctgccagtagtagcagttgatggtgaggaagtttccagagggaggggtgaggttaagggtctctggaagtgttgatacactgtgcagctaagatgaacatagtttgggagaatctccagccagacatttcatagagaaatg

SEQ ID NO: 5203 - RNA, 32 nt, Homo sapiens
  source 1..32: mol_type = unassigned RNA
acacctggctgggctgggcctgactgaggcca

SEQ ID NO: 5204 - DNA, 32 bp, Homo sapiens
  source 1..32: mol_type = unassigned DNA
acacctggctgggctgggcctgactgaggcca

SEQ ID NO: 5205 - DNA, 32 bp, Homo sapiens
  source 1..32: mol_type = unassigned DNA
tggcctcagtcaggcccagcccagccaggtgt

SEQ ID NO: 5206 - RNA, 56 nt, Homo sapiens
  source 1..56: mol_type = unassigned RNA
ttgactgacttcagtcactgtagaattgactgttctaaggggtggggtgaagtggc

SEQ ID NO: 5207 - DNA, 56 bp, Homo sapiens
  source 1..56: mol_type = unassigned DNA
ttgactgacttcagtcactgtagaattgactgttctaaggggtggggtgaagtggc

SEQ ID NO: 5208 - DNA, 56 bp, Homo sapiens
  source 1..56: mol_type = unassigned DNA
gccacttcaccccaccccttagaacagtcaattctacagtgactgaagtcagtcaa

SEQ ID NO: 5209 - RNA, 22 nt, Homo sapiens
  source 1..22: mol_type = unassigned RNA
tcagttccctccagactttggg

SEQ ID NO: 5210 - DNA, 22 bp, Homo sapiens
  source 1..22: mol_type = unassigned DNA
tcagttccctccagactttggg

SEQ ID NO: 5211 - DNA, 22 bp, Homo sapiens
  source 1..22: mol_type = unassigned DNA
cccaaagtctggagggaactga

SEQ ID NO: 5212 - RNA, 30 nt, Homo sapiens
  source 1..30: mol_type = unassigned RNA
caagtgaagatgatggtctgtagaaatttt

SEQ ID NO: 5213 - DNA, 30 bp, Homo sapiens
  source 1..30: mol_type = unassigned DNA
caagtgaagatgatggtctgtagaaatttt

SEQ ID NO: 5214 - DNA, 30 bp, Homo sapiens
  source 1..30: mol_type = unassigned DNA
aaaatttctacagaccatcatcttcacttg

SEQ ID NO: 5215 - RNA, 122 nt, Homo sapiens
  source 1..122: mol_type = unassigned RNA
gctcatgtgatgatctgattagcatctgactcctgactagtctatgcagtaggggacctcatttgtttcagttgctgctctcactgtagagccctggacagtgcctggtgcgtcagaggtgc

SEQ ID NO: 5216 - DNA, 122 bp, Homo sapiens
  source 1..122: mol_type = unassigned DNA
gctcatgtgatgatctgattagcatctgactcctgactagtctatgcagtaggggacctcatttgtttcagttgctgctctcactgtagagccctggacagtgcctggtgcgtcagaggtgc

SEQ ID NO: 5217 - DNA, 122 bp, Homo sapiens
  source 1..122: mol_type = unassigned DNA
gcacctctgacgcaccaggcactgtccagggctctacagtgagagcagcaactgaaacaaatgaggtcccctactgcatagactagtcaggagtcagatgctaatcagatcatcacatgagc

SEQ ID NO: 5218 - RNA, 46 nt, Homo sapiens
  source 1..46: mol_type = unassigned RNA
ttgtctcttggttataatgcatggatcggggacttcaatctagtat

SEQ ID NO: 5219 - DNA, 46 bp, Homo sapiens
  source 1..46: mol_type = unassigned DNA
ttgtctcttggttataatgcatggatcggggacttcaatctagtat

SEQ ID NO: 5220 - DNA, 46 bp, Homo sapiens
  source 1..46: mol_type = unassigned DNA
atactagattgaagtccccgatccatgcattataaccaagagacaa

SEQ ID NO: 5221 - RNA, 119 nt, Homo sapiens
  source 1..119: mol_type = unassigned RNA
cccaccccgaggaaggctctggaggctccaatcactttcagcctctgctaccaagatgtccgaccctaccaataaaacttccagcagcggggcgcggtggctcacgcctgtaatcccag

SEQ ID NO: 5222 - DNA, 119 bp, Homo sapiens
  source 1..119: mol_type = unassigned DNA
cccaccccgaggaaggctctggaggctccaatcactttcagcctctgctaccaagatgtccgaccctaccaataaaacttccagcagcggggcgcggtggctcacgcctgtaatcccag

SEQ ID NO: 5223 - DNA, 119 bp, Homo sapiens
  source 1..119: mol_type = unassigned DNA
ctgggattacaggcgtgagccaccgcgccccgctgctggaagttttattggtagggtcggacatcttggtagcagaggctgaaagtgattggagcctccagagccttcctcggggtggg

SEQ ID NO: 5224 - RNA, 81 nt, Homo sapiens
  source 1..81: mol_type = unassigned RNA
ggcacacacctgtagtctcagctactcgtgaggctgaggcaggagaatcaacgtgaacccaggtggcggaagttgcagtga

SEQ ID NO: 5225 - DNA, 81 bp, Homo sapiens
  source 1..81: mol_type = unassigned DNA
ggcacacacctgtagtctcagctactcgtgaggctgaggcaggagaatcaacgtgaacccaggtggcggaagttgcagtga

SEQ ID NO: 5226 - DNA, 81 bp, Homo sapiens
  source 1..81: mol_type = unassigned DNA
tcactgcaacttccgccacctgggttcacgttgattctcctgcctcagcctcacgagtagctgagactacaggtgtgtgcc

SEQ ID NO: 5227 - RNA, 26 nt, Homo sapiens
  source 1..26: mol_type = unassigned RNA
tactttctttcggctctggtgaaaag

SEQ ID NO: 5228 - DNA, 26 bp, Homo sapiens
  source 1..26: mol_type = unassigned DNA
tactttctttcggctctggtgaaaag

SEQ ID NO: 5229 - DNA, 26 bp, Homo sapiens
  source 1..26: mol_type = unassigned DNA
cttttcaccagagccgaaagaaagta

SEQ ID NO: 5230 - RNA, 25 nt, Homo sapiens
  source 1..25: mol_type = unassigned RNA
tcttgccaatgggagaattcacttt

SEQ ID NO: 5231 - DNA, 25 bp, Homo sapiens
  source 1..25: mol_type = unassigned DNA
tcttgccaatgggagaattcacttt

SEQ ID NO: 5232 - DNA, 25 bp, Homo sapiens
  source 1..25: mol_type = unassigned DNA
aaagtgaattctcccattggcaaga

SEQ ID NO: 5233 - RNA, 59 nt, Homo sapiens
  source 1..59: mol_type = unassigned RNA
tggaaagcccttggcctattgaatgggtgtccattcaattggctggagggcttagaatt

SEQ ID NO: 5234 - DNA, 59 bp, Homo sapiens
  source 1..59: mol_type = unassigned DNA
tggaaagcccttggcctattgaatgggtgtccattcaattggctggagggcttagaatt

SEQ ID NO: 5235 - DNA, 59 bp, Homo sapiens
  source 1..59: mol_type = unassigned DNA
aattctaagccctccagccaattgaatggacacccattcaataggccaagggctttcca

SEQ ID NO: 5236 - RNA, 31 nt, Homo sapiens
  source 1..31: mol_type = unassigned RNA
gggattgtcttaccagagtatagaagctttg

SEQ ID NO: 5237 - DNA, 31 bp, Homo sapiens
  source 1..31: mol_type = unassigned DNA
gggattgtcttaccagagtatagaagctttg

SEQ ID NO: 5238 - DNA, 31 bp, Homo sapiens
  source 1..31: mol_type = unassigned DNA
caaagcttctatactctggtaagacaatccc

SEQ ID NO: 5239 - RNA, 32 nt, Homo sapiens
  source 1..32: mol_type = unassigned RNA
gctaacggtgagggctgactctgaactgtctc

SEQ ID NO: 5240 - DNA, 32 bp, Homo sapiens
  source 1..32: mol_type = unassigned DNA
gctaacggtgagggctgactctgaactgtctc

SEQ ID NO: 5241 - DNA, 32 bp, Homo sapiens
  source 1..32: mol_type = unassigned DNA
gagacagttcagagtcagccctcaccgttagc

SEQ ID NO: 5242 - RNA, 29 nt, Homo sapiens
  source 1..29: mol_type = unassigned RNA
tccctatggctgtccttctctgatcacac

SEQ ID NO: 5243 - DNA, 29 bp, Homo sapiens
  source 1..29: mol_type = unassigned DNA
tccctatggctgtccttctctgatcacac

SEQ ID NO: 5244 - DNA, 29 bp, Homo sapiens
  source 1..29: mol_type = unassigned DNA
gtgtgatcagagaaggacagccataggga

SEQ ID NO: 5245 - RNA, 35 nt, Homo sapiens
  source 1..35: mol_type = unassigned RNA
atctgccaatgatataactcacaagggagggagac

SEQ ID NO: 5246 - DNA, 35 bp, Homo sapiens
  source 1..35: mol_type = unassigned DNA
atctgccaatgatataactcacaagggagggagac

SEQ ID NO: 5247 - DNA, 35 bp, Homo sapiens
  source 1..35: mol_type = unassigned DNA
gtctccctcccttgtgagttatatcattggcagat

SEQ ID NO: 5248 - RNA, 27 nt, Homo sapiens
  source 1..27: mol_type = unassigned RNA
gtggtctggagtaaacgaatctgcctt

SEQ ID NO: 5249 - DNA, 27 bp, Homo sapiens
  source 1..27: mol_type = unassigned DNA
gtggtctggagtaaacgaatctgcctt

SEQ ID NO: 5250 - DNA, 27 bp, Homo sapiens
  source 1..27: mol_type = unassigned DNA
aaggcagattcgtttactccagaccac

SEQ ID NO: 5251 - RNA, 30 nt, Homo sapiens
  source 1..30: mol_type = unassigned RNA
tgaacaagctgtctgggctctaggaaacat

SEQ ID NO: 5252 - DNA, 30 bp, Homo sapiens
  source 1..30: mol_type = unassigned DNA
tgaacaagctgtctgggctctaggaaacat

SEQ ID NO: 5253 - DNA, 30 bp, Homo sapiens
  source 1..30: mol_type = unassigned DNA
atgtttcctagagcccagacagcttgttca

SEQ ID NO: 5254 - RNA, 30 nt, Homo sapiens
  source 1..30: mol_type = unassigned RNA
caggcagacacaggcttgggctctgctggg

SEQ ID NO: 5255 - DNA, 30 bp, Homo sapiens
  source 1..30: mol_type = unassigned DNA
caggcagacacaggcttgggctctgctggg

SEQ ID NO: 5256 - DNA, 30 bp, Homo sapiens
  source 1..30: mol_type = unassigned DNA
cccagcagagcccaagcctgtgtctgcctg

SEQ ID NO: 5257 - RNA, 31 nt, Homo sapiens
  source 1..31: mol_type = unassigned RNA
tttcagaacttctggacattttagacgacac

SEQ ID NO: 5258 - DNA, 31 bp, Homo sapiens
  source 1..31: mol_type = unassigned DNA
tttcagaacttctggacattttagacgacac

SEQ ID NO: 5259 - DNA, 31 bp, Homo sapiens
  source 1..31: mol_type = unassigned DNA
gtgtcgtctaaaatgtccagaagttctgaaa

SEQ ID NO: 5260 - RNA, 29 nt, Homo sapiens
  source 1..29: mol_type = unassigned RNA
tgtccgcagctgttgccaggccagggttc

SEQ ID NO: 5261 - DNA, 29 bp, Homo sapiens
  source 1..29: mol_type = unassigned DNA
tgtccgcagctgttgccaggccagggttc

SEQ ID NO: 5262 - DNA, 29 bp, Homo sapiens
  source 1..29: mol_type = unassigned DNA
gaaccctggcctggcaacagctgcggaca

SEQ ID NO: 5263 - RNA, 35 nt, Homo sapiens
  source 1..35: mol_type = unassigned RNA
cttggaatgagccatgctactggtactccatggtt

SEQ ID NO: 5264 - DNA, 35 bp, Homo sapiens
  source 1..35: mol_type = unassigned DNA
cttggaatgagccatgctactggtactccatggtt

SEQ ID NO: 5265 - DNA, 35 bp, Homo sapiens
  source 1..35: mol_type = unassigned DNA
aaccatggagtaccagtagcatggctcattccaag

SEQ ID NO: 5266 - RNA, 150 nt, Homo sapiens
  source 1..150: mol_type = unassigned RNA
ttgtatgtctaatattttaccaagtcactagagatgatgacccaggctaggaagttctgatttggtggcagatggacaaatgagtatttcccctctcctggcatctccatggcacctccttgtatctcctgagcattggaaatataccat

SEQ ID NO: 5267 - DNA, 150 bp, Homo sapiens
  source 1..150: mol_type = unassigned DNA
ttgtatgtctaatattttaccaagtcactagagatgatgacccaggctaggaagttctgatttggtggcagatggacaaatgagtatttcccctctcctggcatctccatggcacctccttgtatctcctgagcattggaaatataccat

SEQ ID NO: 5268 - DNA, 150 bp, Homo sapiens
  source 1..150: mol_type = unassigned DNA
atggtatatttccaatgctcaggagatacaaggaggtgccatggagatgccaggagaggggaaatactcatttgtccatctgccaccaaatcagaacttcctagcctgggtcatcatctctagtgacttggtaaaatattagacatacaa

SEQ ID NO: 5269 - RNA, 30 nt, Homo sapiens
  source 1..30: mol_type = unassigned RNA
gctcttcaaccagacgggctcctgcaaatt

SEQ ID NO: 5270 - DNA, 30 bp, Homo sapiens
  source 1..30: mol_type = unassigned DNA
gctcttcaaccagacgggctcctgcaaatt

SEQ ID NO: 5271 - DNA, 30 bp, Homo sapiens
  source 1..30: mol_type = unassigned DNA
aatttgcaggagcccgtctggttgaagagc

SEQ ID NO: 5272 - RNA, 51 nt, Homo sapiens
  source 1..51: mol_type = unassigned RNA
tgtgattgagacctttctgtgggccaggcatggtgctaagccctttatcta

SEQ ID NO: 5273 - DNA, 51 bp, Homo sapiens
  source 1..51: mol_type = unassigned DNA
tgtgattgagacctttctgtgggccaggcatggtgctaagccctttatcta

SEQ ID NO: 5274 - DNA, 51 bp, Homo sapiens
  source 1..51: mol_type = unassigned DNA
tagataaagggcttagcaccatgcctggcccacagaaaggtctcaatcaca

SEQ ID NO: 5275 - RNA, 28 nt, Homo sapiens
  source 1..28: mol_type = unassigned RNA
ttgtcctcacaggtcgcggagaggcgga

SEQ ID NO: 5276 - DNA, 28 bp, Homo sapiens
  source 1..28: mol_type = unassigned DNA
ttgtcctcacaggtcgcggagaggcgga

SEQ ID NO: 5277 - DNA, 28 bp, Homo sapiens
  source 1..28: mol_type = unassigned DNA
tccgcctctccgcgacctgtgaggacaa

SEQ ID NO: 5278 - RNA, 34 nt, Homo sapiens
  source 1..34: mol_type = unassigned RNA
tgcctttatccagatgaagtctgcggacagagca

SEQ ID NO: 5279 - DNA, 34 bp, Homo sapiens
  source 1..34: mol_type = unassigned DNA
tgcctttatccagatgaagtctgcggacagagca

SEQ ID NO: 5280 - DNA, 34 bp, Homo sapiens
  source 1..34: mol_type = unassigned DNA
tgctctgtccgcagacttcatctggataaaggca

SEQ ID NO: 5281 - RNA, 30 nt, Homo sapiens
  source 1..30: mol_type = unassigned RNA
cagagcggctggggaactggaccagcaggt

SEQ ID NO: 5282 - DNA, 30 bp, Homo sapiens
  source 1..30: mol_type = unassigned DNA
cagagcggctggggaactggaccagcaggt

SEQ ID NO: 5283 - DNA, 30 bp, Homo sapiens
  source 1..30: mol_type = unassigned DNA
acctgctggtccagttccccagccgctctg

SEQ ID NO: 5284 - RNA, 31 nt, Homo sapiens
  source 1..31: mol_type = unassigned RNA
ggaagggctgagttgctgcccttgcggccct

SEQ ID NO: 5285 - DNA, 31 bp, Homo sapiens
  source 1..31: mol_type = unassigned DNA
ggaagggctgagttgctgcccttgcggccct

SEQ ID NO: 5286 - DNA, 31 bp, Homo sapiens
  source 1..31: mol_type = unassigned DNA
agggccgcaagggcagcaactcagcccttcc

SEQ ID NO: 5287 - RNA, 61 nt, Homo sapiens
  source 1..61: mol_type = unassigned RNA
aagcctgctgcctgaggaacagaaggaaggtgcatgtggtggtgggggtggggtgagtggc

SEQ ID NO: 5288 - DNA, 61 bp, Homo sapiens
  source 1..61: mol_type = unassigned DNA
aagcctgctgcctgaggaacagaaggaaggtgcatgtggtggtgggggtggggtgagtggc

SEQ ID NO: 5289 - DNA, 61 bp, Homo sapiens
  source 1..61: mol_type = unassigned DNA
gccactcaccccacccccaccaccacatgcaccttccttctgttcctcaggcagcaggctt

SEQ ID NO: 5290 - RNA, 30 nt, Homo sapiens
  source 1..30: mol_type = unassigned RNA
cgtttgctccagagctgtcaggttagcgtg

SEQ ID NO: 5291 - DNA, 30 bp, Homo sapiens
  source 1..30: mol_type = unassigned DNA
cgtttgctccagagctgtcaggttagcgtg

SEQ ID NO: 5292 - DNA, 30 bp, Homo sapiens
  source 1..30: mol_type = unassigned DNA
cacgctaacctgacagctctggagcaaacg

SEQ ID NO: 5293 - RNA, 33 nt, Homo sapiens
  source 1..33: mol_type = unassigned RNA
atattgcagagtttgatttgtggaaataggaac

SEQ ID NO: 5294 - DNA, 33 bp, Homo sapiens
  source 1..33: mol_type = unassigned DNA
atattgcagagtttgatttgtggaaataggaac

SEQ ID NO: 5295 - DNA, 33 bp, Homo sapiens
  source 1..33: mol_type = unassigned DNA
gttcctatttccacaaatcaaactctgcaatat

SEQ ID NO: 5296 - RNA, 32 nt, Homo sapiens
  source 1..32: mol_type = unassigned RNA
taaaggggccaccgcccttggagctagggaga

SEQ ID NO: 5297 - DNA, 32 bp, Homo sapiens
  source 1..32: mol_type = unassigned DNA
taaaggggccaccgcccttggagctagggaga

SEQ ID NO: 5298 - DNA, 32 bp, Homo sapiens
  source 1..32: mol_type = unassigned DNA
tctccctagctccaagggcggtggccccttta

SEQ ID NO: 5299 - RNA, 30 nt, Homo sapiens
  source 1..30: mol_type = unassigned RNA
tcagagatagactctgaagaagaacttata

SEQ ID NO: 5300 - DNA, 30 bp, Homo sapiens
  source 1..30: mol_type = unassigned DNA
tcagagatagactctgaagaagaacttata

SEQ ID NO: 5301 - DNA, 30 bp, Homo sapiens
  source 1..30: mol_type = unassigned DNA
tataagttcttcttcagagtctatctctga

SEQ ID NO: 5302 - RNA, 59 nt, Homo sapiens
  source 1..59: mol_type = unassigned RNA
tattgaacagagagtccctgtgttggcaagtagtagccaatctggagactctgagagtg

SEQ ID NO: 5303 - DNA, 59 bp, Homo sapiens
  source 1..59: mol_type = unassigned DNA
tattgaacagagagtccctgtgttggcaagtagtagccaatctggagactctgagagtg

SEQ ID NO: 5304 - DNA, 59 bp, Homo sapiens
  source 1..59: mol_type = unassigned DNA
cactctcagagtctccagattggctactacttgccaacacagggactctctgttcaata

SEQ ID NO: 5305 - RNA, 127 nt, Homo sapiens
  source 1..127: mol_type = unassigned RNA
gttgtgccccaacttgtgaagcttctaggagcttctgaattgccaattgtgactcctgcactaagagccatagggaatattgtcactggtacaggtgaacagactcaggttgtgatcgatgcagagg

SEQ ID NO: 5306 - DNA, 127 bp, Homo sapiens
  source 1..127: mol_type = unassigned DNA
gttgtgccccaacttgtgaagcttctaggagcttctgaattgccaattgtgactcctgcactaagagccatagggaatattgtcactggtacaggtgaacagactcaggttgtgatcgatgcagagg

SEQ ID NO: 5307 - DNA, 127 bp, Homo sapiens
  source 1..127: mol_type = unassigned DNA
cctctgcatcgatcacaacctgagtctgttcacctgtaccagtgacaatattccctatggctcttagtgcaggagtcacaattggcaattcagaagctcctagaagcttcacaagttggggcacaac

SEQ ID NO: 5308 - RNA, 30 nt, Homo sapiens
  source 1..30: mol_type = unassigned RNA
ccgtgtcagtggtggacctgacctgccgtc

SEQ ID NO: 5309 - DNA, 30 bp, Homo sapiens
  source 1..30: mol_type = unassigned DNA
ccgtgtcagtggtggacctgacctgccgtc

SEQ ID NO: 5310 - DNA, 30 bp, Homo sapiens
  source 1..30: mol_type = unassigned DNA
gacggcaggtcaggtccaccactgacacgg

SEQ ID NO: 5311 - RNA, 146 nt, Homo sapiens
  source 1..146: mol_type = unassigned RNA
tgttaataaatacatttttccttaatcttgctaatctagatatgttgatgattccatagctcttcaaatagcacttggaaataaagatataaatacttttgaacagatcgatgactacaatccagacactgctatggtaacgtttt

SEQ ID NO: 5312 - DNA, 146 bp, Homo sapiens
  source 1..146: mol_type = unassigned DNA
tgttaataaatacatttttccttaatcttgctaatctagatatgttgatgattccatagctcttcaaatagcacttggaaataaagatataaatacttttgaacagatcgatgactacaatccagacactgctatggtaacgtttt

SEQ ID NO: 5313 - DNA, 146 bp, Homo sapiens
  source 1..146: mol_type = unassigned DNA
aaaacgttaccatagcagtgtctggattgtagtcatcgatctgttcaaaagtatttatatctttatttccaagtgctatttgaagagctatggaatcatcaacatatctagattagcaagattaaggaaaaatgtatttattaaca

SEQ ID NO: 5314 - RNA, 62 nt, Homo sapiens
  source 1..62: mol_type = unassigned RNA
aagcttctaggagcttctgaattgccaattgtggtaagttatttacttgtagattaggacat

SEQ ID NO: 5315 - DNA, 62 bp, Homo sapiens
  source 1..62: mol_type = unassigned DNA
aagcttctaggagcttctgaattgccaattgtggtaagttatttacttgtagattaggacat

SEQ ID NO: 5316 - DNA, 62 bp, Homo sapiens
  source 1..62: mol_type = unassigned DNA
atgtcctaatctacaagtaaataacttaccacaattggcaattcagaagctcctagaagctt

SEQ ID NO: 5317 - RNA, 24 nt, Homo sapiens
  source 1..24: mol_type = unassigned RNA
gagcacatggttctgtaggctggg

SEQ ID NO: 5318 - DNA, 24 bp, Homo sapiens
  source 1..24: mol_type = unassigned DNA
gagcacatggttctgtaggctggg

SEQ ID NO: 5319 - DNA, 24 bp, Homo sapiens
  source 1..24: mol_type = unassigned DNA
cccagcctacagaaccatgtgctc

SEQ ID NO: 5320 - RNA, 198 nt, Homo sapiens
  source 1..198: mol_type = unassigned RNA
ttctcccaggcgccctcgctctcgccctcccgcccagactaaggtagccggaacagagcctgtcgatgtaggggactggggcagaggggtggagcccgggtgtccgggtcaccttgcatagtttccgttaagactctgctttccaggaagatcccaagtctatatcttctttgcgttgttatatgtgtattattctgg

SEQ ID NO: 5321 - DNA, 198 bp, Homo sapiens
  source 1..198: mol_type = unassigned DNA
ttctcccaggcgccctcgctctcgccctcccgcccagactaaggtagccggaacagagcctgtcgatgtaggggactggggcagaggggtggagcccgggtgtccgggtcaccttgcatagtttccgttaagactctgctttccaggaagatcccaagtctatatcttctttgcgttgttatatgtgtattattctgg

SEQ ID NO: 5322 - DNA, 198 bp, Homo sapiens
  source 1..198: mol_type = unassigned DNA
ccagaataatacacatataacaacgcaaagaagatatagacttgggatcttcctggaaagcagagtcttaacggaaactatgcaaggtgacccggacacccgggctccacccctctgccccagtcccctacatcgacaggctctgttccggctaccttagtctgggcgggagggcgagagcgagggcgcctgggagaa

SEQ ID NO: 5323 - RNA, 31 nt, Homo sapiens
  source 1..31: mol_type = unassigned RNA
agagaattgagacttagaagctttgaattcc

SEQ ID NO: 5324 - DNA, 31 bp, Homo sapiens
  source 1..31: mol_type = unassigned DNA
agagaattgagacttagaagctttgaattcc

SEQ ID NO: 5325 - DNA, 31 bp, Homo sapiens
  source 1..31: mol_type = unassigned DNA
ggaattcaaagcttctaagtctcaattctct

SEQ ID NO: 5326 - RNA, 34 nt, Homo sapiens
  source 1..34: mol_type = unassigned RNA
cctgtttctggctggagcctcggacactggctca

SEQ ID NO: 5327 - DNA, 34 bp, Homo sapiens
  source 1..34: mol_type = unassigned DNA
cctgtttctggctggagcctcggacactggctca

SEQ ID NO: 5328 - DNA, 34 bp, Homo sapiens
  source 1..34: mol_type = unassigned DNA
tgagccagtgtccgaggctccagccagaaacagg

SEQ ID NO: 5329 - RNA, 31 nt, Homo sapiens
  source 1..31: mol_type = unassigned RNA
aatttcagatgatgaaggtactgatggaaca

SEQ ID NO: 5330 - DNA, 31 bp, Homo sapiens
  source 1..31: mol_type = unassigned DNA
aatttcagatgatgaaggtactgatggaaca

SEQ ID NO: 5331 - DNA, 31 bp, Homo sapiens
  source 1..31: mol_type = unassigned DNA
tgttccatcagtaccttcatcatctgaaatt

SEQ ID NO: 5332 - RNA, 31 nt, Homo sapiens
  source 1..31: mol_type = unassigned RNA
catcatattatacagaccgaactgttgtata

SEQ ID NO: 5333 - DNA, 31 bp, Homo sapiens
  source 1..31: mol_type = unassigned DNA
catcatattatacagaccgaactgttgtata

SEQ ID NO: 5334 - DNA, 31 bp, Homo sapiens
  source 1..31: mol_type = unassigned DNA
tatacaacagttcggtctgtataatatgatg

SEQ ID NO: 5335 - RNA, 169 nt, Homo sapiens
  source 1..169: mol_type = unassigned RNA
cagttgtatgtgagttccaatgaaggggtttcccaggtatctctgcaccgctgccacatctatggtacagcctgtgctgactgctgcctggcgcgggacccttattgcgcctgggatggccattcctgttccagattctacccaactgggaaacggtgagcactaaaca

SEQ ID NO: 5336 - DNA, 169 bp, Homo sapiens
  source 1..169: mol_type = unassigned DNA
cagttgtatgtgagttccaatgaaggggtttcccaggtatctctgcaccgctgccacatctatggtacagcctgtgctgactgctgcctggcgcgggacccttattgcgcctgggatggccattcctgttccagattctacccaactgggaaacggtgagcactaaaca

SEQ ID NO: 5337 - DNA, 169 bp, Homo sapiens
  source 1..169: mol_type = unassigned DNA
tgtttagtgctcaccgtttcccagttgggtagaatctggaacaggaatggccatcccaggcgcaataagggtcccgcgccaggcagcagtcagcacaggctgtaccatagatgtggcagcggtgcagagatacctgggaaaccccttcattggaactcacatacaactg

SEQ ID NO: 5338 - RNA, 31 nt, Homo sapiens
  source 1..31: mol_type = unassigned RNA
atgctgtttctccagacaaggatgttgatgg

SEQ ID NO: 5339 - DNA, 31 bp, Homo sapiens
  source 1..31: mol_type = unassigned DNA
atgctgtttctccagacaaggatgttgatgg

SEQ ID NO: 5340 - DNA, 31 bp, Homo sapiens
  source 1..31: mol_type = unassigned DNA
ccatcaacatccttgtctggagaaacagcat

SEQ ID NO: 5341 - RNA, 28 nt, Homo sapiens
  source 1..28: mol_type = unassigned RNA
tcccagtactgtgggagcccgaggaggg

SEQ ID NO: 5342 - DNA, 28 bp, Homo sapiens
  source 1..28: mol_type = unassigned DNA
tcccagtactgtgggagcccgaggaggg

SEQ ID NO: 5343 - DNA, 28 bp, Homo sapiens
  source 1..28: mol_type = unassigned DNA
ccctcctcgggctcccacagtactggga

SEQ ID NO: 5344 - RNA, 45 nt, Homo sapiens
  source 1..45: mol_type = unassigned RNA
cttttgtccctggggtaatagtttctctcgtttctgctagttcag

SEQ ID NO: 5345 - DNA, 45 bp, Homo sapiens
  source 1..45: mol_type = unassigned DNA
cttttgtccctggggtaatagtttctctcgtttctgctagttcag

SEQ ID NO: 5346 - DNA, 45 bp, Homo sapiens
  source 1..45: mol_type = unassigned DNA
ctgaactagcagaaacgagagaaactattaccccagggacaaaag

SEQ ID NO: 5347 - RNA, 31 nt, Homo sapiens
  source 1..31: mol_type = unassigned RNA
aggatccccagaagaagtcggtcctcgccct

SEQ ID NO: 5348 - DNA, 31 bp, Homo sapiens
  source 1..31: mol_type = unassigned DNA
aggatccccagaagaagtcggtcctcgccct

SEQ ID NO: 5349 - DNA, 31 bp, Homo sapiens
  source 1..31: mol_type = unassigned DNA
agggcgaggaccgacttcttctggggatcct

SEQ ID NO: 5350 - RNA, 31 nt, Homo sapiens
  source 1..31: mol_type = unassigned RNA
tgttttggtcgcaaactctgaatcaacacta

SEQ ID NO: 5351 - DNA, 31 bp, Homo sapiens
  source 1..31: mol_type = unassigned DNA
tgttttggtcgcaaactctgaatcaacacta

SEQ ID NO: 5352 - DNA, 31 bp, Homo sapiens
  source 1..31: mol_type = unassigned DNA
tagtgttgattcagagtttgcgaccaaaaca

SEQ ID NO: 5353 - RNA, 184 nt, Homo sapiens
  source 1..184: mol_type = unassigned RNA
atactttaatttttacctcttatctaatgtccgttaaaggtacgacaccacagaggaaaagttatttatacccatcaacactggtaagaactgaaccacgtgaacatctccttgatcagctgaaaaggaaacagcctgagctgttaatgatgctaaactgttcagaaaacaacaaagaagagac

SEQ ID NO: 5354 - DNA, 184 bp, Homo sapiens
  source 1..184: mol_type = unassigned DNA
atactttaatttttacctcttatctaatgtccgttaaaggtacgacaccacagaggaaaagttatttatacccatcaacactggtaagaactgaaccacgtgaacatctccttgatcagctgaaaaggaaacagcctgagctgttaatgatgctaaactgttcagaaaacaacaaagaagagac

SEQ ID NO: 5355 - DNA, 184 bp, Homo sapiens
  source 1..184: mol_type = unassigned DNA
gtctcttctttgttgttttctgaacagtttagcatcattaacagctcaggctgtttccttttcagctgatcaaggagatgttcacgtggttcagttcttaccagtgttgatgggtataaataacttttcctctgtggtgtcgtacctttaacggacattagataagaggtaaaaattaaagtat

SEQ ID NO: 5356 - RNA, 32 nt, Homo sapiens
  source 1..32: mol_type = unassigned RNA
agtgccctggacaccaacagctcgaagagcac

SEQ ID NO: 5357 - DNA, 32 bp, Homo sapiens
  source 1..32: mol_type = unassigned DNA
agtgccctggacaccaacagctcgaagagcac

SEQ ID NO: 5358 - DNA, 32 bp, Homo sapiens
  source 1..32: mol_type = unassigned DNA
gtgctcttcgagctgttggtgtccagggcact

SEQ ID NO: 5359 - RNA, 33 nt, Homo sapiens
  source 1..33: mol_type = unassigned RNA
agggagtgattgattcggaaagaatggattttg

SEQ ID NO: 5360 - DNA, 33 bp, Homo sapiens
  source 1..33: mol_type = unassigned DNA
agggagtgattgattcggaaagaatggattttg

SEQ ID NO: 5361 - DNA, 33 bp, Homo sapiens
  source 1..33: mol_type = unassigned DNA
caaaatccattctttccgaatcaatcactccct

SEQ ID NO: 5362 - RNA, 30 nt, Homo sapiens
  source 1..30: mol_type = unassigned RNA
atctgctctgaggccagatggagaatacac

SEQ ID NO: 5363 - DNA, 30 bp, Homo sapiens
  source 1..30: mol_type = unassigned DNA
atctgctctgaggccagatggagaatacac

SEQ ID NO: 5364 - DNA, 30 bp, Homo sapiens
  source 1..30: mol_type = unassigned DNA
gtgtattctccatctggcctcagagcagat

SEQ ID NO: 5365 - RNA, 29 nt, Homo sapiens
  source 1..29: mol_type = unassigned RNA
gaccccagagcccgggctgtctcagtgcc

SEQ ID NO: 5366 - DNA, 29 bp, Homo sapiens
  source 1..29: mol_type = unassigned DNA
gaccccagagcccgggctgtctcagtgcc

SEQ ID NO: 5367 - DNA, 29 bp, Homo sapiens
  source 1..29: mol_type = unassigned DNA
ggcactgagacagcccgggctctggggtc

SEQ ID NO: 5368 - RNA, 29 nt, Homo sapiens
  source 1..29: mol_type = unassigned RNA
ccaagcactggggacctggaacctggccc

SEQ ID NO: 5369 - DNA, 29 bp, Homo sapiens
  source 1..29: mol_type = unassigned DNA
ccaagcactggggacctggaacctggccc

SEQ ID NO: 5370 - DNA, 29 bp, Homo sapiens
  source 1..29: mol_type = unassigned DNA
gggccaggttccaggtccccagtgcttgg

SEQ ID NO: 5371 - RNA, 25 nt, Homo sapiens
  source 1..25: mol_type = unassigned RNA
aatgtcactggttaaatcactgatt

SEQ ID NO: 5372 - DNA, 25 bp, Homo sapiens
  source 1..25: mol_type = unassigned DNA
aatgtcactggttaaatcactgatt

SEQ ID NO: 5373 - DNA, 25 bp, Homo sapiens
  source 1..25: mol_type = unassigned DNA
aatcagtgatttaaccagtgacatt

SEQ ID NO: 5374 - RNA, 71 nt, Homo sapiens
  source 1..71: mol_type = unassigned RNA
gaagacagagtggttggagtaaagagagcaagagggagctgagatcagagtggtggtggtgggggtgggtg

SEQ ID NO: 5375 - DNA, 71 bp, Homo sapiens
  source 1..71: mol_type = unassigned DNA
gaagacagagtggttggagtaaagagagcaagagggagctgagatcagagtggtggtggtgggggtgggtg

SEQ ID NO: 5376 - DNA, 71 bp, Homo sapiens
  source 1..71: mol_type = unassigned DNA
cacccacccccaccaccaccactctgatctcagctccctcttgctctctttactccaaccactctgtcttc

SEQ ID NO: 5377 - RNA, 48 nt, Homo sapiens
  source 1..48: mol_type = unassigned RNA
tgaaatatgccttgtactgggacactggcagaactcactgtattgtgg

SEQ ID NO: 5378 - DNA, 48 bp, Homo sapiens
  source 1..48: mol_type = unassigned DNA
tgaaatatgccttgtactgggacactggcagaactcactgtattgtgg

SEQ ID NO: 5379 - DNA, 48 bp, Homo sapiens
  source 1..48: mol_type = unassigned DNA
ccacaatacagtgagttctgccagtgtcccagtacaaggcatatttca

SEQ ID NO: 5380 - RNA, 33 nt, Homo sapiens
  source 1..33: mol_type = unassigned RNA
ggagtatcggggctctgacttcacagcagccgt

SEQ ID NO: 5381 - DNA, 33 bp, Homo sapiens
  source 1..33: mol_type = unassigned DNA
ggagtatcggggctctgacttcacagcagccgt

SEQ ID NO: 5382 - DNA, 33 bp, Homo sapiens
  source 1..33: mol_type = unassigned DNA
acggctgctgtgaagtcagagccccgatactcc

SEQ ID NO: 5383 - RNA, 30 nt, Homo sapiens
  source 1..30: mol_type = unassigned RNA
ttcagaatagatcatgggcctgaggcctcc

SEQ ID NO: 5384 - DNA, 30 bp, Homo sapiens
  source 1..30: mol_type = unassigned DNA
ttcagaatagatcatgggcctgaggcctcc

SEQ ID NO: 5385 - DNA, 30 bp, Homo sapiens
  source 1..30: mol_type = unassigned DNA
ggaggcctcaggcccatgatctattctgaa

SEQ ID NO: 5386 - RNA, 31 nt, Homo sapiens
  source 1..31: mol_type = unassigned RNA
agtgaacccaggtcagctttcaggacaaaga

SEQ ID NO: 5387 - DNA, 31 bp, Homo sapiens
  source 1..31: mol_type = unassigned DNA
agtgaacccaggtcagctttcaggacaaaga

SEQ ID NO: 5388 - DNA, 31 bp, Homo sapiens
  source 1..31: mol_type = unassigned DNA
tctttgtcctgaaagctgacctgggttcact

SEQ ID NO: 5389 - RNA, 29 nt, Homo sapiens
  source 1..29: mol_type = unassigned RNA
agctcagttgacctagtggctgaagcacc

SEQ ID NO: 5390 - DNA, 29 bp, Homo sapiens
  source 1..29: mol_type = unassigned DNA
agctcagttgacctagtggctgaagcacc

SEQ ID NO: 5391 - DNA, 29 bp, Homo sapiens
  source 1..29: mol_type = unassigned DNA
ggtgcttcagccactaggtcaactgagct

SEQ ID NO: 5392 - RNA, 59 nt, Homo sapiens
  source 1..59: mol_type = unassigned RNA
ctctgcaggaggttgaaggactaaagaaaagagagtcattgactctcattgtagaaggt

SEQ ID NO: 5393 - DNA, 59 bp, Homo sapiens
  source 1..59: mol_type = unassigned DNA
ctctgcaggaggttgaaggactaaagaaaagagagtcattgactctcattgtagaaggt

SEQ ID NO: 5394 - DNA, 59 bp, Homo sapiens
  source 1..59: mol_type = unassigned DNA
accttctacaatgagagtcaatgactctcttttctttagtccttcaacctcctgcagag

SEQ ID NO: 5395 - RNA, 31 nt, Homo sapiens
  source 1..31: mol_type = unassigned RNA
cttggccaggggttggggtggtagaggtgct

SEQ ID NO: 5396 - DNA, 31 bp, Homo sapiens
  source 1..31: mol_type = unassigned DNA
cttggccaggggttggggtggtagaggtgct

SEQ ID NO: 5397 - DNA, 31 bp, Homo sapiens
  source 1..31: mol_type = unassigned DNA
agcacctctaccaccccaacccctggccaag

SEQ ID NO: 5398 - RNA, 136 nt, Homo sapiens
  source 1..136: mol_type = unassigned RNA
tcacatatatacaattgttcaaatttacagaacgaagcaatatccttagaagaaataagaattagagtagtacaaatgcttggatctctaggaggacaaataaacaaaaatcttctgacaggtaaacttcttttaa

SEQ ID NO: 5399 - DNA, 136 bp, Homo sapiens
  source 1..136: mol_type = unassigned DNA
tcacatatatacaattgttcaaatttacagaacgaagcaatatccttagaagaaataagaattagagtagtacaaatgcttggatctctaggaggacaaataaacaaaaatcttctgacaggtaaacttcttttaa

SEQ ID NO: 5400 - DNA, 136 bp, Homo sapiens
  source 1..136: mol_type = unassigned DNA
ttaaaagaagtttacctgtcagaagatttttgtttatttgtcctcctagagatccaagcatttgtactactctaattcttatttcttctaaggatattgcttcgttctgtaaatttgaacaattgtatatatgtga

SEQ ID NO: 5401 - RNA, 33 nt, Homo sapiens
  source 1..33: mol_type = unassigned RNA
acctgtttctggctggagcctcggacactggct

SEQ ID NO: 5402 - DNA, 33 bp, Homo sapiens
  source 1..33: mol_type = unassigned DNA
acctgtttctggctggagcctcggacactggct

SEQ ID NO: 5403 - DNA, 33 bp, Homo sapiens
  source 1..33: mol_type = unassigned DNA
agccagtgtccgaggctccagccagaaacaggt

SEQ ID NO: 5404 - RNA, 29 nt, Homo sapiens
  source 1..29: mol_type = unassigned RNA
cgcgacatagaggaggtgagccaggggct

SEQ ID NO: 5405 - DNA, 29 bp, Homo sapiens
  source 1..29: mol_type = unassigned DNA
cgcgacatagaggaggtgagccaggggct

SEQ ID NO: 5406 - DNA, 29 bp, Homo sapiens
  source 1..29: mol_type = unassigned DNA
agcccctggctcacctcctctatgtcgcg

SEQ ID NO: 5407 - RNA, 179 nt, Homo sapiens
  source 1..179: mol_type = unassigned RNA
taccccatttttatttatttatatcagacttcaggttttgccctggctttaggaaacatagttcatggattgtctgtgtgtggacatggaaaagctgaagacttgggcagcaaactactccctgcctggatcagaattgttctaacagaggtagaggtcacctgttgtatgctatttca

SEQ ID NO: 5408 - DNA, 179 bp, Homo sapiens
  source 1..179: mol_type = unassigned DNA
taccccatttttatttatttatatcagacttcaggttttgccctggctttaggaaacatagttcatggattgtctgtgtgtggacatggaaaagctgaagacttgggcagcaaactactccctgcctggatcagaattgttctaacagaggtagaggtcacctgttgtatgctatttca

SEQ ID NO: 5409 - DNA, 179 bp, Homo sapiens
  source 1..179: mol_type = unassigned DNA
tgaaatagcatacaacaggtgacctctacctctgttagaacaattctgatccaggcagggagtagtttgctgcccaagtcttcagcttttccatgtccacacacagacaatccatgaactatgtttcctaaagccagggcaaaacctgaagtctgatataaataaataaaaatggggta

SEQ ID NO: 5410 - RNA, 31 nt, Homo sapiens
  source 1..31: mol_type = unassigned RNA
gtggatacagatgcggacacccggctctcac

SEQ ID NO: 5411 - DNA, 31 bp, Homo sapiens
  source 1..31: mol_type = unassigned DNA
gtggatacagatgcggacacccggctctcac

SEQ ID NO: 5412 - DNA, 31 bp, Homo sapiens
  source 1..31: mol_type = unassigned DNA
gtgagagccgggtgtccgcatctgtatccac

SEQ ID NO: 5413 - RNA, 32 nt, Homo sapiens
  source 1..32: mol_type = unassigned RNA
attgcctactaactctgacattataccttgtt

SEQ ID NO: 5414 - DNA, 32 bp, Homo sapiens
  source 1..32: mol_type = unassigned DNA
attgcctactaactctgacattataccttgtt

SEQ ID NO: 5415 - DNA, 32 bp, Homo sapiens
  source 1..32: mol_type = unassigned DNA
aacaaggtataatgtcagagttagtaggcaat

SEQ ID NO: 5416 - RNA, 77 nt, Homo sapiens
  source 1..77: mol_type = unassigned RNA
ccttacctagaggaactcagtgagaggcctaggaaagaaccttctgccaacactgggggcactggtagaaatcaagt

SEQ ID NO: 5417 - DNA, 77 bp, Homo sapiens
  source 1..77: mol_type = unassigned DNA
ccttacctagaggaactcagtgagaggcctaggaaagaaccttctgccaacactgggggcactggtagaaatcaagt

SEQ ID NO: 5418 - DNA, 77 bp, Homo sapiens
  source 1..77: mol_type = unassigned DNA
acttgatttctaccagtgcccccagtgttggcagaaggttctttcctaggcctctcactgagttcctctaggtaagg

SEQ ID NO: 5419 - RNA, 31 nt, Homo sapiens
  source 1..31: mol_type = unassigned RNA
ccagtctcacactctgcaagccaatgacgtg

SEQ ID NO: 5420 - DNA, 31 bp, Homo sapiens
  source 1..31: mol_type = unassigned DNA
ccagtctcacactctgcaagccaatgacgtg

SEQ ID NO: 5421 - DNA, 31 bp, Homo sapiens
  source 1..31: mol_type = unassigned DNA
cacgtcattggcttgcagagtgtgagactgg

SEQ ID NO: 5422 - RNA, 42 nt, Homo sapiens
  source 1..42: mol_type = unassigned RNA
tcagtctagcctttgtctttctttatgagttggtgtggttag

SEQ ID NO: 5423 - DNA, 42 bp, Homo sapiens
  source 1..42: mol_type = unassigned DNA
tcagtctagcctttgtctttctttatgagttggtgtggttag

SEQ ID NO: 5424 - DNA, 42 bp, Homo sapiens
  source 1..42: mol_type = unassigned DNA
ctaaccacaccaactcataaagaaagacaaaggctagactga

SEQ ID NO: 5425 - RNA, 54 nt, Homo sapiens
  source 1..54: mol_type = unassigned RNA
ctaaccaccttgtcagactggagttgctgtcactaaccatcccatctccccatc

SEQ ID NO: 5426 - DNA, 54 bp, Homo sapiens
  source 1..54: mol_type = unassigned DNA
ctaaccaccttgtcagactggagttgctgtcactaaccatcccatctccccatc

SEQ ID NO: 5427 - DNA, 54 bp, Homo sapiens
  source 1..54: mol_type = unassigned DNA
gatggggagatgggatggttagtgacagcaactccagtctgacaaggtggttag

SEQ ID NO: 5428 - RNA, 78 nt, Homo sapiens
  source 1..78: mol_type = unassigned RNA
acgtggctggcttcctcagagacaagaactgggtccctgtgatgaagtcaccctgaggggcagggtgtcctgtggggg

SEQ ID NO: 5429 - DNA, 78 bp, Homo sapiens
  source 1..78: mol_type = unassigned DNA
acgtggctggcttcctcagagacaagaactgggtccctgtgatgaagtcaccctgaggggcagggtgtcctgtggggg

SEQ ID NO: 5430 - DNA, 78 bp, Homo sapiens
  source 1..78: mol_type = unassigned DNA
cccccacaggacaccctgcccctcagggtgacttcatcacagggacccagttcttgtctctgaggaagccagccacgt

SEQ ID NO: 5431 - RNA, 30 nt, Homo sapiens
  source 1..30: mol_type = unassigned RNA
gctgctgccaggttggaggaattggtgatc

SEQ ID NO: 5432 - DNA, 30 bp, Homo sapiens
  source 1..30: mol_type = unassigned DNA
gctgctgccaggttggaggaattggtgatc

SEQ ID NO: 5433 - DNA, 30 bp, Homo sapiens
  source 1..30: mol_type = unassigned DNA
gatcaccaattcctccaacctggcagcagc

SEQ ID NO: 5434 - RNA, 34 nt, Homo sapiens
  source 1..34: mol_type = unassigned RNA
acactgggactgtcctctgcgacgacataatctg

SEQ ID NO: 5435 - DNA, 34 bp, Homo sapiens
  source 1..34: mol_type = unassigned DNA
acactgggactgtcctctgcgacgacataatctg

SEQ ID NO: 5436 - DNA, 34 bp, Homo sapiens
  source 1..34: mol_type = unassigned DNA
cagattatgtcgtcgcagaggacagtcccagtgt

SEQ ID NO: 5437 - RNA, 125 nt, Homo sapiens
  source 1..125: mol_type = unassigned RNA
ttctgttttagtgttcggtgaccagtgacttggattttccaacacaagtcatcccattaaagactctgaatgcagttgcttcagtacccataatgtattcttggtctcccctacagcagaatttt

SEQ ID NO: 5438 - DNA, 125 bp, Homo sapiens
  source 1..125: mol_type = unassigned DNA
ttctgttttagtgttcggtgaccagtgacttggattttccaacacaagtcatcccattaaagactctgaatgcagttgcttcagtacccataatgtattcttggtctcccctacagcagaatttt

SEQ ID NO: 5439 - DNA, 125 bp, Homo sapiens
  source 1..125: mol_type = unassigned DNA
aaaattctgctgtaggggagaccaagaatacattatgggtactgaagcaactgcattcagagtctttaatgggatgacttgtgttggaaaatccaagtcactggtcaccgaacactaaaacagaa

SEQ ID NO: 5440 - RNA, 57 nt, Homo sapiens
  source 1..57: mol_type = unassigned RNA
tttctttgcttctaggacagttcattacttgtaggacttgcacttatctatgccttc

SEQ ID NO: 5441 - DNA, 57 bp, Homo sapiens
  source 1..57: mol_type = unassigned DNA
tttctttgcttctaggacagttcattacttgtaggacttgcacttatctatgccttc

SEQ ID NO: 5442 - DNA, 57 bp, Homo sapiens
  source 1..57: mol_type = unassigned DNA
gaaggcatagataagtgcaagtcctacaagtaatgaactgtcctagaagcaaagaaa

SEQ ID NO: 5443 - RNA, 28 nt, Homo sapiens
  source 1..28: mol_type = unassigned RNA
ccccgctgctcgccgcgttgaccgcgct

SEQ ID NO: 5444 - DNA, 28 bp, Homo sapiens
  source 1..28: mol_type = unassigned DNA
ccccgctgctcgccgcgttgaccgcgct

SEQ ID NO: 5445 - DNA, 28 bp, Homo sapiens
  source 1..28: mol_type = unassigned DNA
agcgcggtcaacgcggcgagcagcgggg

SEQ ID NO: 5446 - RNA, 132 nt, Homo sapiens
  source 1..132: mol_type = unassigned RNA
catgcgccccctcccaagcgctggcaggcctctgcgtatgtggacggccaaccccaaggaagaatcaggggagacctcggaaaaatgcccacgtataaaaccccaggtcaaaggtcaaactgtgcacttgct

SEQ ID NO: 5447 - DNA, 132 bp, Homo sapiens
  source 1..132: mol_type = unassigned DNA
catgcgccccctcccaagcgctggcaggcctctgcgtatgtggacggccaaccccaaggaagaatcaggggagacctcggaaaaatgcccacgtataaaaccccaggtcaaaggtcaaactgtgcacttgct

SEQ ID NO: 5448 - DNA, 132 bp, Homo sapiens
  source 1..132: mol_type = unassigned DNA
agcaagtgcacagtttgacctttgacctggggttttatacgtgggcatttttccgaggtctcccctgattcttccttggggttggccgtccacatacgcagaggcctgccagcgcttgggagggggcgcatg

SEQ ID NO: 5449 - RNA, 30 nt, Homo sapiens
  source 1..30: mol_type = unassigned RNA
gtaagcgttgcactctgggctgtggggggc

SEQ ID NO: 5450 - DNA, 30 bp, Homo sapiens
  source 1..30: mol_type = unassigned DNA
gtaagcgttgcactctgggctgtggggggc

SEQ ID NO: 5451 - DNA, 30 bp, Homo sapiens
  source 1..30: mol_type = unassigned DNA
gccccccacagcccagagtgcaacgcttac

SEQ ID NO: 5452 - RNA, 31 nt, Homo sapiens
  source 1..31: mol_type = unassigned RNA
ggctctgatgccccgccgcgccccaggtttg

SEQ ID NO: 5453 - DNA, 31 bp, Homo sapiens
  source 1..31: mol_type = unassigned DNA
ggctctgatgccccgccgcgccccaggtttg

SEQ ID NO: 5454 - DNA, 31 bp, Homo sapiens
  source 1..31: mol_type = unassigned DNA
caaacctggggcgcggcggggcatcagagcc

SEQ ID NO: 5455 - RNA, 134 nt, Homo sapiens
  source 1..134: mol_type = unassigned RNA
attcttttgctcactgctcagtgactttgcatgtcatgtgtttgctcataagtaagtagacagttggtggactgagtcacggaacacaggcaacaacaggatctgtaagtctgggaatggtgaattttgtttgc

SEQ ID NO: 5456 - DNA, 134 bp, Homo sapiens
  source 1..134: mol_type = unassigned DNA
attcttttgctcactgctcagtgactttgcatgtcatgtgtttgctcataagtaagtagacagttggtggactgagtcacggaacacaggcaacaacaggatctgtaagtctgggaatggtgaattttgtttgc

SEQ ID NO: 5457 - DNA, 134 bp, Homo sapiens
  source 1..134: mol_type = unassigned DNA
gcaaacaaaattcaccattcccagacttacagatcctgttgttgcctgtgttccgtgactcagtccaccaactgtctacttacttatgagcaaacacatgacatgcaaagtcactgagcagtgagcaaaagaat

SEQ ID NO: 5458 - RNA, 25 nt, Homo sapiens
  source 1..25: mol_type = unassigned RNA
ttagcctttccaggtaatgatgaat

SEQ ID NO: 5459 - DNA, 25 bp, Homo sapiens
  source 1..25: mol_type = unassigned DNA
ttagcctttccaggtaatgatgaat

SEQ ID NO: 5460 - DNA, 25 bp, Homo sapiens
  source 1..25: mol_type = unassigned DNA
attcatcattacctggaaaggctaa

SEQ ID NO: 5461 - RNA, 28 nt, Homo sapiens
  source 1..28: mol_type = unassigned RNA
gtaaataaatgaaagcctgtggaggagg

SEQ ID NO: 5462 - DNA, 28 bp, Homo sapiens
  source 1..28: mol_type = unassigned DNA
gtaaataaatgaaagcctgtggaggagg

SEQ ID NO: 5463 - DNA, 28 bp, Homo sapiens
  source 1..28: mol_type = unassigned DNA
cctcctccacaggctttcatttatttac

SEQ ID NO: 5464 - RNA, 32 nt, Homo sapiens
  source 1..32: mol_type = unassigned RNA
agaaagcctgggctttgaacctgaacggtttt

SEQ ID NO: 5465 - DNA, 32 bp, Homo sapiens
  source 1..32: mol_type = unassigned DNA
agaaagcctgggctttgaacctgaacggtttt

SEQ ID NO: 5466 - DNA, 32 bp, Homo sapiens
  source 1..32: mol_type = unassigned DNA
aaaaccgttcaggttcaaagcccaggctttct

SEQ ID NO: 5467 - RNA, 32 nt, Homo sapiens
  source 1..32: mol_type = unassigned RNA
catgtctgtgggctccctgcgtgaccaggtga

SEQ ID NO: 5468 - DNA, 32 bp, Homo sapiens
  source 1..32: mol_type = unassigned DNA
catgtctgtgggctccctgcgtgaccaggtga

SEQ ID NO: 5469 - DNA, 32 bp, Homo sapiens
  source 1..32: mol_type = unassigned DNA
tcacctggtcacgcagggagcccacagacatg

SEQ ID NO: 5470 - RNA, 32 nt, Homo sapiens
  source 1..32: mol_type = unassigned RNA
tctatcgcatgatcaagctaggtctaggtaag

SEQ ID NO: 5471 - DNA, 32 bp, Homo sapiens
  source 1..32: mol_type = unassigned DNA
tctatcgcatgatcaagctaggtctaggtaag

SEQ ID NO: 5472 - DNA, 32 bp, Homo sapiens
  source 1..32: mol_type = unassigned DNA
cttacctagacctagcttgatcatgcgataga

SEQ ID NO: 5473 - RNA, 40 nt, Homo sapiens
  source 1..40: mol_type = unassigned RNA
ttctttatttatttgtgtggtttcaagttactatctagtg

SEQ ID NO: 5474 - DNA, 40 bp, Homo sapiens
  source 1..40: mol_type = unassigned DNA
ttctttatttatttgtgtggtttcaagttactatctagtg

SEQ ID NO: 5475 - DNA, 40 bp, Homo sapiens
  source 1..40: mol_type = unassigned DNA
cactagatagtaacttgaaaccacacaaataaataaagaa

SEQ ID NO: 5476 - RNA, 32 nt, Homo sapiens
  source 1..32: mol_type = unassigned RNA
ataaatactgaccactcctatgttcggaccca

SEQ ID NO: 5477 - DNA, 32 bp, Homo sapiens
  source 1..32: mol_type = unassigned DNA
ataaatactgaccactcctatgttcggaccca

SEQ ID NO: 5478 - DNA, 32 bp, Homo sapiens
  source 1..32: mol_type = unassigned DNA
tgggtccgaacataggagtggtcagtatttat

SEQ ID NO: 5479 - RNA, 30 nt, Homo sapiens
  source 1..30: mol_type = unassigned RNA
agatccccaggtaagatgtggtgttgcagg

SEQ ID NO: 5480 - DNA, 30 bp, Homo sapiens
  source 1..30: mol_type = unassigned DNA
agatccccaggtaagatgtggtgttgcagg

SEQ ID NO: 5481 - DNA, 30 bp, Homo sapiens
  source 1..30: mol_type = unassigned DNA
cctgcaacaccacatcttacctggggatct

SEQ ID NO: 5482 - RNA, 34 nt, Homo sapiens
  source 1..34: mol_type = unassigned RNA
atgcagctctatgatggtctatttctgagataac

SEQ ID NO: 5483 - DNA, 34 bp, Homo sapiens
  source 1..34: mol_type = unassigned DNA
atgcagctctatgatggtctatttctgagataac

SEQ ID NO: 5484 - DNA, 34 bp, Homo sapiens
  source 1..34: mol_type = unassigned DNA
gttatctcagaaatagaccatcatagagctgcat

SEQ ID NO: 5485 - RNA, 37 nt, Homo sapiens
  source 1..37: mol_type = unassigned RNA
tgttctttgtctggactaagcctgctactggtttatt

SEQ ID NO: 5486 - DNA, 37 bp, Homo sapiens
  source 1..37: mol_type = unassigned DNA
tgttctttgtctggactaagcctgctactggtttatt

SEQ ID NO: 5487 - DNA, 37 bp, Homo sapiens
  source 1..37: mol_type = unassigned DNA
aataaaccagtagcaggcttagtccagacaaagaaca

SEQ ID NO: 5488 - RNA, 174 nt, Homo sapiens
  source 1..174: mol_type = unassigned RNA
ttttttaggtggcatcgggtagcaatcagcgtggagaagaaaactgtgacaatgattgttgattgtaagaagaaaaccacgaaaccacttgatagaagtgagagagcaattgttgataccaatggaatcacggtttttggaacaaggattttggatgaagaagtttttgaggta

SEQ ID NO: 5489 - DNA, 174 bp, Homo sapiens
  source 1..174: mol_type = unassigned DNA
ttttttaggtggcatcgggtagcaatcagcgtggagaagaaaactgtgacaatgattgttgattgtaagaagaaaaccacgaaaccacttgatagaagtgagagagcaattgttgataccaatggaatcacggtttttggaacaaggattttggatgaagaagtttttgaggta

SEQ ID NO: 5490 - DNA, 174 bp, Homo sapiens
  source 1..174: mol_type = unassigned DNA
tacctcaaaaacttcttcatccaaaatccttgttccaaaaaccgtgattccattggtatcaacaattgctctctcacttctatcaagtggtttcgtggttttcttcttacaatcaacaatcattgtcacagttttcttctccacgctgattgctacccgatgccacctaaaaaa

SEQ ID NO: 5491 - RNA, 50 nt, Homo sapiens
  source 1..50: mol_type = unassigned RNA
gccctcatcacactggctaatgactgtgaagtgctgaccacactcactct

SEQ ID NO: 5492 - DNA, 50 bp, Homo sapiens
  source 1..50: mol_type = unassigned DNA
gccctcatcacactggctaatgactgtgaagtgctgaccacactcactct

SEQ ID NO: 5493 - DNA, 50 bp, Homo sapiens
  source 1..50: mol_type = unassigned DNA
agagtgagtgtggtcagcacttcacagtcattagccagtgtgatgagggc

SEQ ID NO: 5494 - RNA, 28 nt, Homo sapiens
  source 1..28: mol_type = unassigned RNA
ttgatagaccgattattgaccgacctat

SEQ ID NO: 5495 - DNA, 28 bp, Homo sapiens
  source 1..28: mol_type = unassigned DNA
ttgatagaccgattattgaccgacctat

SEQ ID NO: 5496 - DNA, 28 bp, Homo sapiens
  source 1..28: mol_type = unassigned DNA
ataggtcggtcaataatcggtctatcaa

SEQ ID NO: 5497 - RNA, 30 nt, Homo sapiens
  source 1..30: mol_type = unassigned RNA
gacaacataatccgggctggtttgattccg

SEQ ID NO: 5498 - DNA, 30 bp, Homo sapiens
  source 1..30: mol_type = unassigned DNA
gacaacataatccgggctggtttgattccg

SEQ ID NO: 5499 - DNA, 30 bp, Homo sapiens
  source 1..30: mol_type = unassigned DNA
cggaatcaaaccagcccggattatgttgtc

SEQ ID NO: 5500 - RNA, 51 nt, Homo sapiens
  source 1..51: mol_type = unassigned RNA
gcctagaaaatcagtcggatggaaaaatgcagtgagccaggaccagcaggg

SEQ ID NO: 5501 - DNA, 51 bp, Homo sapiens
  source 1..51: mol_type = unassigned DNA
gcctagaaaatcagtcggatggaaaaatgcagtgagccaggaccagcaggg

SEQ ID NO: 5502 - DNA, 51 bp, Homo sapiens
  source 1..51: mol_type = unassigned DNA
ccctgctggtcctggctcactgcatttttccatccgactgattttctaggc

SEQ ID NO: 5503 - RNA, 28 nt, Homo sapiens
  source 1..28: mol_type = unassigned RNA
gggaacgcggcggggaatctctgtgctt

SEQ ID NO: 5504 - DNA, 28 bp, Homo sapiens
  source 1..28: mol_type = unassigned DNA
gggaacgcggcggggaatctctgtgctt

SEQ ID NO: 5505 - DNA, 28 bp, Homo sapiens
  source 1..28: mol_type = unassigned DNA
aagcacagagattccccgccgcgttccc

SEQ ID NO: 5506 - RNA, 48 nt, Homo sapiens
  source 1..48: mol_type = unassigned RNA
aaattatttgtatgaataatgaaaataaaacacaacttgtggcaaaaa

SEQ ID NO: 5507 - DNA, 48 bp, Homo sapiens
  source 1..48: mol_type = unassigned DNA
aaattatttgtatgaataatgaaaataaaacacaacttgtggcaaaaa

SEQ ID NO: 5508 - DNA, 48 bp, Homo sapiens
  source 1..48: mol_type = unassigned DNA
tttttgccacaagttgtgttttattttcattattcatacaaataattt

SEQ ID NO: 5509 - RNA, 30 nt, Homo sapiens
  source 1..30: mol_type = unassigned RNA
aaagagctgaaaggttgttggggtgggcag

SEQ ID NO: 5510 - DNA, 30 bp, Homo sapiens
  source 1..30: mol_type = unassigned DNA
aaagagctgaaaggttgttggggtgggcag

SEQ ID NO: 5511 - DNA, 30 bp, Homo sapiens
  source 1..30: mol_type = unassigned DNA
ctgcccaccccaacaacctttcagctcttt

SEQ ID NO: 5512 - RNA, 29 nt, Homo sapiens
  source 1..29: mol_type = unassigned RNA
ccgtccacaatcagtctgatcagagccac

SEQ ID NO: 5513 - DNA, 29 bp, Homo sapiens
  source 1..29: mol_type = unassigned DNA
ccgtccacaatcagtctgatcagagccac

SEQ ID NO: 5514 - DNA, 29 bp, Homo sapiens
  source 1..29: mol_type = unassigned DNA
gtggctctgatcagactgattgtggacgg

SEQ ID NO: 5515 - RNA, 31 nt, Homo sapiens
  source 1..31: mol_type = unassigned RNA
agcatgcgggattccctcattgacaggtacc

SEQ ID NO: 5516 - DNA, 31 bp, Homo sapiens
  source 1..31: mol_type = unassigned DNA
agcatgcgggattccctcattgacaggtacc

SEQ ID NO: 5517 - DNA, 31 bp, Homo sapiens
  source 1..31: mol_type = unassigned DNA
ggtacctgtcaatgagggaatcccgcatgct

SEQ ID NO: 5518 - RNA, 30 nt, Homo sapiens
  source 1..30: mol_type = unassigned RNA
cataaggcaaggccttctgacacagatacc

SEQ ID NO: 5519 - DNA, 30 bp, Homo sapiens
  source 1..30: mol_type = unassigned DNA
cataaggcaaggccttctgacacagatacc

SEQ ID NO: 5520 - DNA, 30 bp, Homo sapiens
  source 1..30: mol_type = unassigned DNA
ggtatctgtgtcagaaggccttgccttatg

SEQ ID NO: 5521 - RNA, 32 nt, Homo sapiens
  source 1..32: mol_type = unassigned RNA
tgctctctgcctctgctgacacgtgcacacac

SEQ ID NO: 5522 - DNA, 32 bp, Homo sapiens
  source 1..32: mol_type = unassigned DNA
tgctctctgcctctgctgacacgtgcacacac

SEQ ID NO: 5523 - DNA, 32 bp, Homo sapiens
  source 1..32: mol_type = unassigned DNA
gtgtgtgcacgtgtcagcagaggcagagagca

SEQ ID NO: 5524 - RNA, 23 nt, Homo sapiens
  source 1..23: mol_type = unassigned RNA
tatctttatgttttctgcttgta

SEQ ID NO: 5525 - DNA, 23 bp, Homo sapiens
  source 1..23: mol_type = unassigned DNA
tatctttatgttttctgcttgta

SEQ ID NO: 5526 - DNA, 23 bp, Homo sapiens
  source 1..23: mol_type = unassigned DNA
tacaagcagaaaacataaagata

SEQ ID NO: 5527 - RNA, 27 nt, Homo sapiens
  source 1..27: mol_type = unassigned RNA
ttttttcactggtagaaataccacagc

SEQ ID NO: 5528 - DNA, 27 bp, Homo sapiens
  source 1..27: mol_type = unassigned DNA
ttttttcactggtagaaataccacagc

SEQ ID NO: 5529 - DNA, 27 bp, Homo sapiens
  source 1..27: mol_type = unassigned DNA
gctgtggtatttctaccagtgaaaaaa

SEQ ID NO: 5530 - RNA, 33 nt, Homo sapiens
  source 1..33: mol_type = unassigned RNA
gccaactgtggacaactcgaataagtttgactt

SEQ ID NO: 5531 - DNA, 33 bp, Homo sapiens
  source 1..33: mol_type = unassigned DNA
gccaactgtggacaactcgaataagtttgactt

SEQ ID NO: 5532 - DNA, 33 bp, Homo sapiens
  source 1..33: mol_type = unassigned DNA
aagtcaaacttattcgagttgtccacagttggc

SEQ ID NO: 5533 - RNA, 63 nt, Homo sapiens
  source 1..63: mol_type = unassigned RNA
atgagttgtgtttcacatttgctgtagggaactactgtggacaagaaccagctttaaattgtt

SEQ ID NO: 5534 - DNA, 63 bp, Homo sapiens
  source 1..63: mol_type = unassigned DNA
atgagttgtgtttcacatttgctgtagggaactactgtggacaagaaccagctttaaattgtt

SEQ ID NO: 5535 - DNA, 63 bp, Homo sapiens
  source 1..63: mol_type = unassigned DNA
aacaatttaaagctggttcttgtccacagtagttccctacagcaaatgtgaaacacaactcat

SEQ ID NO: 5536 - RNA, 107 nt, Homo sapiens
  source 1..107: mol_type = unassigned RNA
tgccaataagaaagtgttcctgggcagagatacatgaggagtcagaccttcgtttaaagcagtgacagaagatggatttttggctgtatgttcagaagctaaaggta

SEQ ID NO: 5537 - DNA, 107 bp, Homo sapiens
  source 1..107: mol_type = unassigned DNA
tgccaataagaaagtgttcctgggcagagatacatgaggagtcagaccttcgtttaaagcagtgacagaagatggatttttggctgtatgttcagaagctaaaggta

SEQ ID NO: 5538 - DNA, 107 bp, Homo sapiens
  source 1..107: mol_type = unassigned DNA
tacctttagcttctgaacatacagccaaaaatccatcttctgtcactgctttaaacgaaggtctgactcctcatgtatctctgcccaggaacactttcttattggca

SEQ ID NO: 5539 - RNA, 111 nt, Homo sapiens
  source 1..111: mol_type = unassigned RNA
aacttaagtgcaaatttgaacagatgaagcaagatagaatcaccagataccagggtgctaacgtttgtgtgaaaaatcttgatgagagtattgatgatgaacgtctccaga

SEQ ID NO: 5540 - DNA, 111 bp, Homo sapiens
  source 1..111: mol_type = unassigned DNA
aacttaagtgcaaatttgaacagatgaagcaagatagaatcaccagataccagggtgctaacgtttgtgtgaaaaatcttgatgagagtattgatgatgaacgtctccaga

SEQ ID NO: 5541 - DNA, 111 bp, Homo sapiens
  source 1..111: mol_type = unassigned DNA
tctggagacgttcatcatcaatactctcatcaagatttttcacacaaacgttagcaccctggtatctggtgattctatcttgcttcatctgttcaaatttgcacttaagtt

SEQ ID NO: 5542 - RNA, 57 nt, Homo sapiens
  source 1..57: mol_type = unassigned RNA
cctgtgcatcttcctcatttcctccatctccatctgcctgtcgctgtacaagaccag

SEQ ID NO: 5543 - DNA, 57 bp, Homo sapiens
  source 1..57: mol_type = unassigned DNA
cctgtgcatcttcctcatttcctccatctccatctgcctgtcgctgtacaagaccag

SEQ ID NO: 5544 - DNA, 57 bp, Homo sapiens
  source 1..57: mol_type = unassigned DNA
ctggtcttgtacagcgacaggcagatggagatggaggaaatgaggaagatgcacagg

SEQ ID NO: 5545 - RNA, 30 nt, Homo sapiens
  source 1..30: mol_type = unassigned RNA
cagtggagaaggaagagggactctggggga

SEQ ID NO: 5546 - DNA, 30 bp, Homo sapiens
  source 1..30: mol_type = unassigned DNA
cagtggagaaggaagagggactctggggga

SEQ ID NO: 5547 - DNA, 30 bp, Homo sapiens
  source 1..30: mol_type = unassigned DNA
tcccccagagtccctcttccttctccactg

SEQ ID NO: 5548 - RNA, 31 nt, Homo sapiens
  source 1..31: mol_type = unassigned RNA
ggtcccataccagaatgactgaaccaaatct

SEQ ID NO: 5549 - DNA, 31 bp, Homo sapiens
  source 1..31: mol_type = unassigned DNA
ggtcccataccagaatgactgaaccaaatct

SEQ ID NO: 5550 - DNA, 31 bp, Homo sapiens
  source 1..31: mol_type = unassigned DNA
agatttggttcagtcattctggtatgggacc

SEQ ID NO: 5551 - RNA, 117 nt, Homo sapiens
  source 1..117: mol_type = unassigned RNA
tccatttccagccagtgagggctggctcgaatacactgcagagagccaggtttgctgctgggagcctctgccttagcagatgatgtggacaatgtctcccagacaactgaagaaagc

SEQ ID NO: 5552 - DNA, 117 bp, Homo sapiens
  source 1..117: mol_type = unassigned DNA
tccatttccagccagtgagggctggctcgaatacactgcagagagccaggtttgctgctgggagcctctgccttagcagatgatgtggacaatgtctcccagacaactgaagaaagc

SEQ ID NO: 5553 - DNA, 117 bp, Homo sapiens
  source 1..117: mol_type = unassigned DNA
gctttcttcagttgtctgggagacattgtccacatcatctgctaaggcagaggctcccagcagcaaacctggctctctgcagtgtattcgagccagccctcactggctggaaatgga

SEQ ID NO: 5554 - RNA, 113 nt, Homo sapiens
  source 1..113: mol_type = unassigned RNA
tcacccaggcttggcgtgctgtgatgcagtcatggcttaccacagccttgaacctgagcacaagagatcctcccacctgtctcctgagtagctaggactataggtgcacacca

SEQ ID NO: 5555 - DNA, 113 bp, Homo sapiens
  source 1..113: mol_type = unassigned DNA
tcacccaggcttggcgtgctgtgatgcagtcatggcttaccacagccttgaacctgagcacaagagatcctcccacctgtctcctgagtagctaggactataggtgcacacca

SEQ ID NO: 5556 - DNA, 113 bp, Homo sapiens
  source 1..113: mol_type = unassigned DNA
tggtgtgcacctatagtcctagctactcaggagacaggtgggaggatctcttgtgctcaggttcaaggctgtggtaagccatgactgcatcacagcacgccaagcctgggtga

SEQ ID NO: 5557 - RNA, 27 nt, Homo sapiens
  source 1..27: mol_type = unassigned RNA
aagcaagactgttgctcaaatctattc

SEQ ID NO: 5558 - DNA, 27 bp, Homo sapiens
  source 1..27: mol_type = unassigned DNA
aagcaagactgttgctcaaatctattc

SEQ ID NO: 5559 - DNA, 27 bp, Homo sapiens
  source 1..27: mol_type = unassigned DNA
gaatagatttgagcaacagtcttgctt

SEQ ID NO: 5560 - RNA, 82 nt, Homo sapiens
  source 1..82: mol_type = unassigned RNA
ctagacttttctgtctgtgcccagaggttctcttgatgatgattttctgaatgttttgagacgcccgtgacctggtctgtcc

SEQ ID NO: 5561 - DNA, 82 bp, Homo sapiens
  source 1..82: mol_type = unassigned DNA
ctagacttttctgtctgtgcccagaggttctcttgatgatgattttctgaatgttttgagacgcccgtgacctggtctgtcc

SEQ ID NO: 5562 - DNA, 82 bp, Homo sapiens
  source 1..82: mol_type = unassigned DNA
ggacagaccaggtcacgggcgtctcaaaacattcagaaaatcatcatcaagagaacctctgggcacagacagaaaagtctag

SEQ ID NO: 5563 - RNA, 145 nt, Homo sapiens
  source 1..145: mol_type = unassigned RNA
tttctccattaactcttttctttgatttcatctcagtcctcagaatttaaatataataagccagccttcctcaagaatgccagacagtggacagagaagcatgcaagacagaaacaaaaggtataatgtttgctactattgtcag

SEQ ID NO: 5564 - DNA, 145 bp, Homo sapiens
  source 1..145: mol_type = unassigned DNA
tttctccattaactcttttctttgatttcatctcagtcctcagaatttaaatataataagccagccttcctcaagaatgccagacagtggacagagaagcatgcaagacagaaacaaaaggtataatgtttgctactattgtcag

SEQ ID NO: 5565 - DNA, 145 bp, Homo sapiens
  source 1..145: mol_type = unassigned DNA
ctgacaatagtagcaaacattataccttttgtttctgtcttgcatgcttctctgtccactgtctggcattcttgaggaaggctggcttattatatttaaattctgaggactgagatgaaatcaaagaaaagagttaatggagaaa

SEQ ID NO: 5566 - RNA, 31 nt, Homo sapiens
  source 1..31: mol_type = unassigned RNA
tcatcaatgaggctctggacaaaggcagccc

SEQ ID NO: 5567 - DNA, 31 bp, Homo sapiens
  source 1..31: mol_type = unassigned DNA
tcatcaatgaggctctggacaaaggcagccc

SEQ ID NO: 5568 - DNA, 31 bp, Homo sapiens
  source 1..31: mol_type = unassigned DNA
gggctgcctttgtccagagcctcattgatga

SEQ ID NO: 5569 - RNA, 29 nt, Homo sapiens
  source 1..29: mol_type = unassigned RNA
aattactccagctcaaggaccttactttt

SEQ ID NO: 5570 - DNA, 29 bp, Homo sapiens
  source 1..29: mol_type = unassigned DNA
aattactccagctcaaggaccttactttt

SEQ ID NO: 5571 - DNA, 29 bp, Homo sapiens
  source 1..29: mol_type = unassigned DNA
aaaagtaaggtccttgagctggagtaatt

SEQ ID NO: 5572 - RNA, 47 nt, Homo sapiens
  source 1..47: mol_type = unassigned RNA
tatctgtctcccttctgcttgtggaactcccataatgtacatatcgt

SEQ ID NO: 5573 - DNA, 47 bp, Homo sapiens
  source 1..47: mol_type = unassigned DNA
tatctgtctcccttctgcttgtggaactcccataatgtacatatcgt

SEQ ID NO: 5574 - DNA, 47 bp, Homo sapiens
  source 1..47: mol_type = unassigned DNA
acgatatgtacattatgggagttccacaagcagaagggagacagata

SEQ ID NO: 5575 - RNA, 36 nt, Homo sapiens
  source 1..36: mol_type = unassigned RNA
gaacaggagggaagtgactgtggataatgagctgtc

SEQ ID NO: 5576 - DNA, 36 bp, Homo sapiens
  source 1..36: mol_type = unassigned DNA
gaacaggagggaagtgactgtggataatgagctgtc

SEQ ID NO: 5577 - DNA, 36 bp, Homo sapiens
  source 1..36: mol_type = unassigned DNA
gacagctcattatccacagtcacttccctcctgttc

SEQ ID NO: 5578 - RNA, 52 nt, Homo sapiens
  source 1..52: mol_type = unassigned RNA
acataatttgtgatagtgtgaaagaatggcactggcattattccctgccatc

SEQ ID NO: 5579 - DNA, 52 bp, Homo sapiens
  source 1..52: mol_type = unassigned DNA
acataatttgtgatagtgtgaaagaatggcactggcattattccctgccatc

SEQ ID NO: 5580 - DNA, 52 bp, Homo sapiens
  source 1..52: mol_type = unassigned DNA
gatggcagggaataatgccagtgccattctttcacactatcacaaattatgt

SEQ ID NO: 5581 - RNA, 29 nt, Homo sapiens
  source 1..29: mol_type = unassigned RNA
tctgctgctatccagctgtatgatttttg

SEQ ID NO: 5582 - DNA, 29 bp, Homo sapiens
  source 1..29: mol_type = unassigned DNA
tctgctgctatccagctgtatgatttttg

SEQ ID NO: 5583 - DNA, 29 bp, Homo sapiens
  source 1..29: mol_type = unassigned DNA
caaaaatcatacagctggatagcagcaga

SEQ ID NO: 5584 - RNA, 32 nt, Homo sapiens
  source 1..32: mol_type = unassigned RNA
cagtcaagttcagatggtagctgtaagacagc

SEQ ID NO: 5585 - DNA, 32 bp, Homo sapiens
  source 1..32: mol_type = unassigned DNA
cagtcaagttcagatggtagctgtaagacagc

SEQ ID NO: 5586 - DNA, 32 bp, Homo sapiens
  source 1..32: mol_type = unassigned DNA
gctgtcttacagctaccatctgaacttgactg

SEQ ID NO: 5587 - RNA, 45 nt, Homo sapiens
  source 1..45: mol_type = unassigned RNA
tcactggtgctatagaaattgagatgcccccccaggccagcaaat

SEQ ID NO: 5588 - DNA, 45 bp, Homo sapiens
  source 1..45: mol_type = unassigned DNA
tcactggtgctatagaaattgagatgcccccccaggccagcaaat

SEQ ID NO: 5589 - DNA, 45 bp, Homo sapiens
  source 1..45: mol_type = unassigned DNA
atttgctggcctgggggggcatctcaatttctatagcaccagtga

SEQ ID NO: 5590 - RNA, 35 nt, Homo sapiens
  source 1..35: mol_type = unassigned RNA
tcagcgtcctggcagaactctgtgtctgagcggcc

SEQ ID NO: 5591 - DNA, 35 bp, Homo sapiens
  source 1..35: mol_type = unassigned DNA
tcagcgtcctggcagaactctgtgtctgagcggcc

SEQ ID NO: 5592 - DNA, 35 bp, Homo sapiens
  source 1..35: mol_type = unassigned DNA
ggccgctcagacacagagttctgccaggacgctga

SEQ ID NO: 5593 - RNA, 32 nt, Homo sapiens
  source 1..32: mol_type = unassigned RNA
gctacgtgaaggaacagtttgcctggagacat

SEQ ID NO: 5594 - DNA, 32 bp, Homo sapiens
  source 1..32: mol_type = unassigned DNA
gctacgtgaaggaacagtttgcctggagacat

SEQ ID NO: 5595 - DNA, 32 bp, Homo sapiens
  source 1..32: mol_type = unassigned DNA
atgtctccaggcaaactgttccttcacgtagc

SEQ ID NO: 5596 - RNA, 30 nt, Homo sapiens
  source 1..30: mol_type = unassigned RNA
tgcagcttttggccaagacaagctgctaac

SEQ ID NO: 5597 - DNA, 30 bp, Homo sapiens
  source 1..30: mol_type = unassigned DNA
tgcagcttttggccaagacaagctgctaac

SEQ ID NO: 5598 - DNA, 30 bp, Homo sapiens
  source 1..30: mol_type = unassigned DNA
gttagcagcttgtcttggccaaaagctgca

SEQ ID NO: 5599 - RNA, 30 nt, Homo sapiens
  source 1..30: mol_type = unassigned RNA
tctttgttaaagatctgagggactcctcag

SEQ ID NO: 5600 - DNA, 30 bp, Homo sapiens
  source 1..30: mol_type = unassigned DNA
tctttgttaaagatctgagggactcctcag

SEQ ID NO: 5601 - DNA, 30 bp, Homo sapiens
  source 1..30: mol_type = unassigned DNA
ctgaggagtccctcagatctttaacaaaga

SEQ ID NO: 5602 - RNA, 29 nt, Homo sapiens
  source 1..29: mol_type = unassigned RNA
cagcaagactgctgtgggctcctcagaca

SEQ ID NO: 5603 - DNA, 29 bp, Homo sapiens
  source 1..29: mol_type = unassigned DNA
cagcaagactgctgtgggctcctcagaca

SEQ ID NO: 5604 - DNA, 29 bp, Homo sapiens
  source 1..29: mol_type = unassigned DNA
tgtctgaggagcccacagcagtcttgctg

SEQ ID NO: 5605 - RNA, 78 nt, Homo sapiens
  source 1..78: mol_type = unassigned RNA
tcttgtggtgaaacctcagatgcgtagcctcctggccaagcgtctgcaatttcatgttgttggagcattcgttgaata

SEQ ID NO: 5606 - DNA, 78 bp, Homo sapiens
  source 1..78: mol_type = unassigned DNA
tcttgtggtgaaacctcagatgcgtagcctcctggccaagcgtctgcaatttcatgttgttggagcattcgttgaata

SEQ ID NO: 5607 - DNA, 78 bp, Homo sapiens
  source 1..78: mol_type = unassigned DNA
tattcaacgaatgctccaacaacatgaaattgcagacgcttggccaggaggctacgcatctgaggtttcaccacaaga

SEQ ID NO: 5608 - RNA, 33 nt, Homo sapiens
  source 1..33: mol_type = unassigned RNA
cgtgactctggctcgcgtgctgccccggcagcc

SEQ ID NO: 5609 - DNA, 33 bp, Homo sapiens
  source 1..33: mol_type = unassigned DNA
cgtgactctggctcgcgtgctgccccggcagcc

SEQ ID NO: 5610 - DNA, 33 bp, Homo sapiens
  source 1..33: mol_type = unassigned DNA
ggctgccggggcagcacgcgagccagagtcacg

SEQ ID NO: 5611 - RNA, 39 nt, Homo sapiens
  source 1..39: mol_type = unassigned RNA
caggtgtgagccaccccgaccagccagttaaagtacatt

SEQ ID NO: 5612 - DNA, 39 bp, Homo sapiens
  source 1..39: mol_type = unassigned DNA
caggtgtgagccaccccgaccagccagttaaagtacatt

SEQ ID NO: 5613 - DNA, 39 bp, Homo sapiens
  source 1..39: mol_type = unassigned DNA
aatgtactttaactggctggtcggggtggctcacacctg

SEQ ID NO: 5614 - RNA, 32 nt, Homo sapiens
  source 1..32: mol_type = unassigned RNA
gcctgacctgggctctgcacagaagggcctgc

SEQ ID NO: 5615 - DNA, 32 bp, Homo sapiens
  source 1..32: mol_type = unassigned DNA
gcctgacctgggctctgcacagaagggcctgc

SEQ ID NO: 5616 - DNA, 32 bp, Homo sapiens
  source 1..32: mol_type = unassigned DNA
gcaggcccttctgtgcagagcccaggtcaggc

SEQ ID NO: 5617 - RNA, 103 nt, Homo sapiens
  source 1..103: mol_type = unassigned RNA
ttgctatttatgctctctttcctgtcactttcagggtgttcaaggtggaaaaggtgaacagggtccccctggtcctccaggcttccaggtaagtcaactcaaa

SEQ ID NO: 5618 - DNA, 103 bp, Homo sapiens
  source 1..103: mol_type = unassigned DNA
ttgctatttatgctctctttcctgtcactttcagggtgttcaaggtggaaaaggtgaacagggtccccctggtcctccaggcttccaggtaagtcaactcaaa

SEQ ID NO: 5619 - DNA, 103 bp, Homo sapiens
  source 1..103: mol_type = unassigned DNA
tttgagttgacttacctggaagcctggaggaccagggggaccctgttcaccttttccaccttgaacaccctgaaagtgacaggaaagagagcataaatagcaa

SEQ ID NO: 5620 - RNA, 146 nt, Homo sapiens
  source 1..146: mol_type = unassigned RNA
ctctccacgcccccgccacgccccacctgcccgcgcgcccaaacccggagcccgcccgccccgcccctaccgcccctctgcccgggcccgggagcgtctgggaggccggcgcctccaggtttcgggcaaaaagcagcaccccattc

SEQ ID NO: 5621 - DNA, 146 bp, Homo sapiens
  source 1..146: mol_type = unassigned DNA
ctctccacgcccccgccacgccccacctgcccgcgcgcccaaacccggagcccgcccgccccgcccctaccgcccctctgcccgggcccgggagcgtctgggaggccggcgcctccaggtttcgggcaaaaagcagcaccccattc

SEQ ID NO: 5622 - DNA, 146 bp, Homo sapiens
  source 1..146: mol_type = unassigned DNA
gaatggggtgctgctttttgcccgaaacctggaggcgccggcctcccagacgctcccgggcccgggcagaggggcggtaggggcggggcgggcgggctccgggtttgggcgcgcgggcaggtggggcgtggcgggggcgtggagag

SEQ ID NO: 5623 - RNA, 29 nt, Homo sapiens
  source 1..29: mol_type = unassigned RNA
cccggacaccaggccggccccgggctcca

SEQ ID NO: 5624 - DNA, 29 bp, Homo sapiens
  source 1..29: mol_type = unassigned DNA
cccggacaccaggccggccccgggctcca

SEQ ID NO: 5625 - DNA, 29 bp, Homo sapiens
  source 1..29: mol_type = unassigned DNA
tggagcccggggccggcctggtgtccggg

SEQ ID NO: 5626 - RNA, 174 nt, Homo sapiens
  source 1..174: mol_type = unassigned RNA
aaaaagtcagcgccctcaggaccgcgggtaaccacgtcctcctgagcgtggtgaccaggtcacaggctgtccctcgtgcctcagtgttctcatctgtatgtcgagcactgcacagaattggctcatgctctgaggctctcacgcctgtgatggaagagacagagaagggggtgg

SEQ ID NO: 5627 - DNA, 174 bp, Homo sapiens
  source 1..174: mol_type = unassigned DNA
aaaaagtcagcgccctcaggaccgcgggtaaccacgtcctcctgagcgtggtgaccaggtcacaggctgtccctcgtgcctcagtgttctcatctgtatgtcgagcactgcacagaattggctcatgctctgaggctctcacgcctgtgatggaagagacagagaagggggtgg

SEQ ID NO: 5628 - DNA, 174 bp, Homo sapiens
  source 1..174: mol_type = unassigned DNA
ccacccccttctctgtctcttccatcacaggcgtgagagcctcagagcatgagccaattctgtgcagtgctcgacatacagatgagaacactgaggcacgagggacagcctgtgacctggtcaccacgctcaggaggacgtggttacccgcggtcctgagggcgctgacttttt

SEQ ID NO: 5629 - RNA, 40 nt, Homo sapiens
  source 1..40: mol_type = unassigned RNA
tgttatcgtgggtctgaagttctcggcctgatggtgaaaa

SEQ ID NO: 5630 - DNA, 40 bp, Homo sapiens
  source 1..40: mol_type = unassigned DNA
tgttatcgtgggtctgaagttctcggcctgatggtgaaaa

SEQ ID NO: 5631 - DNA, 40 bp, Homo sapiens
  source 1..40: mol_type = unassigned DNA
ttttcaccatcaggccgagaacttcagacccacgataaca

SEQ ID NO: 5632 - RNA, 145 nt, Homo sapiens
  source 1..145: mol_type = unassigned RNA
tgtaaatgccaaatgaaaaacgttttttgctgctatggtcttagcctgtagacatgctgctagtatcagaggggcagtagagcttggacagaaagaaaagaaacttggtgttaggtaattgactatgcactagtatttcagactt

SEQ ID NO: 5633 - DNA, 145 bp, Homo sapiens
  source 1..145: mol_type = unassigned DNA
tgtaaatgccaaatgaaaaacgttttttgctgctatggtcttagcctgtagacatgctgctagtatcagaggggcagtagagcttggacagaaagaaaagaaacttggtgttaggtaattgactatgcactagtatttcagactt

SEQ ID NO: 5634 - DNA, 145 bp, Homo sapiens
  source 1..145: mol_type = unassigned DNA
aagtctgaaatactagtgcatagtcaattacctaacaccaagtttcttttctttctgtccaagctctactgcccctctgatactagcagcatgtctacaggctaagaccatagcagcaaaaaacgtttttcatttggcatttaca

SEQ ID NO: 5635 - RNA, 50 nt, Homo sapiens
  source 1..50: mol_type = unassigned RNA
tctctgcactccataatctttgtaaccctgctctgggtccagtttctctc

SEQ ID NO: 5636 - DNA, 50 bp, Homo sapiens
  source 1..50: mol_type = unassigned DNA
tctctgcactccataatctttgtaaccctgctctgggtccagtttctctc

SEQ ID NO: 5637 - DNA, 50 bp, Homo sapiens
  source 1..50: mol_type = unassigned DNA
gagagaaactggacccagagcagggttacaaagattatggagtgcagaga

SEQ ID NO: 5638 - RNA, 96 nt, Homo sapiens
  source 1..96: mol_type = unassigned RNA
ataaccttagtgaaatgatgggtctcccattttcttagggtcctgcaggtgctcgtggtccagctggccctcctggcaaggctggtgaagatgtaa

SEQ ID NO: 5639 - DNA, 96 bp, Homo sapiens
  source 1..96: mol_type = unassigned DNA
ataaccttagtgaaatgatgggtctcccattttcttagggtcctgcaggtgctcgtggtccagctggccctcctggcaaggctggtgaagatgtaa

SEQ ID NO: 5640 - DNA, 96 bp, Homo sapiens
  source 1..96: mol_type = unassigned DNA
ttacatcttcaccagccttgccaggagggccagctggaccacgagcacctgcaggaccctaagaaaatgggagacccatcatttcactaaggttat

SEQ ID NO: 5641 - RNA, 23 nt, Homo sapiens
  source 1..23: mol_type = unassigned RNA
tattataggaggtttatagtttt

SEQ ID NO: 5642 - DNA, 23 bp, Homo sapiens
  source 1..23: mol_type = unassigned DNA
tattataggaggtttatagtttt

SEQ ID NO: 5643 - DNA, 23 bp, Homo sapiens
  source 1..23: mol_type = unassigned DNA
aaaactataaacctcctataata

SEQ ID NO: 5644 - RNA, 43 nt, Homo sapiens
  source 1..43: mol_type = unassigned RNA
gaagtcattgggagaattccctgagccctaggatgaagataga

SEQ ID NO: 5645 - DNA, 43 bp, Homo sapiens
  source 1..43: mol_type = unassigned DNA
gaagtcattgggagaattccctgagccctaggatgaagataga

SEQ ID NO: 5646 - DNA, 43 bp, Homo sapiens
  source 1..43: mol_type = unassigned DNA
tctatcttcatcctagggctcagggaattctcccaatgacttc

SEQ ID NO: 5647 - RNA, 35 nt, Homo sapiens
  source 1..35: mol_type = unassigned RNA
tagttgtcacactgggagaactcaaagaagtcaga

SEQ ID NO: 5648 - DNA, 35 bp, Homo sapiens
  source 1..35: mol_type = unassigned DNA
tagttgtcacactgggagaactcaaagaagtcaga

SEQ ID NO: 5649 - DNA, 35 bp, Homo sapiens
  source 1..35: mol_type = unassigned DNA
tctgacttctttgagttctcccagtgtgacaacta

SEQ ID NO: 5650 - RNA, 31 nt, Homo sapiens
  source 1..31: mol_type = unassigned RNA
tgaggctgctggggctggacttgtatggcct

SEQ ID NO: 5651 - DNA, 31 bp, Homo sapiens
  source 1..31: mol_type = unassigned DNA
tgaggctgctggggctggacttgtatggcct

SEQ ID NO: 5652 - DNA, 31 bp, Homo sapiens
  source 1..31: mol_type = unassigned DNA
aggccatacaagtccagccccagcagcctca

SEQ ID NO: 5653 - RNA, 66 nt, Homo sapiens
  source 1..66: mol_type = unassigned RNA
tttttctttttaaccctgagctgagctgccattctgtcacaatagtctctaaaacagggtacatgc

SEQ ID NO: 5654 - DNA, 66 bp, Homo sapiens
  source 1..66: mol_type = unassigned DNA
tttttctttttaaccctgagctgagctgccattctgtcacaatagtctctaaaacagggtacatgc

SEQ ID NO: 5655 - DNA, 66 bp, Homo sapiens
  source 1..66: mol_type = unassigned DNA
gcatgtaccctgttttagagactattgtgacagaatggcagctcagctcagggttaaaaagaaaaa

SEQ ID NO: 5656 - RNA, 29 nt, Homo sapiens
  source 1..29: mol_type = unassigned RNA
agctggagtcggaaccagtggaggtggct

SEQ ID NO: 5657 - DNA, 29 bp, Homo sapiens
  source 1..29: mol_type = unassigned DNA
agctggagtcggaaccagtggaggtggct

SEQ ID NO: 5658 - DNA, 29 bp, Homo sapiens
  source 1..29: mol_type = unassigned DNA
agccacctccactggttccgactccagct

SEQ ID NO: 5659 - RNA, 59 nt, Homo sapiens
  source 1..59: mol_type = unassigned RNA
ctcgggcaggccgagagggcggcggccgggtacccagatccctactctagggcctccct

SEQ ID NO: 5660 - DNA, 59 bp, Homo sapiens
  source 1..59: mol_type = unassigned DNA
ctcgggcaggccgagagggcggcggccgggtacccagatccctactctagggcctccct

SEQ ID NO: 5661 - DNA, 59 bp, Homo sapiens
  source 1..59: mol_type = unassigned DNA
agggaggccctagagtagggatctgggtacccggccgccgccctctcggcctgcccgag

SEQ ID NO: 5662 - RNA, 29 nt, Homo sapiens
  source 1..29: mol_type = unassigned RNA
tcgtaggaacatcgtgggctgccgcattc

SEQ ID NO: 5663 - DNA, 29 bp, Homo sapiens
  source 1..29: mol_type = unassigned DNA
tcgtaggaacatcgtgggctgccgcattc

SEQ ID NO: 5664 - DNA, 29 bp, Homo sapiens
  source 1..29: mol_type = unassigned DNA
gaatgcggcagcccacgatgttcctacga

SEQ ID NO: 5665 - RNA, 138 nt, Homo sapiens
  source 1..138: mol_type = unassigned RNA
atgcagaggacacactcgtcaggactgcagcaaagctggaaggataagctttatggacaagacttgggttagagaggtagacatacaaaggaagacgtgcagggggatgtgcagaagtgactgtggagtagctcctca

SEQ ID NO: 5666 - DNA, 138 bp, Homo sapiens
  source 1..138: mol_type = unassigned DNA
atgcagaggacacactcgtcaggactgcagcaaagctggaaggataagctttatggacaagacttgggttagagaggtagacatacaaaggaagacgtgcagggggatgtgcagaagtgactgtggagtagctcctca

SEQ ID NO: 5667 - DNA, 138 bp, Homo sapiens
  source 1..138: mol_type = unassigned DNA
tgaggagctactccacagtcacttctgcacatccccctgcacgtcttcctttgtatgtctacctctctaacccaagtcttgtccataaagcttatccttccagctttgctgcagtcctgacgagtgtgtcctctgcat

SEQ ID NO: 5668 - RNA, 177 nt, Homo sapiens
  source 1..177: mol_type = unassigned RNA
agagctctctcaccatcctctccaacctctacctcctataagagccagtgaaggacctgaggcttgaaaccagaggtgtcttttagccatgagggaaagttcagagatgcggacacagcaactcagcctcatgtggctgctaaatcaacccccaaactgcccttcctgactcctcat

SEQ ID NO: 5669 - DNA, 177 bp, Homo sapiens
  source 1..177: mol_type = unassigned DNA
agagctctctcaccatcctctccaacctctacctcctataagagccagtgaaggacctgaggcttgaaaccagaggtgtcttttagccatgagggaaagttcagagatgcggacacagcaactcagcctcatgtggctgctaaatcaacccccaaactgcccttcctgactcctcat

SEQ ID NO: 5670 - DNA, 177 bp, Homo sapiens
  source 1..177: mol_type = unassigned DNA
atgaggagtcaggaagggcagtttgggggttgatttagcagccacatgaggctgagttgctgtgtccgcatctctgaactttccctcatggctaaaagacacctctggtttcaagcctcaggtccttcactggctcttataggaggtagaggttggagaggatggtgagagagctct

SEQ ID NO: 5671 - RNA, 32 nt, Homo sapiens
  source 1..32: mol_type = unassigned RNA
ccgtccagcaggtcgcccccgataagacatgc

SEQ ID NO: 5672 - DNA, 32 bp, Homo sapiens
  source 1..32: mol_type = unassigned DNA
ccgtccagcaggtcgcccccgataagacatgc

SEQ ID NO: 5673 - DNA, 32 bp, Homo sapiens
  source 1..32: mol_type = unassigned DNA
gcatgtcttatcgggggcgacctgctggacgg

SEQ ID NO: 5674 - RNA, 23 nt, Homo sapiens
  source 1..23: mol_type = unassigned RNA
tctctcaatgatagactcacaca

SEQ ID NO: 5675 - DNA, 23 bp, Homo sapiens
  source 1..23: mol_type = unassigned DNA
tctctcaatgatagactcacaca

SEQ ID NO: 5676 - DNA, 23 bp, Homo sapiens
  source 1..23: mol_type = unassigned DNA
tgtgtgagtctatcattgagaga

SEQ ID NO: 5677 - RNA, 31 nt, Homo sapiens
  source 1..31: mol_type = unassigned RNA
ctctttcacttcccaactgaactttgtgcag

SEQ ID NO: 5678 - DNA, 31 bp, Homo sapiens
  source 1..31: mol_type = unassigned DNA
ctctttcacttcccaactgaactttgtgcag

SEQ ID NO: 5679 - DNA, 31 bp, Homo sapiens
  source 1..31: mol_type = unassigned DNA
ctgcacaaagttcagttgggaagtgaaagag

SEQ ID NO: 5680 - RNA, 30 nt, Homo sapiens
  source 1..30: mol_type = unassigned RNA
cccggcgagcttggccgggagtcagctctc

SEQ ID NO: 5681 - DNA, 30 bp, Homo sapiens
  source 1..30: mol_type = unassigned DNA
cccggcgagcttggccgggagtcagctctc

SEQ ID NO: 5682 - DNA, 30 bp, Homo sapiens
  source 1..30: mol_type = unassigned DNA
gagagctgactcccggccaagctcgccggg

SEQ ID NO: 5683 - RNA, 43 nt, Homo sapiens
  source 1..43: mol_type = unassigned RNA
aaactgcatggtagaattcacagaaggctgcacatacagagag

SEQ ID NO: 5684 - DNA, 43 bp, Homo sapiens
  source 1..43: mol_type = unassigned DNA
aaactgcatggtagaattcacagaaggctgcacatacagagag

SEQ ID NO: 5685 - DNA, 43 bp, Homo sapiens
  source 1..43: mol_type = unassigned DNA
ctctctgtatgtgcagccttctgtgaattctaccatgcagttt

SEQ ID NO: 5686 - RNA, 31 nt, Homo sapiens
  source 1..31: mol_type = unassigned RNA
tcaccgtgtatggactgctggacaaggccca

SEQ ID NO: 5687 - DNA, 31 bp, Homo sapiens
  source 1..31: mol_type = unassigned DNA
tcaccgtgtatggactgctggacaaggccca

SEQ ID NO: 5688 - DNA, 31 bp, Homo sapiens
  source 1..31: mol_type = unassigned DNA
tgggccttgtccagcagtccatacacggtga

SEQ ID NO: 5689 - RNA, 31 nt, Homo sapiens
  source 1..31: mol_type = unassigned RNA
tttcccgaaagtgccagattgtcagcgtcct

SEQ ID NO: 5690 - DNA, 31 bp, Homo sapiens
  source 1..31: mol_type = unassigned DNA
tttcccgaaagtgccagattgtcagcgtcct

SEQ ID NO: 5691 - DNA, 31 bp, Homo sapiens
  source 1..31: mol_type = unassigned DNA
aggacgctgacaatctggcactttcgggaaa

SEQ ID NO: 5692 - RNA, 26 nt, Homo sapiens
  source 1..26: mol_type = unassigned RNA
ctctactacaagctccttgagggcag

SEQ ID NO: 5693 - DNA, 26 bp, Homo sapiens
  source 1..26: mol_type = unassigned DNA
ctctactacaagctccttgagggcag

SEQ ID NO: 5694 - DNA, 26 bp, Homo sapiens
  source 1..26: mol_type = unassigned DNA
ctgccctcaaggagcttgtagtagag

SEQ ID NO: 5695 - RNA, 102 nt, Homo sapiens
  source 1..102: mol_type = unassigned RNA
aagtacttgcatcttttttaaatagacaaactcgttataggatattcatcacatatgccttctttctgcctagaatgatttatttttctgtctttttatatt

SEQ ID NO: 5696 - DNA, 102 bp, Homo sapiens
  source 1..102: mol_type = unassigned DNA
aagtacttgcatcttttttaaatagacaaactcgttataggatattcatcacatatgccttctttctgcctagaatgatttatttttctgtctttttatatt

SEQ ID NO: 5697 - DNA, 102 bp, Homo sapiens
  source 1..102: mol_type = unassigned DNA
aatataaaaagacagaaaaataaatcattctaggcagaaagaaggcatatgtgatgaatatcctataacgagtttgtctatttaaaaaagatgcaagtactt

SEQ ID NO: 5698 - RNA, 22 nt, Homo sapiens
  source 1..22: mol_type = unassigned RNA
ttctctagtgattgtatcattc

SEQ ID NO: 5699 - DNA, 22 bp, Homo sapiens
  source 1..22: mol_type = unassigned DNA
ttctctagtgattgtatcattc

SEQ ID NO: 5700 - DNA, 22 bp, Homo sapiens
  source 1..22: mol_type = unassigned DNA
gaatgatacaatcactagagaa

SEQ ID NO: 5701 - RNA, 30 nt, Homo sapiens
  source 1..30: mol_type = unassigned RNA
cctcaggccctgtccctctccagctcttgg

SEQ ID NO: 5702 - DNA, 30 bp, Homo sapiens
  source 1..30: mol_type = unassigned DNA
cctcaggccctgtccctctccagctcttgg

SEQ ID NO: 5703 - DNA, 30 bp, Homo sapiens
  source 1..30: mol_type = unassigned DNA
ccaagagctggagagggacagggcctgagg

SEQ ID NO: 5704 - RNA, 31 nt, Homo sapiens
  source 1..31: mol_type = unassigned RNA
tgcagggtgccgggaacccagacggaacaac

SEQ ID NO: 5705 - DNA, 31 bp, Homo sapiens
  source 1..31: mol_type = unassigned DNA
tgcagggtgccgggaacccagacggaacaac

SEQ ID NO: 5706 - DNA, 31 bp, Homo sapiens
  source 1..31: mol_type = unassigned DNA
gttgttccgtctgggttcccggcaccctgca

SEQ ID NO: 5707 - RNA, 122 nt, Homo sapiens
  source 1..122: mol_type = unassigned RNA
gtgctgattcttcaaaaggctcccagagctgcactctggagaccaataactgacttcgatatctcaagtcttgattacaaagaaatataagttacccagttgtctatgagaatccaactgcc

SEQ ID NO: 5708 - DNA, 122 bp, Homo sapiens
  source 1..122: mol_type = unassigned DNA
gtgctgattcttcaaaaggctcccagagctgcactctggagaccaataactgacttcgatatctcaagtcttgattacaaagaaatataagttacccagttgtctatgagaatccaactgcc

SEQ ID NO: 5709 - DNA, 122 bp, Homo sapiens
  source 1..122: mol_type = unassigned DNA
ggcagttggattctcatagacaactgggtaacttatatttctttgtaatcaagacttgagatatcgaagtcagttattggtctccagagtgcagctctgggagccttttgaagaatcagcac

SEQ ID NO: 5710 - RNA, 23 nt, Homo sapiens
  source 1..23: mol_type = unassigned RNA
tgcttagtttaatgttgttggtt

SEQ ID NO: 5711 - DNA, 23 bp, Homo sapiens
  source 1..23: mol_type = unassigned DNA
tgcttagtttaatgttgttggtt

SEQ ID NO: 5712 - DNA, 23 bp, Homo sapiens
  source 1..23: mol_type = unassigned DNA
aaccaacaacattaaactaagca

SEQ ID NO: 5713 - RNA, 30 nt, Homo sapiens
  source 1..30: mol_type = unassigned RNA
tctcttatgtggtagaactcacattgtttg

SEQ ID NO: 5714 - DNA, 30 bp, Homo sapiens
  source 1..30: mol_type = unassigned DNA
tctcttatgtggtagaactcacattgtttg

SEQ ID NO: 5715 - DNA, 30 bp, Homo sapiens
  source 1..30: mol_type = unassigned DNA
caaacaatgtgagttctaccacataagaga

SEQ ID NO: 5716 - RNA, 27 nt, Homo sapiens
  source 1..27: mol_type = unassigned RNA
ttgaatcgctttttggaaaaaggaaat

SEQ ID NO: 5717 - DNA, 27 bp, Homo sapiens
  source 1..27: mol_type = unassigned DNA
ttgaatcgctttttggaaaaaggaaat

SEQ ID NO: 5718 - DNA, 27 bp, Homo sapiens
  source 1..27: mol_type = unassigned DNA
atttcctttttccaaaaagcgattcaa

SEQ ID NO: 5719 - RNA, 170 nt, Homo sapiens
  source 1..170: mol_type = unassigned RNA
cagcagtgatgacagtcctcttcccatggactctctacctagattttaagtgctgtgggcgtgctcctaacttttcctcctgcacacccggggctggcagccctgcctctagtcctctctgggaccgggaggccctgtgagccagtgaggaggccatggggatcctgtgt

SEQ ID NO: 5720 - DNA, 170 bp, Homo sapiens
  source 1..170: mol_type = unassigned DNA
cagcagtgatgacagtcctcttcccatggactctctacctagattttaagtgctgtgggcgtgctcctaacttttcctcctgcacacccggggctggcagccctgcctctagtcctctctgggaccgggaggccctgtgagccagtgaggaggccatggggatcctgtgt

SEQ ID NO: 5721 - DNA, 170 bp, Homo sapiens
  source 1..170: mol_type = unassigned DNA
acacaggatccccatggcctcctcactggctcacagggcctcccggtcccagagaggactagaggcagggctgccagccccgggtgtgcaggaggaaaagttaggagcacgcccacagcacttaaaatctaggtagagagtccatgggaagaggactgtcatcactgctg

SEQ ID NO: 5722 - RNA, 30 nt, Homo sapiens
  source 1..30: mol_type = unassigned RNA
aaatccgagagctctgggacaggttgcaaa

SEQ ID NO: 5723 - DNA, 30 bp, Homo sapiens
  source 1..30: mol_type = unassigned DNA
aaatccgagagctctgggacaggttgcaaa

SEQ ID NO: 5724 - DNA, 30 bp, Homo sapiens
  source 1..30: mol_type = unassigned DNA
tttgcaacctgtcccagagctctcggattt

SEQ ID NO: 5725 - RNA, 55 nt, Homo sapiens
  source 1..55: mol_type = unassigned RNA
tccgggactcggctggcaaaagcggcgcagagctaggcgaggaaggcgagcggag

SEQ ID NO: 5726 - DNA, 55 bp, Homo sapiens
  source 1..55: mol_type = unassigned DNA
tccgggactcggctggcaaaagcggcgcagagctaggcgaggaaggcgagcggag

SEQ ID NO: 5727 - DNA, 55 bp, Homo sapiens
  source 1..55: mol_type = unassigned DNA
ctccgctcgccttcctcgcctagctctgcgccgcttttgccagccgagtcccgga

SEQ ID NO: 5728 - RNA, 31 nt, Homo sapiens
  source 1..31: mol_type = unassigned RNA
agctgctctgcagagtggtggccggggccag

SEQ ID NO: 5729 - DNA, 31 bp, Homo sapiens
  source 1..31: mol_type = unassigned DNA
agctgctctgcagagtggtggccggggccag

SEQ ID NO: 5730 - DNA, 31 bp, Homo sapiens
  source 1..31: mol_type = unassigned DNA
ctggccccggccaccactctgcagagcagct

SEQ ID NO: 5731 - RNA, 72 nt, Homo sapiens
  source 1..72: mol_type = unassigned RNA
cctgtaattctcgttgcattgatttgtttatctgtatgtcttcttcttttagcccttagtctcactgaaaga

SEQ ID NO: 5732 - DNA, 72 bp, Homo sapiens
  source 1..72: mol_type = unassigned DNA
cctgtaattctcgttgcattgatttgtttatctgtatgtcttcttcttttagcccttagtctcactgaaaga

SEQ ID NO: 5733 - DNA, 72 bp, Homo sapiens
  source 1..72: mol_type = unassigned DNA
tctttcagtgagactaagggctaaaagaagaagacatacagataaacaaatcaatgcaacgagaattacagg

SEQ ID NO: 5734 - RNA, 32 nt, Homo sapiens
  source 1..32: mol_type = unassigned RNA
ttgggacccaggtcttggcagtgatgagaccc

SEQ ID NO: 5735 - DNA, 32 bp, Homo sapiens
  source 1..32: mol_type = unassigned DNA
ttgggacccaggtcttggcagtgatgagaccc

SEQ ID NO: 5736 - DNA, 32 bp, Homo sapiens
  source 1..32: mol_type = unassigned DNA
gggtctcatcactgccaagacctgggtcccaa

SEQ ID NO: 5737 - RNA, 32 nt, Homo sapiens
  source 1..32: mol_type = unassigned RNA
gggtcttaccaggggtcctcttgccaggacgc

SEQ ID NO: 5738 - DNA, 32 bp, Homo sapiens
  source 1..32: mol_type = unassigned DNA
gggtcttaccaggggtcctcttgccaggacgc

SEQ ID NO: 5739 - DNA, 32 bp, Homo sapiens
  source 1..32: mol_type = unassigned DNA
gcgtcctggcaagaggacccctggtaagaccc

SEQ ID NO: 5740 - RNA, 53 nt, Homo sapiens
  source 1..53: mol_type = unassigned RNA
gaagagtaggagccaaggcaggcagagagcacaccagggagaatgggcggctg

SEQ ID NO: 5741 - DNA, 53 bp, Homo sapiens
  source 1..53: mol_type = unassigned DNA
gaagagtaggagccaaggcaggcagagagcacaccagggagaatgggcggctg

SEQ ID NO: 5742 - DNA, 53 bp, Homo sapiens
  source 1..53: mol_type = unassigned DNA
cagccgcccattctccctggtgtgctctctgcctgccttggctcctactcttc

SEQ ID NO: 5743 - RNA, 99 nt, Homo sapiens
  source 1..99: mol_type = unassigned RNA
tagcttagctgaagtacagtggaacaccaggtagacttccatggtttattactgtagtccatggctttcagatgacatggactagagtaaaaatcctta

SEQ ID NO: 5744 - DNA, 99 bp, Homo sapiens
  source 1..99: mol_type = unassigned DNA
tagcttagctgaagtacagtggaacaccaggtagacttccatggtttattactgtagtccatggctttcagatgacatggactagagtaaaaatcctta

SEQ ID NO: 5745 - DNA, 99 bp, Homo sapiens
  source 1..99: mol_type = unassigned DNA
taaggatttttactctagtccatgtcatctgaaagccatggactacagtaataaaccatggaagtctacctggtgttccactgtacttcagctaagcta

SEQ ID NO: 5746 - RNA, 45 nt, Homo sapiens
  source 1..45: mol_type = unassigned RNA
agcttcctcccgcagggctgccgggctgtagggttggcagctgca

SEQ ID NO: 5747 - DNA, 45 bp, Homo sapiens
  source 1..45: mol_type = unassigned DNA
agcttcctcccgcagggctgccgggctgtagggttggcagctgca

SEQ ID NO: 5748 - DNA, 45 bp, Homo sapiens
  source 1..45: mol_type = unassigned DNA
tgcagctgccaaccctacagcccggcagccctgcgggaggaagct

SEQ ID NO: 5749 - RNA, 24 nt, Homo sapiens
  source 1..24: mol_type = unassigned RNA
cagggcactggcagagtccactgg

SEQ ID NO: 5750 - DNA, 24 bp, Homo sapiens
  source 1..24: mol_type = unassigned DNA
cagggcactggcagagtccactgg

SEQ ID NO: 5751 - DNA, 24 bp, Homo sapiens
  source 1..24: mol_type = unassigned DNA
ccagtggactctgccagtgccctg

SEQ ID NO: 5752 - RNA, 34 nt, Homo sapiens
  source 1..34: mol_type = unassigned RNA
agagccagaagggcccccggggccagagccctgg

SEQ ID NO: 5753 - DNA, 34 bp, Homo sapiens
  source 1..34: mol_type = unassigned DNA
agagccagaagggcccccggggccagagccctgg

SEQ ID NO: 5754 - DNA, 34 bp, Homo sapiens
  source 1..34: mol_type = unassigned DNA
ccagggctctggccccgggggcccttctggctct

SEQ ID NO: 5755 - RNA, 31 nt, Homo sapiens
  source 1..31: mol_type = unassigned RNA
atttttattaccaggtcccccagaagcaggt

SEQ ID NO: 5756 - DNA, 31 bp, Homo sapiens
  source 1..31: mol_type = unassigned DNA
atttttattaccaggtcccccagaagcaggt

SEQ ID NO: 5757 - DNA, 31 bp, Homo sapiens
  source 1..31: mol_type = unassigned DNA
acctgcttctgggggacctggtaataaaaat

SEQ ID NO: 5758 - RNA, 87 nt, Homo sapiens
  source 1..87: mol_type = unassigned RNA
ttgcctggggagaactttctcatgttgtcacatgaagtattctggaacagtagtttcccttctgatatctgaagcaccttgaggtac

SEQ ID NO: 5759 - DNA, 87 bp, Homo sapiens
  source 1..87: mol_type = unassigned DNA
ttgcctggggagaactttctcatgttgtcacatgaagtattctggaacagtagtttcccttctgatatctgaagcaccttgaggtac

SEQ ID NO: 5760 - DNA, 87 bp, Homo sapiens
  source 1..87: mol_type = unassigned DNA
gtacctcaaggtgcttcagatatcagaagggaaactactgttccagaatacttcatgtgacaacatgagaaagttctccccaggcaa

SEQ ID NO: 5761 - RNA, 51 nt, Homo sapiens
  source 1..51: mol_type = unassigned RNA
atctgatctttgccgtaggcctgcacacttttgttggactgagctgcctga

SEQ ID NO: 5762 - DNA, 51 bp, Homo sapiens
  source 1..51: mol_type = unassigned DNA
atctgatctttgccgtaggcctgcacacttttgttggactgagctgcctga

SEQ ID NO: 5763 - DNA, 51 bp, Homo sapiens
  source 1..51: mol_type = unassigned DNA
tcaggcagctcagtccaacaaaagtgtgcaggcctacggcaaagatcagat

SEQ ID NO: 5764 - RNA, 31 nt, Homo sapiens
  source 1..31: mol_type = unassigned RNA
gtaaccattcgagaactctgtaagtgctatg

SEQ ID NO: 5765 - DNA, 31 bp, Homo sapiens
  source 1..31: mol_type = unassigned DNA
gtaaccattcgagaactctgtaagtgctatg

SEQ ID NO: 5766 - DNA, 31 bp, Homo sapiens
  source 1..31: mol_type = unassigned DNA
catagcacttacagagttctcgaatggttac

SEQ ID NO: 5767 - RNA, 31 nt, Homo sapiens
  source 1..31: mol_type = unassigned RNA
accccctgctagaccgtgtcaggaccgccga

SEQ ID NO: 5768 - DNA, 31 bp, Homo sapiens
  source 1..31: mol_type = unassigned DNA
accccctgctagaccgtgtcaggaccgccga

SEQ ID NO: 5769 - DNA, 31 bp, Homo sapiens
  source 1..31: mol_type = unassigned DNA
tcggcggtcctgacacggtctagcagggggt

SEQ ID NO: 5770 - RNA, 47 nt, Homo sapiens
  source 1..47: mol_type = unassigned RNA
gtcccttttcctctgggtggcagtgatgattggcctgagcctgttat

SEQ ID NO: 5771 - DNA, 47 bp, Homo sapiens
  source 1..47: mol_type = unassigned DNA
gtcccttttcctctgggtggcagtgatgattggcctgagcctgttat

SEQ ID NO: 5772 - DNA, 47 bp, Homo sapiens
  source 1..47: mol_type = unassigned DNA
ataacaggctcaggccaatcatcactgccacccagaggaaaagggac

SEQ ID NO: 5773 - RNA, 30 nt, Homo sapiens
  source 1..30: mol_type = unassigned RNA
aaatatttcagactgtgtggaccaaaaggc

SEQ ID NO: 5774 - DNA, 30 bp, Homo sapiens
  source 1..30: mol_type = unassigned DNA
aaatatttcagactgtgtggaccaaaaggc

SEQ ID NO: 5775 - DNA, 30 bp, Homo sapiens
  source 1..30: mol_type = unassigned DNA
gccttttggtccacacagtctgaaatattt

SEQ ID NO: 5776 - RNA, 29 nt, Homo sapiens
  source 1..29: mol_type = unassigned RNA
tcttattccagctagaaggactattaata

SEQ ID NO: 5777 - DNA, 29 bp, Homo sapiens
  source 1..29: mol_type = unassigned DNA
tcttattccagctagaaggactattaata

SEQ ID NO: 5778 - DNA, 29 bp, Homo sapiens
  source 1..29: mol_type = unassigned DNA
tattaatagtccttctagctggaataaga

SEQ ID NO: 5779 - RNA, 117 nt, Homo sapiens
  source 1..117: mol_type = unassigned RNA
ttgcattaagtgtgtgatgatgccaaggacagtaatatctgaactaattcgtactcttacctgtttaaagtgactgtacagcctttggtgcagctccaaaagctgcttgacttgata

SEQ ID NO: 5780 - DNA, 117 bp, Homo sapiens
  source 1..117: mol_type = unassigned DNA
ttgcattaagtgtgtgatgatgccaaggacagtaatatctgaactaattcgtactcttacctgtttaaagtgactgtacagcctttggtgcagctccaaaagctgcttgacttgata

SEQ ID NO: 5781 - DNA, 117 bp, Homo sapiens
  source 1..117: mol_type = unassigned DNA
tatcaagtcaagcagcttttggagctgcaccaaaggctgtacagtcactttaaacaggtaagagtacgaattagttcagatattactgtccttggcatcatcacacacttaatgcaa

SEQ ID NO: 5782 - RNA, 33 nt, Homo sapiens
  source 1..33: mol_type = unassigned RNA
cttattagtcaaggacaaagaacagagctgatg

SEQ ID NO: 5783 - DNA, 33 bp, Homo sapiens
  source 1..33: mol_type = unassigned DNA
cttattagtcaaggacaaagaacagagctgatg

SEQ ID NO: 5784 - DNA, 33 bp, Homo sapiens
  source 1..33: mol_type = unassigned DNA
catcagctctgttctttgtccttgactaataag

SEQ ID NO: 5785 - RNA, 30 nt, Homo sapiens
  source 1..30: mol_type = unassigned RNA
tgttattgatctatgtggtgacatagaaat

SEQ ID NO: 5786 - DNA, 30 bp, Homo sapiens
  source 1..30: mol_type = unassigned DNA
tgttattgatctatgtggtgacatagaaat

SEQ ID NO: 5787 - DNA, 30 bp, Homo sapiens
  source 1..30: mol_type = unassigned DNA
atttctatgtcaccacatagatcaataaca

SEQ ID NO: 5788 - RNA, 162 nt, Homo sapiens
  source 1..162: mol_type = unassigned RNA
gaattttcttgttgcatctgttgtacagaatctggtggaattgctccagcttcctggtttagaggaagacaaagccttccagaaagagataggcctcaagactctggtgttcaaagcttacaggtaacgtcccatgggatgggcagttttcctccgcctccc

SEQ ID NO: 5789 - DNA, 162 bp, Homo sapiens
  source 1..162: mol_type = unassigned DNA
gaattttcttgttgcatctgttgtacagaatctggtggaattgctccagcttcctggtttagaggaagacaaagccttccagaaagagataggcctcaagactctggtgttcaaagcttacaggtaacgtcccatgggatgggcagttttcctccgcctccc

SEQ ID NO: 5790 - DNA, 162 bp, Homo sapiens
  source 1..162: mol_type = unassigned DNA
gggaggcggaggaaaactgcccatcccatgggacgttacctgtaagctttgaacaccagagtcttgaggcctatctctttctggaaggctttgtcttcctctaaaccaggaagctggagcaattccaccagattctgtacaacagatgcaacaagaaaattc

SEQ ID NO: 5791 - RNA, 32 nt, Homo sapiens
  source 1..32: mol_type = unassigned RNA
cagcattatgacccaaggactggaatctttac

SEQ ID NO: 5792 - DNA, 32 bp, Homo sapiens
  source 1..32: mol_type = unassigned DNA
cagcattatgacccaaggactggaatctttac

SEQ ID NO: 5793 - DNA, 32 bp, Homo sapiens
  source 1..32: mol_type = unassigned DNA
gtaaagattccagtccttgggtcataatgctg

SEQ ID NO: 5794 - RNA, 31 nt, Homo sapiens
  source 1..31: mol_type = unassigned RNA
cttaactgaactgcagcctgacccggtgcgc

SEQ ID NO: 5795 - DNA, 31 bp, Homo sapiens
  source 1..31: mol_type = unassigned DNA
cttaactgaactgcagcctgacccggtgcgc

SEQ ID NO: 5796 - DNA, 31 bp, Homo sapiens
  source 1..31: mol_type = unassigned DNA
gcgcaccgggtcaggctgcagttcagttaag

SEQ ID NO: 5797 - RNA, 33 nt, Homo sapiens
  source 1..33: mol_type = unassigned RNA
ttttctctctaggtgctttccaggtctttttaa

SEQ ID NO: 5798 - DNA, 33 bp, Homo sapiens
  source 1..33: mol_type = unassigned DNA
ttttctctctaggtgctttccaggtctttttaa

SEQ ID NO: 5799 - DNA, 33 bp, Homo sapiens
  source 1..33: mol_type = unassigned DNA
ttaaaaagacctggaaagcacctagagagaaaa

SEQ ID NO: 5800 - RNA, 159 nt, Homo sapiens
  source 1..159: mol_type = unassigned RNA
ccactccctgccagcactcagccggtcacctggcttcctctcctcctcctcctattaccccagggtggagcccagaagacacccagatggctctcagagggacacagggagcctggtgccctgtgccctggtcccagctgatctgttccccaacaagcc

SEQ ID NO: 5801 - DNA, 159 bp, Homo sapiens
  source 1..159: mol_type = unassigned DNA
ccactccctgccagcactcagccggtcacctggcttcctctcctcctcctcctattaccccagggtggagcccagaagacacccagatggctctcagagggacacagggagcctggtgccctgtgccctggtcccagctgatctgttccccaacaagcc

SEQ ID NO: 5802 - DNA, 159 bp, Homo sapiens
  source 1..159: mol_type = unassigned DNA
ggcttgttggggaacagatcagctgggaccagggcacagggcaccaggctccctgtgtccctctgagagccatctgggtgtcttctgggctccaccctggggtaataggaggaggaggagaggaagccaggtgaccggctgagtgctggcagggagtgg

SEQ ID NO: 5803 - RNA, 32 nt, Homo sapiens
  source 1..32: mol_type = unassigned RNA
aacggggttagggctggcaggactctcgctgc

SEQ ID NO: 5804 - DNA, 32 bp, Homo sapiens
  source 1..32: mol_type = unassigned DNA
aacggggttagggctggcaggactctcgctgc

SEQ ID NO: 5805 - DNA, 32 bp, Homo sapiens
  source 1..32: mol_type = unassigned DNA
gcagcgagagtcctgccagccctaaccccgtt

SEQ ID NO: 5806 - RNA, 102 nt, Homo sapiens
  source 1..102: mol_type = unassigned RNA
tcaaaacagattgaaccatgttgtagctaaaatggaaatcctctccttgccctccctgtgatgagaccggaacagtcgagctgacagccccagtttctgtag

SEQ ID NO: 5807 - DNA, 102 bp, Homo sapiens
  source 1..102: mol_type = unassigned DNA
tcaaaacagattgaaccatgttgtagctaaaatggaaatcctctccttgccctccctgtgatgagaccggaacagtcgagctgacagccccagtttctgtag

SEQ ID NO: 5808 - DNA, 102 bp, Homo sapiens
  source 1..102: mol_type = unassigned DNA
ctacagaaactggggctgtcagctcgactgttccggtctcatcacagggagggcaaggagaggatttccattttagctacaacatggttcaatctgttttga

SEQ ID NO: 5809 - RNA, 51 nt, Homo sapiens
  source 1..51: mol_type = unassigned RNA
tgccttgcacgatgatatggagagccagcccctgattggaacccagtccac

SEQ ID NO: 5810 - DNA, 51 bp, Homo sapiens
  source 1..51: mol_type = unassigned DNA
tgccttgcacgatgatatggagagccagcccctgattggaacccagtccac

SEQ ID NO: 5811 - DNA, 51 bp, Homo sapiens
  source 1..51: mol_type = unassigned DNA
gtggactgggttccaatcaggggctggctctccatatcatcgtgcaaggca

SEQ ID NO: 5812 - RNA, 29 nt, Homo sapiens
  source 1..29: mol_type = unassigned RNA
ccccggacaccaggccggccccgggctcc

SEQ ID NO: 5813 - DNA, 29 bp, Homo sapiens
  source 1..29: mol_type = unassigned DNA
ccccggacaccaggccggccccgggctcc

SEQ ID NO: 5814 - DNA, 29 bp, Homo sapiens
  source 1..29: mol_type = unassigned DNA
ggagcccggggccggcctggtgtccgggg

SEQ ID NO: 5815 - RNA, 25 nt, Homo sapiens
  source 1..25: mol_type = unassigned RNA
acaattactaactctgaggagaagt

SEQ ID NO: 5816 - DNA, 25 bp, Homo sapiens
  source 1..25: mol_type = unassigned DNA
acaattactaactctgaggagaagt

SEQ ID NO: 5817 - DNA, 25 bp, Homo sapiens
  source 1..25: mol_type = unassigned DNA
acttctcctcagagttagtaattgt

SEQ ID NO: 5818 - RNA, 92 nt, Homo sapiens
  source 1..92: mol_type = unassigned RNA
aataaagtgagctttgccgtccccagccatggagagtatcagaattcatgaatgcactggtagatttcaaactctcaaatttcagaagtgct

SEQ ID NO: 5819 - DNA, 92 bp, Homo sapiens
  source 1..92: mol_type = unassigned DNA
aataaagtgagctttgccgtccccagccatggagagtatcagaattcatgaatgcactggtagatttcaaactctcaaatttcagaagtgct

SEQ ID NO: 5820 - DNA, 92 bp, Homo sapiens
  source 1..92: mol_type = unassigned DNA
agcacttctgaaatttgagagtttgaaatctaccagtgcattcatgaattctgatactctccatggctggggacggcaaagctcactttatt

SEQ ID NO: 5821 - RNA, 31 nt, Homo sapiens
  source 1..31: mol_type = unassigned RNA
ccgttcactcattccacaggcgtttgctgtg

SEQ ID NO: 5822 - DNA, 31 bp, Homo sapiens
  source 1..31: mol_type = unassigned DNA
ccgttcactcattccacaggcgtttgctgtg

SEQ ID NO: 5823 - DNA, 31 bp, Homo sapiens
  source 1..31: mol_type = unassigned DNA
cacagcaaacgcctgtggaatgagtgaacgg

SEQ ID NO: 5824 - RNA, 33 nt, Homo sapiens
  source 1..33: mol_type = unassigned RNA
tgcggaagtagcagtccggtcctagggactagc

SEQ ID NO: 5825 - DNA, 33 bp, Homo sapiens
  source 1..33: mol_type = unassigned DNA
tgcggaagtagcagtccggtcctagggactagc

SEQ ID NO: 5826 - DNA, 33 bp, Homo sapiens
  source 1..33: mol_type = unassigned DNA
gctagtccctaggaccggactgctacttccgca

SEQ ID NO: 5827 - RNA, 36 nt, Homo sapiens
  source 1..36: mol_type = unassigned RNA
atggtatgacttttaatggataagggtctgcttctt

SEQ ID NO: 5828 - DNA, 36 bp, Homo sapiens
  source 1..36: mol_type = unassigned DNA
atggtatgacttttaatggataagggtctgcttctt

SEQ ID NO: 5829 - DNA, 36 bp, Homo sapiens
  source 1..36: mol_type = unassigned DNA
aagaagcagacccttatccattaaaagtcataccat

SEQ ID NO: 5830 - RNA, 137 nt, Homo sapiens
  source 1..137: mol_type = unassigned RNA
ctctttctctagcagaatcaaacagacagaaatgaagttgaatgctgggaagtctttgtttaaaaaagtggttgctgttgtctagaatcacagagacactcagaaggaattgggactggatgtggaggaaagacatc

SEQ ID NO: 5831 - DNA, 137 bp, Homo sapiens
  source 1..137: mol_type = unassigned DNA
ctctttctctagcagaatcaaacagacagaaatgaagttgaatgctgggaagtctttgtttaaaaaagtggttgctgttgtctagaatcacagagacactcagaaggaattgggactggatgtggaggaaagacatc

SEQ ID NO: 5832 - DNA, 137 bp, Homo sapiens
  source 1..137: mol_type = unassigned DNA
gatgtctttcctccacatccagtcccaattccttctgagtgtctctgtgattctagacaacagcaaccacttttttaaacaaagacttcccagcattcaacttcatttctgtctgtttgattctgctagagaaagag

SEQ ID NO: 5833 - RNA, 31 nt, Homo sapiens
  source 1..31: mol_type = unassigned RNA
cagaacactgaccaggggcctaaagagcagg

SEQ ID NO: 5834 - DNA, 31 bp, Homo sapiens
  source 1..31: mol_type = unassigned DNA
cagaacactgaccaggggcctaaagagcagg

SEQ ID NO: 5835 - DNA, 31 bp, Homo sapiens
  source 1..31: mol_type = unassigned DNA
cctgctctttaggcccctggtcagtgttctg

SEQ ID NO: 5836 - RNA, 26 nt, Homo sapiens
  source 1..26: mol_type = unassigned RNA
gtgacctctgagggggataggtctct

SEQ ID NO: 5837 - DNA, 26 bp, Homo sapiens
  source 1..26: mol_type = unassigned DNA
gtgacctctgagggggataggtctct

SEQ ID NO: 5838 - DNA, 26 bp, Homo sapiens
  source 1..26: mol_type = unassigned DNA
agagacctatccccctcagaggtcac

SEQ ID NO: 5839 - RNA, 32 nt, Homo sapiens
  source 1..32: mol_type = unassigned RNA
gtacagtgatgatgagagaggctgaacaatcc

SEQ ID NO: 5840 - DNA, 32 bp, Homo sapiens
  source 1..32: mol_type = unassigned DNA
gtacagtgatgatgagagaggctgaacaatcc

SEQ ID NO: 5841 - DNA, 32 bp, Homo sapiens
  source 1..32: mol_type = unassigned DNA
ggattgttcagcctctctcatcatcactgtac

SEQ ID NO: 5842 - RNA, 62 nt, Homo sapiens
  source 1..62: mol_type = unassigned RNA
ttaggctagcaggctgatggggacaaaagggtctaggctgaggcccccagggaggagtagaa

SEQ ID NO: 5843 - DNA, 62 bp, Homo sapiens
  source 1..62: mol_type = unassigned DNA
ttaggctagcaggctgatggggacaaaagggtctaggctgaggcccccagggaggagtagaa

SEQ ID NO: 5844 - DNA, 62 bp, Homo sapiens
  source 1..62: mol_type = unassigned DNA
ttctactcctccctgggggcctcagcctagacccttttgtccccatcagcctgctagcctaa

SEQ ID NO: 5845 - RNA, 64 nt, Homo sapiens
  source 1..64: mol_type = unassigned RNA
cccccagtgatgtatcccctactctgagctgcatttggggatggctgaggccagaggggagggg

SEQ ID NO: 5846 - DNA, 64 bp, Homo sapiens
  source 1..64: mol_type = unassigned DNA
cccccagtgatgtatcccctactctgagctgcatttggggatggctgaggccagaggggagggg

SEQ ID NO: 5847 - DNA, 64 bp, Homo sapiens
  source 1..64: mol_type = unassigned DNA
cccctcccctctggcctcagccatccccaaatgcagctcagagtaggggatacatcactggggg

SEQ ID NO: 5848 - RNA, 165 nt, Homo sapiens
  source 1..165: mol_type = unassigned RNA
atgtataagccaattaactgcgagccaactgaagaagccaccctgttcaccctttcccacacccttcaagtgcaaatttctcccttttctcccaagccagcttgctgcttcttccctctacgtctgccctgaaatagaaatgtcagacatttaagtgcaagtgag

SEQ ID NO: 5849 - DNA, 165 bp, Homo sapiens
  source 1..165: mol_type = unassigned DNA
atgtataagccaattaactgcgagccaactgaagaagccaccctgttcaccctttcccacacccttcaagtgcaaatttctcccttttctcccaagccagcttgctgcttcttccctctacgtctgccctgaaatagaaatgtcagacatttaagtgcaagtgag

SEQ ID NO: 5850 - DNA, 165 bp, Homo sapiens
  source 1..165: mol_type = unassigned DNA
ctcacttgcacttaaatgtctgacatttctatttcagggcagacgtagagggaagaagcagcaagctggcttgggagaaaagggagaaatttgcacttgaagggtgtgggaaagggtgaacagggtggcttcttcagttggctcgcagttaattggcttatacat

SEQ ID NO: 5851 - RNA, 44 nt, Homo sapiens
  source 1..44: mol_type = unassigned RNA
actttcagtaggtcaacttgaaactcatgccttcttctccttgt

SEQ ID NO: 5852 - DNA, 44 bp, Homo sapiens
  source 1..44: mol_type = unassigned DNA
actttcagtaggtcaacttgaaactcatgccttcttctccttgt

SEQ ID NO: 5853 - DNA, 44 bp, Homo sapiens
  source 1..44: mol_type = unassigned DNA
acaaggagaagaaggcatgagtttcaagttgacctactgaaagt

SEQ ID NO: 5854 - RNA, 35 nt, Homo sapiens
  source 1..35: mol_type = unassigned RNA
gttttggcagtgggagaataaacatttcagccaga

SEQ ID NO: 5855 - DNA, 35 bp, Homo sapiens
  source 1..35: mol_type = unassigned DNA
gttttggcagtgggagaataaacatttcagccaga

SEQ ID NO: 5856 - DNA, 35 bp, Homo sapiens
  source 1..35: mol_type = unassigned DNA
tctggctgaaatgtttattctcccactgccaaaac

SEQ ID NO: 5857 - RNA, 45 nt, Homo sapiens
  source 1..45: mol_type = unassigned RNA
ccctgactgccttcctgtgcccagaaaggaaggggctattgcctc

SEQ ID NO: 5858 - DNA, 45 bp, Homo sapiens
  source 1..45: mol_type = unassigned DNA
ccctgactgccttcctgtgcccagaaaggaaggggctattgcctc

SEQ ID NO: 5859 - DNA, 45 bp, Homo sapiens
  source 1..45: mol_type = unassigned DNA
gaggcaatagccccttcctttctgggcacaggaaggcagtcaggg

SEQ ID NO: 5860 - RNA, 29 nt, Homo sapiens
  source 1..29: mol_type = unassigned RNA
tatggagctccagagaagggattcgctca

SEQ ID NO: 5861 - DNA, 29 bp, Homo sapiens
  source 1..29: mol_type = unassigned DNA
tatggagctccagagaagggattcgctca

SEQ ID NO: 5862 - DNA, 29 bp, Homo sapiens
  source 1..29: mol_type = unassigned DNA
tgagcgaatcccttctctggagctccata

SEQ ID NO: 5863 - RNA, 30 nt, Homo sapiens
  source 1..30: mol_type = unassigned RNA
taagttttagatattaatttgtgtggtatt

SEQ ID NO: 5864 - DNA, 30 bp, Homo sapiens
  source 1..30: mol_type = unassigned DNA
taagttttagatattaatttgtgtggtatt

SEQ ID NO: 5865 - DNA, 30 bp, Homo sapiens
  source 1..30: mol_type = unassigned DNA
aataccacacaaattaatatctaaaactta

SEQ ID NO: 5866 - RNA, 34 nt, Homo sapiens
  source 1..34: mol_type = unassigned RNA
cagattgccagctctgggttgaccgtggaggtag

SEQ ID NO: 5867 - DNA, 34 bp, Homo sapiens
  source 1..34: mol_type = unassigned DNA
cagattgccagctctgggttgaccgtggaggtag

SEQ ID NO: 5868 - DNA, 34 bp, Homo sapiens
  source 1..34: mol_type = unassigned DNA
ctacctccacggtcaacccagagctggcaatctg

SEQ ID NO: 5869 - RNA, 44 nt, Homo sapiens
  source 1..44: mol_type = unassigned RNA
taaaaggatttcgtagttatgtggacatgtatttgaaggacaag

SEQ ID NO: 5870 - DNA, 44 bp, Homo sapiens
  source 1..44: mol_type = unassigned DNA
taaaaggatttcgtagttatgtggacatgtatttgaaggacaag

SEQ ID NO: 5871 - DNA, 44 bp, Homo sapiens
  source 1..44: mol_type = unassigned DNA
cttgtccttcaaatacatgtccacataactacgaaatcctttta

SEQ ID NO: 5872 - RNA, 30 nt, Homo sapiens
  source 1..30: mol_type = unassigned RNA
gattctaaacgaccaggtgcccaggctgag

SEQ ID NO: 5873 - DNA, 30 bp, Homo sapiens
  source 1..30: mol_type = unassigned DNA
gattctaaacgaccaggtgcccaggctgag

SEQ ID NO: 5874 - DNA, 30 bp, Homo sapiens
  source 1..30: mol_type = unassigned DNA
ctcagcctgggcacctggtcgtttagaatc

SEQ ID NO: 5875 - RNA, 30 nt, Homo sapiens
  source 1..30: mol_type = unassigned RNA
tagatatgatggctggtgggctgggcccat

SEQ ID NO: 5876 - DNA, 30 bp, Homo sapiens
  source 1..30: mol_type = unassigned DNA
tagatatgatggctggtgggctgggcccat

SEQ ID NO: 5877 - DNA, 30 bp, Homo sapiens
  source 1..30: mol_type = unassigned DNA
atgggcccagcccaccagccatcatatcta

SEQ ID NO: 5878 - RNA, 28 nt, Homo sapiens
  source 1..28: mol_type = unassigned RNA
aatcccagaggcaagaactgtggaaata

SEQ ID NO: 5879 - DNA, 28 bp, Homo sapiens
  source 1..28: mol_type = unassigned DNA
aatcccagaggcaagaactgtggaaata

SEQ ID NO: 5880 - DNA, 28 bp, Homo sapiens
  source 1..28: mol_type = unassigned DNA
tatttccacagttcttgcctctgggatt

SEQ ID NO: 5881 - RNA, 55 nt, Homo sapiens
  source 1..55: mol_type = unassigned RNA
agtgccttccaccaccaccaggagctgctctgggtctgtggcagagggagattaa

SEQ ID NO: 5882 - DNA, 55 bp, Homo sapiens
  source 1..55: mol_type = unassigned DNA
agtgccttccaccaccaccaggagctgctctgggtctgtggcagagggagattaa

SEQ ID NO: 5883 - DNA, 55 bp, Homo sapiens
  source 1..55: mol_type = unassigned DNA
ttaatctccctctgccacagacccagagcagctcctggtggtggtggaaggcact

SEQ ID NO: 5884 - RNA, 28 nt, Homo sapiens
  source 1..28: mol_type = unassigned RNA
gaaccctctgagccttgtggagcccggt

SEQ ID NO: 5885 - DNA, 28 bp, Homo sapiens
  source 1..28: mol_type = unassigned DNA
gaaccctctgagccttgtggagcccggt

SEQ ID NO: 5886 - DNA, 28 bp, Homo sapiens
  source 1..28: mol_type = unassigned DNA
accgggctccacaaggctcagagggttc

SEQ ID NO: 5887 - RNA, 52 nt, Homo sapiens
  source 1..52: mol_type = unassigned RNA
aaccctgactgtgggcttgagaacaaagatgaactctagaactctagcagcc

SEQ ID NO: 5888 - DNA, 52 bp, Homo sapiens
  source 1..52: mol_type = unassigned DNA
aaccctgactgtgggcttgagaacaaagatgaactctagaactctagcagcc

SEQ ID NO: 5889 - DNA, 52 bp, Homo sapiens
  source 1..52: mol_type = unassigned DNA
ggctgctagagttctagagttcatctttgttctcaagcccacagtcagggtt

SEQ ID NO: 5890 - RNA, 36 nt, Homo sapiens
  source 1..36: mol_type = unassigned RNA
cagagctgcttgtgcgctggtaccagatgggtgctt

SEQ ID NO: 5891 - DNA, 36 bp, Homo sapiens
  source 1..36: mol_type = unassigned DNA
cagagctgcttgtgcgctggtaccagatgggtgctt

SEQ ID NO: 5892 - DNA, 36 bp, Homo sapiens
  source 1..36: mol_type = unassigned DNA
aagcacccatctggtaccagcgcacaagcagctctg

SEQ ID NO: 5893 - RNA, 30 nt, Homo sapiens
  source 1..30: mol_type = unassigned RNA
ccccatttcggctgcagcctcggacctagc

SEQ ID NO: 5894 - DNA, 30 bp, Homo sapiens
  source 1..30: mol_type = unassigned DNA
ccccatttcggctgcagcctcggacctagc

SEQ ID NO: 5895 - DNA, 30 bp, Homo sapiens
  source 1..30: mol_type = unassigned DNA
gctaggtccgaggctgcagccgaaatgggg

SEQ ID NO: 5896 - RNA, 39 nt, Homo sapiens
  source 1..39: mol_type = unassigned RNA
aaggctacgtgaaggaacagtttgcctggagacatttct

SEQ ID NO: 5897 - DNA, 39 bp, Homo sapiens
  source 1..39: mol_type = unassigned DNA
aaggctacgtgaaggaacagtttgcctggagacatttct

SEQ ID NO: 5898 - DNA, 39 bp, Homo sapiens
  source 1..39: mol_type = unassigned DNA
agaaatgtctccaggcaaactgttccttcacgtagcctt

SEQ ID NO: 5899 - RNA, 24 nt, Homo sapiens
  source 1..24: mol_type = unassigned RNA
ccagtttatcagactatgatgaga

SEQ ID NO: 5900 - DNA, 24 bp, Homo sapiens
  source 1..24: mol_type = unassigned DNA
ccagtttatcagactatgatgaga

SEQ ID NO: 5901 - DNA, 24 bp, Homo sapiens
  source 1..24: mol_type = unassigned DNA
tctcatcatagtctgataaactgg

SEQ ID NO: 5902 - RNA, 31 nt, Homo sapiens
  source 1..31: mol_type = unassigned RNA
tgagctgtgcccgtctggctgagatgaggca

SEQ ID NO: 5903 - DNA, 31 bp, Homo sapiens
  source 1..31: mol_type = unassigned DNA
tgagctgtgcccgtctggctgagatgaggca

SEQ ID NO: 5904 - DNA, 31 bp, Homo sapiens
  source 1..31: mol_type = unassigned DNA
tgcctcatctcagccagacgggcacagctca

SEQ ID NO: 5905 - RNA, 28 nt, Homo sapiens
  source 1..28: mol_type = unassigned RNA
taagagacttttttgaactcagacttaa

SEQ ID NO: 5906 - DNA, 28 bp, Homo sapiens
  source 1..28: mol_type = unassigned DNA
taagagacttttttgaactcagacttaa

SEQ ID NO: 5907 - DNA, 28 bp, Homo sapiens
  source 1..28: mol_type = unassigned DNA
ttaagtctgagttcaaaaaagtctctta

SEQ ID NO: 5908 - RNA, 31 nt, Homo sapiens
  source 1..31: mol_type = unassigned RNA
ttcagcttctcaatcagtgactgtgtgctaa

SEQ ID NO: 5909 - DNA, 31 bp, Homo sapiens
  source 1..31: mol_type = unassigned DNA
ttcagcttctcaatcagtgactgtgtgctaa

SEQ ID NO: 5910 - DNA, 31 bp, Homo sapiens
  source 1..31: mol_type = unassigned DNA
ttagcacacagtcactgattgagaagctgaa

SEQ ID NO: 5911 - RNA, 28 nt, Homo sapiens
  source 1..28: mol_type = unassigned RNA
gtttccccatctgtagaacaaggagggc

SEQ ID NO: 5912 - DNA, 28 bp, Homo sapiens
  source 1..28: mol_type = unassigned DNA
gtttccccatctgtagaacaaggagggc

SEQ ID NO: 5913 - DNA, 28 bp, Homo sapiens
  source 1..28: mol_type = unassigned DNA
gccctccttgttctacagatggggaaac

SEQ ID NO: 5914 - RNA, 161 nt, Homo sapiens
  source 1..161: mol_type = unassigned RNA
tattcaaaaggaaccaggaggttttttttttgtcaacattgtgatgtatattcctttgaagatagtaactgtagatggaaaaacttgtgctataaagctaagtgctttcctaaatcagatgttttggtcaagtagcttgactcagtataggtagggagata

SEQ ID NO: 5915 - DNA, 161 bp, Homo sapiens
  source 1..161: mol_type = unassigned DNA
tattcaaaaggaaccaggaggttttttttttgtcaacattgtgatgtatattcctttgaagatagtaactgtagatggaaaaacttgtgctataaagctaagtgctttcctaaatcagatgttttggtcaagtagcttgactcagtataggtagggagata

SEQ ID NO: 5916 - DNA, 161 bp, Homo sapiens
  source 1..161: mol_type = unassigned DNA
tatctccctacctatactgagtcaagctacttgaccaaaacatctgatttaggaaagcacttagctttatagcacaagtttttccatctacagttactatcttcaaaggaatatacatcacaatgttgacaaaaaaaaaacctcctggttccttttgaata

SEQ ID NO: 5917 - RNA, 69 nt, Homo sapiens
  source 1..69: mol_type = unassigned RNA
tttctccatgggagaactctcatccagtgtcctcagactgtcctctgatgcccaataggacctcctgct

SEQ ID NO: 5918 - DNA, 69 bp, Homo sapiens
  source 1..69: mol_type = unassigned DNA
tttctccatgggagaactctcatccagtgtcctcagactgtcctctgatgcccaataggacctcctgct

SEQ ID NO: 5919 - DNA, 69 bp, Homo sapiens
  source 1..69: mol_type = unassigned DNA
agcaggaggtcctattgggcatcagaggacagtctgaggacactggatgagagttctcccatggagaaa

SEQ ID NO: 5920 - RNA, 34 nt, Homo sapiens
  source 1..34: mol_type = unassigned RNA
cattactagtaaagaactcttacaaacaaagttg

SEQ ID NO: 5921 - DNA, 34 bp, Homo sapiens
  source 1..34: mol_type = unassigned DNA
cattactagtaaagaactcttacaaacaaagttg

SEQ ID NO: 5922 - DNA, 34 bp, Homo sapiens
  source 1..34: mol_type = unassigned DNA
caactttgtttgtaagagttctttactagtaatg

SEQ ID NO: 5923 - RNA, 24 nt, Homo sapiens
  source 1..24: mol_type = unassigned RNA
taatctgtatgtcttttacttgtc

SEQ ID NO: 5924 - DNA, 24 bp, Homo sapiens
  source 1..24: mol_type = unassigned DNA
taatctgtatgtcttttacttgtc

SEQ ID NO: 5925 - DNA, 24 bp, Homo sapiens
  source 1..24: mol_type = unassigned DNA
gacaagtaaaagacatacagatta

SEQ ID NO: 5926 - RNA, 29 nt, Homo sapiens
  source 1..29: mol_type = unassigned RNA
gtgcctctactgtggaacaggaggtcact

SEQ ID NO: 5927 - DNA, 29 bp, Homo sapiens
  source 1..29: mol_type = unassigned DNA
gtgcctctactgtggaacaggaggtcact

SEQ ID NO: 5928 - DNA, 29 bp, Homo sapiens
  source 1..29: mol_type = unassigned DNA
agtgacctcctgttccacagtagaggcac

SEQ ID NO: 5929 - RNA, 179 nt, Homo sapiens
  source 1..179: mol_type = unassigned RNA
gttaatgacagaagtcttctggctttagtgatcttgaacttttttttctagggtttacactgtgattttgcttgcctgatgttcaaacacctggtacacaaaccatcggaggagagagtaagagaaataattatcaatgctgttcggatagaacaggtaaagtgggtgatgaaatgggt

SEQ ID NO: 5930 - DNA, 179 bp, Homo sapiens
  source 1..179: mol_type = unassigned DNA
gttaatgacagaagtcttctggctttagtgatcttgaacttttttttctagggtttacactgtgattttgcttgcctgatgttcaaacacctggtacacaaaccatcggaggagagagtaagagaaataattatcaatgctgttcggatagaacaggtaaagtgggtgatgaaatgggt

SEQ ID NO: 5931 - DNA, 179 bp, Homo sapiens
  source 1..179: mol_type = unassigned DNA
acccatttcatcacccactttacctgttctatccgaacagcattgataattatttctcttactctctcctccgatggtttgtgtaccaggtgtttgaacatcaggcaagcaaaatcacagtgtaaaccctagaaaaaaaagttcaagatcactaaagccagaagacttctgtcattaac

SEQ ID NO: 5932 - RNA, 36 nt, Homo sapiens
  source 1..36: mol_type = unassigned RNA
tagaaaccagaatgctttgtttttaccagattcacc

SEQ ID NO: 5933 - DNA, 36 bp, Homo sapiens
  source 1..36: mol_type = unassigned DNA
tagaaaccagaatgctttgtttttaccagattcacc

SEQ ID NO: 5934 - DNA, 36 bp, Homo sapiens
  source 1..36: mol_type = unassigned DNA
ggtgaatctggtaaaaacaaagcattctggtttcta

SEQ ID NO: 5935 - RNA, 30 nt, Homo sapiens
  source 1..30: mol_type = unassigned RNA
tgggactccacccccatgatttctcatctc

SEQ ID NO: 5936 - DNA, 30 bp, Homo sapiens
  source 1..30: mol_type = unassigned DNA
tgggactccacccccatgatttctcatctc

SEQ ID NO: 5937 - DNA, 30 bp, Homo sapiens
  source 1..30: mol_type = unassigned DNA
gagatgagaaatcatgggggtggagtccca

SEQ ID NO: 5938 - RNA, 33 nt, Homo sapiens
  source 1..33: mol_type = unassigned RNA
gtgctccctgacctgaaggaggaggatggcagc

SEQ ID NO: 5939 - DNA, 33 bp, Homo sapiens
  source 1..33: mol_type = unassigned DNA
gtgctccctgacctgaaggaggaggatggcagc

SEQ ID NO: 5940 - DNA, 33 bp, Homo sapiens
  source 1..33: mol_type = unassigned DNA
gctgccatcctcctccttcaggtcagggagcac

SEQ ID NO: 5941 - RNA, 30 nt, Homo sapiens
  source 1..30: mol_type = unassigned RNA
ccgggatgtgcaggccgggaggtagaggca

SEQ ID NO: 5942 - DNA, 30 bp, Homo sapiens
  source 1..30: mol_type = unassigned DNA
ccgggatgtgcaggccgggaggtagaggca

SEQ ID NO: 5943 - DNA, 30 bp, Homo sapiens
  source 1..30: mol_type = unassigned DNA
tgcctctacctcccggcctgcacatcccgg

SEQ ID NO: 5944 - RNA, 25 nt, Homo sapiens
  source 1..25: mol_type = unassigned RNA
tatgtgaggaaatgcttctgaatct

SEQ ID NO: 5945 - DNA, 25 bp, Homo sapiens
  source 1..25: mol_type = unassigned DNA
tatgtgaggaaatgcttctgaatct

SEQ ID NO: 5946 - DNA, 25 bp, Homo sapiens
  source 1..25: mol_type = unassigned DNA
agattcagaagcatttcctcacata

SEQ ID NO: 5947 - RNA, 25 nt, Homo sapiens
  source 1..25: mol_type = unassigned RNA
ttttccacttgtagaattaacttac

SEQ ID NO: 5948 - DNA, 25 bp, Homo sapiens
  source 1..25: mol_type = unassigned DNA
ttttccacttgtagaattaacttac

SEQ ID NO: 5949 - DNA, 25 bp, Homo sapiens
  source 1..25: mol_type = unassigned DNA
gtaagttaattctacaagtggaaaa

SEQ ID NO: 5950 - RNA, 32 nt, Homo sapiens
  source 1..32: mol_type = unassigned RNA
tgactttccaatctgtatgtctttttcttgtc

SEQ ID NO: 5951 - DNA, 32 bp, Homo sapiens
  source 1..32: mol_type = unassigned DNA
tgactttccaatctgtatgtctttttcttgtc

SEQ ID NO: 5952 - DNA, 32 bp, Homo sapiens
  source 1..32: mol_type = unassigned DNA
gacaagaaaaagacatacagattggaaagtca

SEQ ID NO: 5953 - RNA, 31 nt, Homo sapiens
  source 1..31: mol_type = unassigned RNA
gcacctgcccgaccagggactgcgggcatgg

SEQ ID NO: 5954 - DNA, 31 bp, Homo sapiens
  source 1..31: mol_type = unassigned DNA
gcacctgcccgaccagggactgcgggcatgg

SEQ ID NO: 5955 - DNA, 31 bp, Homo sapiens
  source 1..31: mol_type = unassigned DNA
ccatgcccgcagtccctggtcgggcaggtgc

SEQ ID NO: 5956 - RNA, 31 nt, Homo sapiens
  source 1..31: mol_type = unassigned RNA
ccccactctttgactccagtggctcaggcag

SEQ ID NO: 5957 - DNA, 31 bp, Homo sapiens
  source 1..31: mol_type = unassigned DNA
ccccactctttgactccagtggctcaggcag

SEQ ID NO: 5958 - DNA, 31 bp, Homo sapiens
  source 1..31: mol_type = unassigned DNA
ctgcctgagccactggagtcaaagagtgggg

SEQ ID NO: 5959 - RNA, 33 nt, Homo sapiens
  source 1..33: mol_type = unassigned RNA
ctttatgatgatgttgacactggagagaaaaat

SEQ ID NO: 5960 - DNA, 33 bp, Homo sapiens
  source 1..33: mol_type = unassigned DNA
ctttatgatgatgttgacactggagagaaaaat

SEQ ID NO: 5961 - DNA, 33 bp, Homo sapiens
  source 1..33: mol_type = unassigned DNA
atttttctctccagtgtcaacatcatcataaag

SEQ ID NO: 5962 - RNA, 76 nt, Homo sapiens
  source 1..76: mol_type = unassigned RNA
gatacctgtgacgttttgctcaccttatttgatttcttctgtaggacaacaacccagggggtttcatctgtcctac

SEQ ID NO: 5963 - DNA, 76 bp, Homo sapiens
  source 1..76: mol_type = unassigned DNA
gatacctgtgacgttttgctcaccttatttgatttcttctgtaggacaacaacccagggggtttcatctgtcctac

SEQ ID NO: 5964 - DNA, 76 bp, Homo sapiens
  source 1..76: mol_type = unassigned DNA
gtaggacagatgaaaccccctgggttgttgtcctacagaagaaatcaaataaggtgagcaaaacgtcacaggtatc

SEQ ID NO: 5965 - RNA, 52 nt, Homo sapiens
  source 1..52: mol_type = unassigned RNA
gacagtctttcttccattgcctgtggaactcagggctgtcatctctcctggc

SEQ ID NO: 5966 - DNA, 52 bp, Homo sapiens
  source 1..52: mol_type = unassigned DNA
gacagtctttcttccattgcctgtggaactcagggctgtcatctctcctggc

SEQ ID NO: 5967 - DNA, 52 bp, Homo sapiens
  source 1..52: mol_type = unassigned DNA
gccaggagagatgacagccctgagttccacaggcaatggaagaaagactgtc

SEQ ID NO: 5968 - RNA, 26 nt, Homo sapiens
  source 1..26: mol_type = unassigned RNA
gagtagaggagactgttctgtgggaa

SEQ ID NO: 5969 - DNA, 26 bp, Homo sapiens
  source 1..26: mol_type = unassigned DNA
gagtagaggagactgttctgtgggaa

SEQ ID NO: 5970 - DNA, 26 bp, Homo sapiens
  source 1..26: mol_type = unassigned DNA
ttcccacagaacagtctcctctactc

SEQ ID NO: 5971 - RNA, 46 nt, Homo sapiens
  source 1..46: mol_type = unassigned RNA
ttgcagacaatagattgtaggaattctctgcctccataactttgtg

SEQ ID NO: 5972 - DNA, 46 bp, Homo sapiens
  source 1..46: mol_type = unassigned DNA
ttgcagacaatagattgtaggaattctctgcctccataactttgtg

SEQ ID NO: 5973 - DNA, 46 bp, Homo sapiens
  source 1..46: mol_type = unassigned DNA
cacaaagttatggaggcagagaattcctacaatctattgtctgcaa

SEQ ID NO: 5974 - RNA, 75 nt, Homo sapiens
  source 1..75: mol_type = unassigned RNA
aagaaaagattcagccctgtgcagtgtacttctcaaccccaggtgctgggctgtgcaatgaaatgagaagcaaga

SEQ ID NO: 5975 - DNA, 75 bp, Homo sapiens
  source 1..75: mol_type = unassigned DNA
aagaaaagattcagccctgtgcagtgtacttctcaaccccaggtgctgggctgtgcaatgaaatgagaagcaaga

SEQ ID NO: 5976 - DNA, 75 bp, Homo sapiens
  source 1..75: mol_type = unassigned DNA
tcttgcttctcatttcattgcacagcccagcacctggggttgagaagtacactgcacagggctgaatcttttctt

SEQ ID NO: 5977 - RNA, 24 nt, Homo sapiens
  source 1..24: mol_type = unassigned RNA
tgtgggaatggtaaaaatcactgt

SEQ ID NO: 5978 - DNA, 24 bp, Homo sapiens
  source 1..24: mol_type = unassigned DNA
tgtgggaatggtaaaaatcactgt

SEQ ID NO: 5979 - DNA, 24 bp, Homo sapiens
  source 1..24: mol_type = unassigned DNA
acagtgatttttaccattcccaca

SEQ ID NO: 5980 - RNA, 22 nt, Homo sapiens
  source 1..22: mol_type = unassigned RNA
ttccccaatggttgaactcatt

SEQ ID NO: 5981 - DNA, 22 bp, Homo sapiens
  source 1..22: mol_type = unassigned DNA
ttccccaatggttgaactcatt

SEQ ID NO: 5982 - DNA, 22 bp, Homo sapiens
  source 1..22: mol_type = unassigned DNA
aatgagttcaaccattggggaa

SEQ ID NO: 5983 - RNA, 30 nt, Homo sapiens
  source 1..30: mol_type = unassigned RNA
tgggtgttctgtagagtgaggaatgctgcc

SEQ ID NO: 5984 - DNA, 30 bp, Homo sapiens
  source 1..30: mol_type = unassigned DNA
tgggtgttctgtagagtgaggaatgctgcc

SEQ ID NO: 5985 - DNA, 30 bp, Homo sapiens
  source 1..30: mol_type = unassigned DNA
ggcagcattcctcactctacagaacaccca

SEQ ID NO: 5986 - RNA, 29 nt, Homo sapiens
  source 1..29: mol_type = unassigned RNA
ctcagaaaggtctggaaggtagaggactg

SEQ ID NO: 5987 - DNA, 29 bp, Homo sapiens
  source 1..29: mol_type = unassigned DNA
ctcagaaaggtctggaaggtagaggactg

SEQ ID NO: 5988 - DNA, 29 bp, Homo sapiens
  source 1..29: mol_type = unassigned DNA
cagtcctctaccttccagacctttctgag

SEQ ID NO: 5989 - RNA, 31 nt, Homo sapiens
  source 1..31: mol_type = unassigned RNA
ttgcagatgaatgaccaggacagaaccagca

SEQ ID NO: 5990 - DNA, 31 bp, Homo sapiens
  source 1..31: mol_type = unassigned DNA
ttgcagatgaatgaccaggacagaaccagca

SEQ ID NO: 5991 - DNA, 31 bp, Homo sapiens
  source 1..31: mol_type = unassigned DNA
tgctggttctgtcctggtcattcatctgcaa

SEQ ID NO: 5992 - RNA, 30 nt, Homo sapiens
  source 1..30: mol_type = unassigned RNA
aaattgaagaacgaaggacctcagaggaag

SEQ ID NO: 5993 - DNA, 30 bp, Homo sapiens
  source 1..30: mol_type = unassigned DNA
aaattgaagaacgaaggacctcagaggaag

SEQ ID NO: 5994 - DNA, 30 bp, Homo sapiens
  source 1..30: mol_type = unassigned DNA
cttcctctgaggtccttcgttcttcaattt

SEQ ID NO: 5995 - RNA, 31 nt, Homo sapiens
  source 1..31: mol_type = unassigned RNA
ccttccagaatcccagatccgggctacctgc

SEQ ID NO: 5996 - DNA, 31 bp, Homo sapiens
  source 1..31: mol_type = unassigned DNA
ccttccagaatcccagatccgggctacctgc

SEQ ID NO: 5997 - DNA, 31 bp, Homo sapiens
  source 1..31: mol_type = unassigned DNA
gcaggtagcccggatctgggattctggaagg

SEQ ID NO: 5998 - RNA, 53 nt, Homo sapiens
  source 1..53: mol_type = unassigned RNA
cacactggtgagcatagggctggatgagaagtttccacaggactacaggctgg

SEQ ID NO: 5999 - DNA, 53 bp, Homo sapiens
  source 1..53: mol_type = unassigned DNA
cacactggtgagcatagggctggatgagaagtttccacaggactacaggctgg

SEQ ID NO: 6000 - DNA, 53 bp, Homo sapiens
  source 1..53: mol_type = unassigned DNA
ccagcctgtagtcctgtggaaacttctcatccagccctatgctcaccagtgtg

SEQ ID NO: 6001 - RNA, 83 nt, Homo sapiens
  source 1..83: mol_type = unassigned RNA
tcttgtgaggttactgcctggacctggtgccctggctgccctcctgtgcccagaaaggaaggggctattgcatcctaccagct

SEQ ID NO: 6002 - DNA, 83 bp, Homo sapiens
  source 1..83: mol_type = unassigned DNA
tcttgtgaggttactgcctggacctggtgccctggctgccctcctgtgcccagaaaggaaggggctattgcatcctaccagct

SEQ ID NO: 6003 - DNA, 83 bp, Homo sapiens
  source 1..83: mol_type = unassigned DNA
agctggtaggatgcaatagccccttcctttctgggcacaggagggcagccagggcaccaggtccaggcagtaacctcacaaga

SEQ ID NO: 6004 - RNA, 29 nt, Homo sapiens
  source 1..29: mol_type = unassigned RNA
gggcagagattgaggagccagttgctgtg

SEQ ID NO: 6005 - DNA, 29 bp, Homo sapiens
  source 1..29: mol_type = unassigned DNA
gggcagagattgaggagccagttgctgtg

SEQ ID NO: 6006 - DNA, 29 bp, Homo sapiens
  source 1..29: mol_type = unassigned DNA
cacagcaactggctcctcaatctctgccc

SEQ ID NO: 6007 - RNA, 32 nt, Homo sapiens
  source 1..32: mol_type = unassigned RNA
aatatatagcctgaaagtagaatgtggaccta

SEQ ID NO: 6008 - DNA, 32 bp, Homo sapiens
  source 1..32: mol_type = unassigned DNA
aatatatagcctgaaagtagaatgtggaccta

SEQ ID NO: 6009 - DNA, 32 bp, Homo sapiens
  source 1..32: mol_type = unassigned DNA
taggtccacattctactttcaggctatatatt

SEQ ID NO: 6010 - RNA, 23 nt, Homo sapiens
  source 1..23: mol_type = unassigned RNA
ttcttaaatggtagaattcacca

SEQ ID NO: 6011 - DNA, 23 bp, Homo sapiens
  source 1..23: mol_type = unassigned DNA
ttcttaaatggtagaattcacca

SEQ ID NO: 6012 - DNA, 23 bp, Homo sapiens
  source 1..23: mol_type = unassigned DNA
tggtgaattctaccatttaagaa

SEQ ID NO: 6013 - RNA, 97 nt, Homo sapiens
  source 1..97: mol_type = unassigned RNA
ccaaagtcaccctgaagcctcctcagaggattgagaagaatgggactgattagaggagaacattcttatgaccttcaagagaaactgattcagagaa

SEQ ID NO: 6014 - DNA, 97 bp, Homo sapiens
  source 1..97: mol_type = unassigned DNA
ccaaagtcaccctgaagcctcctcagaggattgagaagaatgggactgattagaggagaacattcttatgaccttcaagagaaactgattcagagaa

SEQ ID NO: 6015 - DNA, 97 bp, Homo sapiens
  source 1..97: mol_type = unassigned DNA
ttctctgaatcagtttctcttgaaggtcataagaatgttctcctctaatcagtcccattcttctcaatcctctgaggaggcttcagggtgactttgg

SEQ ID NO: 6016 - RNA, 83 nt, Homo sapiens
  source 1..83: mol_type = unassigned RNA
aggcaaatggttcagttatggagctaacgcaccagtgactgtgtggctgggcgtgggcaggaaaggagaagaagcgaatctcg

SEQ ID NO: 6017 - DNA, 83 bp, Homo sapiens
  source 1..83: mol_type = unassigned DNA
aggcaaatggttcagttatggagctaacgcaccagtgactgtgtggctgggcgtgggcaggaaaggagaagaagcgaatctcg

SEQ ID NO: 6018 - DNA, 83 bp, Homo sapiens
  source 1..83: mol_type = unassigned DNA
cgagattcgcttcttctcctttcctgcccacgcccagccacacagtcactggtgcgttagctccataactgaaccatttgcct

SEQ ID NO: 6019 - RNA, 37 nt, Homo sapiens
  source 1..37: mol_type = unassigned RNA
ttttttccttctgccacgtgagaacccagctagtagg

SEQ ID NO: 6020 - DNA, 37 bp, Homo sapiens
  source 1..37: mol_type = unassigned DNA
ttttttccttctgccacgtgagaacccagctagtagg

SEQ ID NO: 6021 - DNA, 37 bp, Homo sapiens
  source 1..37: mol_type = unassigned DNA
cctactagctgggttctcacgtggcagaaggaaaaaa

SEQ ID NO: 6022 - RNA, 161 nt, Homo sapiens
  source 1..161: mol_type = unassigned RNA
cctggagagacagcgtgcaggcagaggcagggtgactcagaatgcaaagatgagtgattcacccagcgcttcctctgctttttttgccttcctctgtcccctccttcactggtgtctggtggcaggaaatgggctgtggagtcaggtctcctgggtttgag

SEQ ID NO: 6023 - DNA, 161 bp, Homo sapiens
  source 1..161: mol_type = unassigned DNA
cctggagagacagcgtgcaggcagaggcagggtgactcagaatgcaaagatgagtgattcacccagcgcttcctctgctttttttgccttcctctgtcccctccttcactggtgtctggtggcaggaaatgggctgtggagtcaggtctcctgggtttgag

SEQ ID NO: 6024 - DNA, 161 bp, Homo sapiens
  source 1..161: mol_type = unassigned DNA
ctcaaacccaggagacctgactccacagcccatttcctgccaccagacaccagtgaaggaggggacagaggaaggcaaaaaaagcagaggaagcgctgggtgaatcactcatctttgcattctgagtcaccctgcctctgcctgcacgctgtctctccagg

SEQ ID NO: 6025 - RNA, 26 nt, Homo sapiens
  source 1..26: mol_type = unassigned RNA
taccggggggactcatgccaggtgag

SEQ ID NO: 6026 - DNA, 26 bp, Homo sapiens
  source 1..26: mol_type = unassigned DNA
taccggggggactcatgccaggtgag

SEQ ID NO: 6027 - DNA, 26 bp, Homo sapiens
  source 1..26: mol_type = unassigned DNA
ctcacctggcatgagtccccccggta

SEQ ID NO: 6028 - RNA, 24 nt, Homo sapiens
  source 1..24: mol_type = unassigned RNA
tttttcaatagtagaaattacatt

SEQ ID NO: 6029 - DNA, 24 bp, Homo sapiens
  source 1..24: mol_type = unassigned DNA
tttttcaatagtagaaattacatt

SEQ ID NO: 6030 - DNA, 24 bp, Homo sapiens
  source 1..24: mol_type = unassigned DNA
aatgtaatttctactattgaaaaa

SEQ ID NO: 6031 - RNA, 28 nt, Homo sapiens
  source 1..28: mol_type = unassigned RNA
cccggacaccaggccggccccgggctcc

SEQ ID NO: 6032 - DNA, 28 bp, Homo sapiens
  source 1..28: mol_type = unassigned DNA
cccggacaccaggccggccccgggctcc

SEQ ID NO: 6033 - DNA, 28 bp, Homo sapiens
  source 1..28: mol_type = unassigned DNA
ggagcccggggccggcctggtgtccggg

SEQ ID NO: 6034 - RNA, 29 nt, Homo sapiens
  source 1..29: mol_type = unassigned RNA
ttgttttcctgactgcagctctcttcatt

SEQ ID NO: 6035 - DNA, 29 bp, Homo sapiens
  source 1..29: mol_type = unassigned DNA
ttgttttcctgactgcagctctcttcatt

SEQ ID NO: 6036 - DNA, 29 bp, Homo sapiens
  source 1..29: mol_type = unassigned DNA
aatgaagagagctgcagtcaggaaaacaa

SEQ ID NO: 6037 - RNA, 42 nt, Homo sapiens
  source 1..42: mol_type = unassigned RNA
cttaagccattccttttgagactctgaagaaagggtacgttc

SEQ ID NO: 6038 - DNA, 42 bp, Homo sapiens
  source 1..42: mol_type = unassigned DNA
cttaagccattccttttgagactctgaagaaagggtacgttc

SEQ ID NO: 6039 - DNA, 42 bp, Homo sapiens
  source 1..42: mol_type = unassigned DNA
gaacgtaccctttcttcagagtctcaaaaggaatggcttaag

SEQ ID NO: 6040 - RNA, 100 nt, Homo sapiens
  source 1..100: mol_type = unassigned RNA
gaggcaggagtcagagaagagaatctgagggtagagcagtgttgttggtggtaggagctaccctgtcccctggttggctttctagatggggatggcaggt

SEQ ID NO: 6041 - DNA, 100 bp, Homo sapiens
  source 1..100: mol_type = unassigned DNA
gaggcaggagtcagagaagagaatctgagggtagagcagtgttgttggtggtaggagctaccctgtcccctggttggctttctagatggggatggcaggt

SEQ ID NO: 6042 - DNA, 100 bp, Homo sapiens
  source 1..100: mol_type = unassigned DNA
acctgccatccccatctagaaagccaaccaggggacagggtagctcctaccaccaacaacactgctctaccctcagattctcttctctgactcctgcctc

SEQ ID NO: 6043 - RNA, 38 nt, Homo sapiens
  source 1..38: mol_type = unassigned RNA
tgtgggaatggtaaaaatcaccgtctcctctgcaaagt

SEQ ID NO: 6044 - DNA, 38 bp, Homo sapiens
  source 1..38: mol_type = unassigned DNA
tgtgggaatggtaaaaatcaccgtctcctctgcaaagt

SEQ ID NO: 6045 - DNA, 38 bp, Homo sapiens
  source 1..38: mol_type = unassigned DNA
actttgcagaggagacggtgatttttaccattcccaca

SEQ ID NO: 6046 - RNA, 160 nt, Homo sapiens
  source 1..160: mol_type = unassigned RNA
ctgggtgggtggagcaagggaggaacattggggcaaggggactgggaatttgccagatcccaggagcagcaggcagctagccctccgtggctttaagaggactctgtcctgggtctgcacctggctgaagtcagcacccagctccagggtgcgggcccag

SEQ ID NO: 6047 - DNA, 160 bp, Homo sapiens
  source 1..160: mol_type = unassigned DNA
ctgggtgggtggagcaagggaggaacattggggcaaggggactgggaatttgccagatcccaggagcagcaggcagctagccctccgtggctttaagaggactctgtcctgggtctgcacctggctgaagtcagcacccagctccagggtgcgggcccag

SEQ ID NO: 6048 - DNA, 160 bp, Homo sapiens
  source 1..160: mol_type = unassigned DNA
ctgggcccgcaccctggagctgggtgctgacttcagccaggtgcagacccaggacagagtcctcttaaagccacggagggctagctgcctgctgctcctgggatctggcaaattcccagtccccttgccccaatgttcctcccttgctccacccacccag

SEQ ID NO: 6049 - RNA, 23 nt, Homo sapiens
  source 1..23: mol_type = unassigned RNA
ttctctaattagttgtatagttc

SEQ ID NO: 6050 - DNA, 23 bp, Homo sapiens
  source 1..23: mol_type = unassigned DNA
ttctctaattagttgtatagttc

SEQ ID NO: 6051 - DNA, 23 bp, Homo sapiens
  source 1..23: mol_type = unassigned DNA
gaactatacaactaattagagaa

SEQ ID NO: 6052 - RNA, 133 nt, Homo sapiens
  source 1..133: mol_type = unassigned RNA
gttttgccccaacttgtgaagcttctaggagcttctgaattgccaactgtgactcctgcactaagacccatagggaatattgtcactggtacagatgaagagactcaggttgtgatcgatgcaggagctcttg

SEQ ID NO: 6053 - DNA, 133 bp, Homo sapiens
  source 1..133: mol_type = unassigned DNA
gttttgccccaacttgtgaagcttctaggagcttctgaattgccaactgtgactcctgcactaagacccatagggaatattgtcactggtacagatgaagagactcaggttgtgatcgatgcaggagctcttg

SEQ ID NO: 6054 - DNA, 133 bp, Homo sapiens
  source 1..133: mol_type = unassigned DNA
caagagctcctgcatcgatcacaacctgagtctcttcatctgtaccagtgacaatattccctatgggtcttagtgcaggagtcacagttggcaattcagaagctcctagaagcttcacaagttggggcaaaac

SEQ ID NO: 6055 - RNA, 33 nt, Homo sapiens
  source 1..33: mol_type = unassigned RNA
agtctaagttggaggacatagaacggaactcat

SEQ ID NO: 6056 - DNA, 33 bp, Homo sapiens
  source 1..33: mol_type = unassigned DNA
agtctaagttggaggacatagaacggaactcat

SEQ ID NO: 6057 - DNA, 33 bp, Homo sapiens
  source 1..33: mol_type = unassigned DNA
atgagttccgttctatgtcctccaacttagact

SEQ ID NO: 6058 - RNA, 22 nt, Homo sapiens
  source 1..22: mol_type = unassigned RNA
ctggctaattttttgtaagcaa

SEQ ID NO: 6059 - DNA, 22 bp, Homo sapiens
  source 1..22: mol_type = unassigned DNA
ctggctaattttttgtaagcaa

SEQ ID NO: 6060 - DNA, 22 bp, Homo sapiens
  source 1..22: mol_type = unassigned DNA
ttgcttacaaaaaattagccag

SEQ ID NO: 6061 - RNA, 186 nt, Homo sapiens
  source 1..186: mol_type = unassigned RNA
atatctgtgattccattgctgttgaagtactgccctggaggagagctgtttgactatataatttcccaggatcgcctgtcagaagaggagacccgggttgtcttccgtcagatagtatctgctgttgcttatgtgcacagccagggctatgctcacagggacctcaagccagtaagtgactgcatc

SEQ ID NO: 6062 - DNA, 186 bp, Homo sapiens
  source 1..186: mol_type = unassigned DNA
atatctgtgattccattgctgttgaagtactgccctggaggagagctgtttgactatataatttcccaggatcgcctgtcagaagaggagacccgggttgtcttccgtcagatagtatctgctgttgcttatgtgcacagccagggctatgctcacagggacctcaagccagtaagtgactgcatc

SEQ ID NO: 6063 - DNA, 186 bp, Homo sapiens
  source 1..186: mol_type = unassigned DNA
gatgcagtcacttactggcttgaggtccctgtgagcatagccctggctgtgcacataagcaacagcagatactatctgacggaagacaacccgggtctcctcttctgacaggcgatcctgggaaattatatagtcaaacagctctcctccagggcagtacttcaacagcaatggaatcacagatat

SEQ ID NO: 6064 - RNA, 100 nt, Homo sapiens
  source 1..100: mol_type = unassigned RNA
taccgcctcttcaaactgaattataaaacttggtgcattcaccaccagctgttcctttttgctcggagatccctctctgtgtagaggaagctgtttctct

SEQ ID NO: 6065 - DNA, 100 bp, Homo sapiens
  source 1..100: mol_type = unassigned DNA
taccgcctcttcaaactgaattataaaacttggtgcattcaccaccagctgttcctttttgctcggagatccctctctgtgtagaggaagctgtttctct

SEQ ID NO: 6066 - DNA, 100 bp, Homo sapiens
  source 1..100: mol_type = unassigned DNA
agagaaacagcttcctctacacagagagggatctccgagcaaaaaggaacagctggtggtgaatgcaccaagttttataattcagtttgaagaggcggta

SEQ ID NO: 6067 - RNA, 126 nt, Homo sapiens
  source 1..126: mol_type = unassigned RNA
ccttaagatcgatgaagaattggtaacaaattctgggaagttcttgattttggatcgaatgctgccagaactaaaaaaaagaggtcacaaggtggtacttttgattggaattttggattgttcaat

SEQ ID NO: 6068 - DNA, 126 bp, Homo sapiens
  source 1..126: mol_type = unassigned DNA
ccttaagatcgatgaagaattggtaacaaattctgggaagttcttgattttggatcgaatgctgccagaactaaaaaaaagaggtcacaaggtggtacttttgattggaattttggattgttcaat

SEQ ID NO: 6069 - DNA, 126 bp, Homo sapiens
  source 1..126: mol_type = unassigned DNA
attgaacaatccaaaattccaatcaaaagtaccaccttgtgacctcttttttttagttctggcagcattcgatccaaaatcaagaacttcccagaatttgttaccaattcttcatcgatcttaagg

SEQ ID NO: 6070 - RNA, 48 nt, Homo sapiens
  source 1..48: mol_type = unassigned RNA
tcaatgtgcttttcttgtaggtagttccttttctttgaccaggaagtc

SEQ ID NO: 6071 - DNA, 48 bp, Homo sapiens
  source 1..48: mol_type = unassigned DNA
tcaatgtgcttttcttgtaggtagttccttttctttgaccaggaagtc

SEQ ID NO: 6072 - DNA, 48 bp, Homo sapiens
  source 1..48: mol_type = unassigned DNA
gacttcctggtcaaagaaaaggaactacctacaagaaaagcacattga

SEQ ID NO: 6073 - RNA, 30 nt, Homo sapiens
  source 1..30: mol_type = unassigned RNA
cagaggtcagaaaaaaaggaattttttttt

SEQ ID NO: 6074 - DNA, 30 bp, Homo sapiens
  source 1..30: mol_type = unassigned DNA
cagaggtcagaaaaaaaggaattttttttt

SEQ ID NO: 6075 - DNA, 30 bp, Homo sapiens
  source 1..30: mol_type = unassigned DNA
aaaaaaaaattcctttttttctgacctctg

SEQ ID NO: 6076 - RNA, 29 nt, Homo sapiens
  source 1..29: mol_type = unassigned RNA
tcagaacatgatcgtggaggagtgtgggt

SEQ ID NO: 6077 - DNA, 29 bp, Homo sapiens
  source 1..29: mol_type = unassigned DNA
tcagaacatgatcgtggaggagtgtgggt

SEQ ID NO: 6078 - DNA, 29 bp, Homo sapiens
  source 1..29: mol_type = unassigned DNA
acccacactcctccacgatcatgttctga

SEQ ID NO: 6079 - RNA, 42 nt, Homo sapiens
  source 1..42: mol_type = unassigned RNA
agcacatgctgttggaaaatggcactgatagattcacttaac

SEQ ID NO: 6080 - DNA, 42 bp, Homo sapiens
  source 1..42: mol_type = unassigned DNA
agcacatgctgttggaaaatggcactgatagattcacttaac

SEQ ID NO: 6081 - DNA, 42 bp, Homo sapiens
  source 1..42: mol_type = unassigned DNA
gttaagtgaatctatcagtgccattttccaacagcatgtgct

SEQ ID NO: 6082 - RNA, 31 nt, Homo sapiens
  source 1..31: mol_type = unassigned RNA
taccgtattcagacagatgctgatggagttg

SEQ ID NO: 6083 - DNA, 31 bp, Homo sapiens
  source 1..31: mol_type = unassigned DNA
taccgtattcagacagatgctgatggagttg

SEQ ID NO: 6084 - DNA, 31 bp, Homo sapiens
  source 1..31: mol_type = unassigned DNA
caactccatcagcatctgtctgaatacggta

SEQ ID NO: 6085 - RNA, 36 nt, Homo sapiens
  source 1..36: mol_type = unassigned RNA
tcaacagtgctgacctggactgtgacccgattcttc

SEQ ID NO: 6086 - DNA, 36 bp, Homo sapiens
  source 1..36: mol_type = unassigned DNA
tcaacagtgctgacctggactgtgacccgattcttc

SEQ ID NO: 6087 - DNA, 36 bp, Homo sapiens
  source 1..36: mol_type = unassigned DNA
gaagaatcgggtcacagtccaggtcagcactgttga

SEQ ID NO: 6088 - RNA, 151 nt, Homo sapiens
  source 1..151: mol_type = unassigned RNA
ctctgtggagatgatacactaaaaatgcatattgcaaaaatcttgacaactgtcaagtgtaccactcttatagaacaacaatttacatatggcaagattgacctgggatttggaacaaaggttgcagattctgaattatggtgagtatata

SEQ ID NO: 6089 - DNA, 151 bp, Homo sapiens
  source 1..151: mol_type = unassigned DNA
ctctgtggagatgatacactaaaaatgcatattgcaaaaatcttgacaactgtcaagtgtaccactcttatagaacaacaatttacatatggcaagattgacctgggatttggaacaaaggttgcagattctgaattatggtgagtatata

SEQ ID NO: 6090 - DNA, 151 bp, Homo sapiens
  source 1..151: mol_type = unassigned DNA
tatatactcaccataattcagaatctgcaacctttgttccaaatcccaggtcaatcttgccatatgtaaattgttgttctataagagtggtacacttgacagttgtcaagatttttgcaatatgcatttttagtgtatcatctccacagag

SEQ ID NO: 6091 - RNA, 30 nt, Homo sapiens
  source 1..30: mol_type = unassigned RNA
ccaaagcagatcctggacccagcagcaagt

SEQ ID NO: 6092 - DNA, 30 bp, Homo sapiens
  source 1..30: mol_type = unassigned DNA
ccaaagcagatcctggacccagcagcaagt

SEQ ID NO: 6093 - DNA, 30 bp, Homo sapiens
  source 1..30: mol_type = unassigned DNA
acttgctgctgggtccaggatctgctttgg

SEQ ID NO: 6094 - RNA, 67 nt, Homo sapiens
  source 1..67: mol_type = unassigned RNA
gtatattattttgcactgttagatctcagaatgagtccaacctgtgccacttaccagacagctgatt

SEQ ID NO: 6095 - DNA, 67 bp, Homo sapiens
  source 1..67: mol_type = unassigned DNA
gtatattattttgcactgttagatctcagaatgagtccaacctgtgccacttaccagacagctgatt

SEQ ID NO: 6096 - DNA, 67 bp, Homo sapiens
  source 1..67: mol_type = unassigned DNA
aatcagctgtctggtaagtggcacaggttggactcattctgagatctaacagtgcaaaataatatac

SEQ ID NO: 6097 - RNA, 32 nt, Homo sapiens
  source 1..32: mol_type = unassigned RNA
taagggccctggtaggatgcactcttgctttc

SEQ ID NO: 6098 - DNA, 32 bp, Homo sapiens
  source 1..32: mol_type = unassigned DNA
taagggccctggtaggatgcactcttgctttc

SEQ ID NO: 6099 - DNA, 32 bp, Homo sapiens
  source 1..32: mol_type = unassigned DNA
gaaagcaagagtgcatcctaccagggccctta

SEQ ID NO: 6100 - RNA, 30 nt, Homo sapiens
  source 1..30: mol_type = unassigned RNA
ccgcctccgaacgccaggtgggggcgaggc

SEQ ID NO: 6101 - DNA, 30 bp, Homo sapiens
  source 1..30: mol_type = unassigned DNA
ccgcctccgaacgccaggtgggggcgaggc

SEQ ID NO: 6102 - DNA, 30 bp, Homo sapiens
  source 1..30: mol_type = unassigned DNA
gcctcgcccccacctggcgttcggaggcgg

SEQ ID NO: 6103 - RNA, 70 nt, Homo sapiens
  source 1..70: mol_type = unassigned RNA
catggcttctgatgatgaggccactgatgatgaggccacctgtttcttcgaagctctttttgttcttgga

SEQ ID NO: 6104 - DNA, 70 bp, Homo sapiens
  source 1..70: mol_type = unassigned DNA
catggcttctgatgatgaggccactgatgatgaggccacctgtttcttcgaagctctttttgttcttgga

SEQ ID NO: 6105 - DNA, 70 bp, Homo sapiens
  source 1..70: mol_type = unassigned DNA
tccaagaacaaaaagagcttcgaagaaacaggtggcctcatcatcagtggcctcatcatcagaagccatg

SEQ ID NO: 6106 - RNA, 82 nt, Homo sapiens
  source 1..82: mol_type = unassigned RNA
caccgcgcccggtcttgcagcacggttctgagtctgtggaatagctgccatgaagtaacctgaaggaggtgctggctggtag

SEQ ID NO: 6107 - DNA, 82 bp, Homo sapiens
  source 1..82: mol_type = unassigned DNA
caccgcgcccggtcttgcagcacggttctgagtctgtggaatagctgccatgaagtaacctgaaggaggtgctggctggtag

SEQ ID NO: 6108 - DNA, 82 bp, Homo sapiens
  source 1..82: mol_type = unassigned DNA
ctaccagccagcacctccttcaggttacttcatggcagctattccacagactcagaaccgtgctgcaagaccgggcgcggtg

SEQ ID NO: 6109 - RNA, 31 nt, Homo sapiens
  source 1..31: mol_type = unassigned RNA
ttcctctttggtagaactcacaagagaagcc

SEQ ID NO: 6110 - DNA, 31 bp, Homo sapiens
  source 1..31: mol_type = unassigned DNA
ttcctctttggtagaactcacaagagaagcc

SEQ ID NO: 6111 - DNA, 31 bp, Homo sapiens
  source 1..31: mol_type = unassigned DNA
ggcttctcttgtgagttctaccaaagaggaa

SEQ ID NO: 6112 - RNA, 30 nt, Homo sapiens
  source 1..30: mol_type = unassigned RNA
ctcctaacctctagagaagctgtgggagga

SEQ ID NO: 6113 - DNA, 30 bp, Homo sapiens
  source 1..30: mol_type = unassigned DNA
ctcctaacctctagagaagctgtgggagga

SEQ ID NO: 6114 - DNA, 30 bp, Homo sapiens
  source 1..30: mol_type = unassigned DNA
tcctcccacagcttctctagaggttaggag

SEQ ID NO: 6115 - RNA, 34 nt, Homo sapiens
  source 1..34: mol_type = unassigned RNA
gctgaggtgggaaaatcatctggacccagggagg

SEQ ID NO: 6116 - DNA, 34 bp, Homo sapiens
  source 1..34: mol_type = unassigned DNA
gctgaggtgggaaaatcatctggacccagggagg

SEQ ID NO: 6117 - DNA, 34 bp, Homo sapiens
  source 1..34: mol_type = unassigned DNA
cctccctgggtccagatgattttcccacctcagc

SEQ ID NO: 6118 - RNA, 41 nt, Homo sapiens
  source 1..41: mol_type = unassigned RNA
taggtggtggggctgggatttgatttttggaaaaaggtgaa

SEQ ID NO: 6119 - DNA, 41 bp, Homo sapiens
  source 1..41: mol_type = unassigned DNA
taggtggtggggctgggatttgatttttggaaaaaggtgaa

SEQ ID NO: 6120 - DNA, 41 bp, Homo sapiens
  source 1..41: mol_type = unassigned DNA
ttcacctttttccaaaaatcaaatcccagccccaccaccta

SEQ ID NO: 6121 - RNA, 29 nt, Homo sapiens
  source 1..29: mol_type = unassigned RNA
gggccaatcagagcacaccggactgcttt

SEQ ID NO: 6122 - DNA, 29 bp, Homo sapiens
  source 1..29: mol_type = unassigned DNA
gggccaatcagagcacaccggactgcttt

SEQ ID NO: 6123 - DNA, 29 bp, Homo sapiens
  source 1..29: mol_type = unassigned DNA
aaagcagtccggtgtgctctgattggccc

SEQ ID NO: 6124 - RNA, 28 nt, Homo sapiens
  source 1..28: mol_type = unassigned RNA
agaaatgggccgttgtctgtagccctgg

SEQ ID NO: 6125 - DNA, 28 bp, Homo sapiens
  source 1..28: mol_type = unassigned DNA
agaaatgggccgttgtctgtagccctgg

SEQ ID NO: 6126 - DNA, 28 bp, Homo sapiens
  source 1..28: mol_type = unassigned DNA
ccagggctacagacaacggcccatttct

SEQ ID NO: 6127 - RNA, 29 nt, Homo sapiens
  source 1..29: mol_type = unassigned RNA
atccctgtaagctgacgaagcaagcggcc

SEQ ID NO: 6128 - DNA, 29 bp, Homo sapiens
  source 1..29: mol_type = unassigned DNA
atccctgtaagctgacgaagcaagcggcc

SEQ ID NO: 6129 - DNA, 29 bp, Homo sapiens
  source 1..29: mol_type = unassigned DNA
ggccgcttgcttcgtcagcttacagggat

SEQ ID NO: 6130 - RNA, 140 nt, Homo sapiens
  source 1..140: mol_type = unassigned RNA
taataaggtggcagatcatattggaagtgaacattatgaagtcctttttaactctgaggaaggcattcaggctctggatgaagtcatattttccttggaaacttatgacattacaacagttcgtgcttcagtaggtaagg

SEQ ID NO: 6131 - DNA, 140 bp, Homo sapiens
  source 1..140: mol_type = unassigned DNA
taataaggtggcagatcatattggaagtgaacattatgaagtcctttttaactctgaggaaggcattcaggctctggatgaagtcatattttccttggaaacttatgacattacaacagttcgtgcttcagtaggtaagg

SEQ ID NO: 6132 - DNA, 140 bp, Homo sapiens
  source 1..140: mol_type = unassigned DNA
ccttacctactgaagcacgaactgttgtaatgtcataagtttccaaggaaaatatgacttcatccagagcctgaatgccttcctcagagttaaaaaggacttcataatgttcacttccaatatgatctgccaccttatta

SEQ ID NO: 6133 - RNA, 32 nt, Homo sapiens
  source 1..32: mol_type = unassigned RNA
ctacgtgaaggaacagtttgcctggagacatt

SEQ ID NO: 6134 - DNA, 32 bp, Homo sapiens
  source 1..32: mol_type = unassigned DNA
ctacgtgaaggaacagtttgcctggagacatt

SEQ ID NO: 6135 - DNA, 32 bp, Homo sapiens
  source 1..32: mol_type = unassigned DNA
aatgtctccaggcaaactgttccttcacgtag

SEQ ID NO: 6136 - RNA, 29 nt, Homo sapiens
  source 1..29: mol_type = unassigned RNA
cgggatgtgcaggccgggaggtagaggca

SEQ ID NO: 6137 - DNA, 29 bp, Homo sapiens
  source 1..29: mol_type = unassigned DNA
cgggatgtgcaggccgggaggtagaggca

SEQ ID NO: 6138 - DNA, 29 bp, Homo sapiens
  source 1..29: mol_type = unassigned DNA
tgcctctacctcccggcctgcacatcccg

SEQ ID NO: 6139 - RNA, 32 nt, Homo sapiens
  source 1..32: mol_type = unassigned RNA
aggtcatcgaatgtgggaactactgtggagta

SEQ ID NO: 6140 - DNA, 32 bp, Homo sapiens
  source 1..32: mol_type = unassigned DNA
aggtcatcgaatgtgggaactactgtggagta

SEQ ID NO: 6141 - DNA, 32 bp, Homo sapiens
  source 1..32: mol_type = unassigned DNA
tactccacagtagttcccacattcgatgacct

SEQ ID NO: 6142 - RNA, 30 nt, Homo sapiens
  source 1..30: mol_type = unassigned RNA
ttcctgtgtcctgcaggtctcagctcctac

SEQ ID NO: 6143 - DNA, 30 bp, Homo sapiens
  source 1..30: mol_type = unassigned DNA
ttcctgtgtcctgcaggtctcagctcctac

SEQ ID NO: 6144 - DNA, 30 bp, Homo sapiens
  source 1..30: mol_type = unassigned DNA
gtaggagctgagacctgcaggacacaggaa

SEQ ID NO: 6145 - RNA, 33 nt, Homo sapiens
  source 1..33: mol_type = unassigned RNA
ttcccagatctgtgtcttgctctgcaccctcag

SEQ ID NO: 6146 - DNA, 33 bp, Homo sapiens
  source 1..33: mol_type = unassigned DNA
ttcccagatctgtgtcttgctctgcaccctcag

SEQ ID NO: 6147 - DNA, 33 bp, Homo sapiens
  source 1..33: mol_type = unassigned DNA
ctgagggtgcagagcaagacacagatctgggaa

SEQ ID NO: 6148 - RNA, 193 nt, Homo sapiens
  source 1..193: mol_type = unassigned RNA
ggttattctggaaccctagattgccataatgcttttgccttgcttgtgaggccaccaacagagcaggcaaatgtgctactcagtttccagatgacatcagatgaacttccaaaagaaaactggctaaagatgctgtgtcgacatgtagctaacaccatttgtaaagcagatgctgtaagttcttaaaacagta

SEQ ID NO: 6149 - DNA, 193 bp, Homo sapiens
  source 1..193: mol_type = unassigned DNA
ggttattctggaaccctagattgccataatgcttttgccttgcttgtgaggccaccaacagagcaggcaaatgtgctactcagtttccagatgacatcagatgaacttccaaaagaaaactggctaaagatgctgtgtcgacatgtagctaacaccatttgtaaagcagatgctgtaagttcttaaaacagta

SEQ ID NO: 6150 - DNA, 193 bp, Homo sapiens
  source 1..193: mol_type = unassigned DNA
tactgttttaagaacttacagcatctgctttacaaatggtgttagctacatgtcgacacagcatctttagccagttttcttttggaagttcatctgatgtcatctggaaactgagtagcacatttgcctgctctgttggtggcctcacaagcaaggcaaaagcattatggcaatctagggttccagaataacc

SEQ ID NO: 6151 - RNA, 105 nt, Homo sapiens
  source 1..105: mol_type = unassigned RNA
aggggggtgcccgcgaaccaacggttagcggtggcaggggctgactgagagcgtctgcttgataatggattctgaattaatgcatagtatagtaggaagctatca

SEQ ID NO: 6152 - DNA, 105 bp, Homo sapiens
  source 1..105: mol_type = unassigned DNA
aggggggtgcccgcgaaccaacggttagcggtggcaggggctgactgagagcgtctgcttgataatggattctgaattaatgcatagtatagtaggaagctatca

SEQ ID NO: 6153 - DNA, 105 bp, Homo sapiens
  source 1..105: mol_type = unassigned DNA
tgatagcttcctactatactatgcattaattcagaatccattatcaagcagacgctctcagtcagcccctgccaccgctaaccgttggttcgcgggcacccccct

SEQ ID NO: 6154 - RNA, 94 nt, Homo sapiens
  source 1..94: mol_type = unassigned RNA
tacctagatattaagacaatggccatccaaaaacaaatgaacaaaagacctatgaagagattgaagaagaaactgaggtccaaggaagtaaagt

SEQ ID NO: 6155 - DNA, 94 bp, Homo sapiens
  source 1..94: mol_type = unassigned DNA
tacctagatattaagacaatggccatccaaaaacaaatgaacaaaagacctatgaagagattgaagaagaaactgaggtccaaggaagtaaagt

SEQ ID NO: 6156 - DNA, 94 bp, Homo sapiens
  source 1..94: mol_type = unassigned DNA
actttacttccttggacctcagtttcttcttcaatctcttcataggtcttttgttcatttgtttttggatggccattgtcttaatatctaggta

SEQ ID NO: 6157 - RNA, 30 nt, Homo sapiens
  source 1..30: mol_type = unassigned RNA
gttcctgtgtcctgcaggtctcagctccta

SEQ ID NO: 6158 - DNA, 30 bp, Homo sapiens
  source 1..30: mol_type = unassigned DNA
gttcctgtgtcctgcaggtctcagctccta

SEQ ID NO: 6159 - DNA, 30 bp, Homo sapiens
  source 1..30: mol_type = unassigned DNA
taggagctgagacctgcaggacacaggaac

SEQ ID NO: 6160 - RNA, 29 nt, Homo sapiens
  source 1..29: mol_type = unassigned RNA
tggctggaccatgatgattctgacttcct

SEQ ID NO: 6161 - DNA, 29 bp, Homo sapiens
  source 1..29: mol_type = unassigned DNA
tggctggaccatgatgattctgacttcct

SEQ ID NO: 6162 - DNA, 29 bp, Homo sapiens
  source 1..29: mol_type = unassigned DNA
aggaagtcagaatcatcatggtccagcca

SEQ ID NO: 6163 - RNA, 36 nt, Homo sapiens
  source 1..36: mol_type = unassigned RNA
gaagaacatgaccattgatggaaaagaactgaccat

SEQ ID NO: 6164 - DNA, 36 bp, Homo sapiens
  source 1..36: mol_type = unassigned DNA
gaagaacatgaccattgatggaaaagaactgaccat

SEQ ID NO: 6165 - DNA, 36 bp, Homo sapiens
  source 1..36: mol_type = unassigned DNA
atggtcagttcttttccatcaatggtcatgttcttc

SEQ ID NO: 6166 - RNA, 25 nt, Homo sapiens
  source 1..25: mol_type = unassigned RNA
ccctcatggtaaggactgaggctac

SEQ ID NO: 6167 - DNA, 25 bp, Homo sapiens
  source 1..25: mol_type = unassigned DNA
ccctcatggtaaggactgaggctac

SEQ ID NO: 6168 - DNA, 25 bp, Homo sapiens
  source 1..25: mol_type = unassigned DNA
gtagcctcagtccttaccatgaggg

SEQ ID NO: 6169 - RNA, 143 nt, Homo sapiens
  source 1..143: mol_type = unassigned RNA
attcaggaatcttcagacaaaaccatcctgattaggacatttggcaaaagaatgaaagatgaccttaggagagtcccagatagggtcatgacggaaaatacaggatgcccagttagctctaaatttcagatcaacaactaata

SEQ ID NO: 6170 - DNA, 143 bp, Homo sapiens
  source 1..143: mol_type = unassigned DNA
attcaggaatcttcagacaaaaccatcctgattaggacatttggcaaaagaatgaaagatgaccttaggagagtcccagatagggtcatgacggaaaatacaggatgcccagttagctctaaatttcagatcaacaactaata

SEQ ID NO: 6171 - DNA, 143 bp, Homo sapiens
  source 1..143: mol_type = unassigned DNA
tattagttgttgatctgaaatttagagctaactgggcatcctgtattttccgtcatgaccctatctgggactctcctaaggtcatctttcattcttttgccaaatgtcctaatcaggatggttttgtctgaagattcctgaat

SEQ ID NO: 6172 - RNA, 28 nt, Homo sapiens
  source 1..28: mol_type = unassigned RNA
tgtctaaatttctgttggggtagaaatt

SEQ ID NO: 6173 - DNA, 28 bp, Homo sapiens
  source 1..28: mol_type = unassigned DNA
tgtctaaatttctgttggggtagaaatt

SEQ ID NO: 6174 - DNA, 28 bp, Homo sapiens
  source 1..28: mol_type = unassigned DNA
aatttctaccccaacagaaatttagaca

SEQ ID NO: 6175 - RNA, 100 nt, Homo sapiens
  source 1..100: mol_type = unassigned RNA
gtctataaaatttggtgcagtctgccacaggccggaattcccattcagggacttctcgagagagaccgagagagctgttcccttttctctttcttttgcc

SEQ ID NO: 6176 - DNA, 100 bp, Homo sapiens
  source 1..100: mol_type = unassigned DNA
gtctataaaatttggtgcagtctgccacaggccggaattcccattcagggacttctcgagagagaccgagagagctgttcccttttctctttcttttgcc

SEQ ID NO: 6177 - DNA, 100 bp, Homo sapiens
  source 1..100: mol_type = unassigned DNA
ggcaaaagaaagagaaaagggaacagctctctcggtctctctcgagaagtccctgaatgggaattccggcctgtggcagactgcaccaaattttatagac

SEQ ID NO: 6178 - RNA, 42 nt, Homo sapiens
  source 1..42: mol_type = unassigned RNA
cattcataagactggagaatctgaagaatgaagacaatgaga

SEQ ID NO: 6179 - DNA, 42 bp, Homo sapiens
  source 1..42: mol_type = unassigned DNA
cattcataagactggagaatctgaagaatgaagacaatgaga

SEQ ID NO: 6180 - DNA, 42 bp, Homo sapiens
  source 1..42: mol_type = unassigned DNA
tctcattgtcttcattcttcagattctccagtcttatgaatg

SEQ ID NO: 6181 - RNA, 39 nt, Homo sapiens
  source 1..39: mol_type = unassigned RNA
taaggattttagttattactttgtctggtcccagtaggt

SEQ ID NO: 6182 - DNA, 39 bp, Homo sapiens
  source 1..39: mol_type = unassigned DNA
taaggattttagttattactttgtctggtcccagtaggt

SEQ ID NO: 6183 - DNA, 39 bp, Homo sapiens
  source 1..39: mol_type = unassigned DNA
acctactgggaccagacaaagtaataactaaaatcctta

SEQ ID NO: 6184 - RNA, 56 nt, Homo sapiens
  source 1..56: mol_type = unassigned RNA
agctcatcctcttctccccccttgcagggtgaacctggtgctcctggcagcaaagg

SEQ ID NO: 6185 - DNA, 56 bp, Homo sapiens
  source 1..56: mol_type = unassigned DNA
agctcatcctcttctccccccttgcagggtgaacctggtgctcctggcagcaaagg

SEQ ID NO: 6186 - DNA, 56 bp, Homo sapiens
  source 1..56: mol_type = unassigned DNA
cctttgctgccaggagcaccaggttcaccctgcaaggggggagaagaggatgagct

SEQ ID NO: 6187 - RNA, 26 nt, Homo sapiens
  source 1..26: mol_type = unassigned RNA
caaaggtagtgcttgtagtcaccaac

SEQ ID NO: 6188 - DNA, 26 bp, Homo sapiens
  source 1..26: mol_type = unassigned DNA
caaaggtagtgcttgtagtcaccaac

SEQ ID NO: 6189 - DNA, 26 bp, Homo sapiens
  source 1..26: mol_type = unassigned DNA
gttggtgactacaagcactacctttg

SEQ ID NO: 6190 - RNA, 43 nt, Homo sapiens
  source 1..43: mol_type = unassigned RNA
tgttctgtttgatattgggttagcagctttatgaatccatcag

SEQ ID NO: 6191 - DNA, 43 bp, Homo sapiens
  source 1..43: mol_type = unassigned DNA
tgttctgtttgatattgggttagcagctttatgaatccatcag

SEQ ID NO: 6192 - DNA, 43 bp, Homo sapiens
  source 1..43: mol_type = unassigned DNA
ctgatggattcataaagctgctaacccaatatcaaacagaaca

SEQ ID NO: 6193 - RNA, 62 nt, Homo sapiens
  source 1..62: mol_type = unassigned RNA
ttgcatatatgacttgaacaaacccgaagcagaacctgaggaaattagtgatcacagctctg

SEQ ID NO: 6194 - DNA, 62 bp, Homo sapiens
  source 1..62: mol_type = unassigned DNA
ttgcatatatgacttgaacaaacccgaagcagaacctgaggaaattagtgatcacagctctg

SEQ ID NO: 6195 - DNA, 62 bp, Homo sapiens
  source 1..62: mol_type = unassigned DNA
cagagctgtgatcactaatttcctcaggttctgcttcgggtttgttcaagtcatatatgcaa

SEQ ID NO: 6196 - RNA, 30 nt, Homo sapiens
  source 1..30: mol_type = unassigned RNA
tcgttccgaacttgttggctgcggtgccgg

SEQ ID NO: 6197 - DNA, 30 bp, Homo sapiens
  source 1..30: mol_type = unassigned DNA
tcgttccgaacttgttggctgcggtgccgg

SEQ ID NO: 6198 - DNA, 30 bp, Homo sapiens
  source 1..30: mol_type = unassigned DNA
ccggcaccgcagccaacaagttcggaacga

SEQ ID NO: 6199 - RNA, 37 nt, Homo sapiens
  source 1..37: mol_type = unassigned RNA
ctgaagtgatgaacttctgaggaaagaggtgatgact

SEQ ID NO: 6200 - DNA, 37 bp, Homo sapiens
  source 1..37: mol_type = unassigned DNA
ctgaagtgatgaacttctgaggaaagaggtgatgact

SEQ ID NO: 6201 - DNA, 37 bp, Homo sapiens
  source 1..37: mol_type = unassigned DNA
agtcatcacctctttcctcagaagttcatcacttcag

SEQ ID NO: 6202 - RNA, 37 nt, Homo sapiens
  source 1..37: mol_type = unassigned RNA
tttatttggatatttggtctttctgctcacctggaga

SEQ ID NO: 6203 - DNA, 37 bp, Homo sapiens
  source 1..37: mol_type = unassigned DNA
tttatttggatatttggtctttctgctcacctggaga

SEQ ID NO: 6204 - DNA, 37 bp, Homo sapiens
  source 1..37: mol_type = unassigned DNA
tctccaggtgagcagaaagaccaaatatccaaataaa

SEQ ID NO: 6205 - RNA, 48 nt, Homo sapiens
  source 1..48: mol_type = unassigned RNA
gttaaaatagcagggcactggtagaagccctgatggcatggaaagaga

SEQ ID NO: 6206 - DNA, 48 bp, Homo sapiens
  source 1..48: mol_type = unassigned DNA
gttaaaatagcagggcactggtagaagccctgatggcatggaaagaga

SEQ ID NO: 6207 - DNA, 48 bp, Homo sapiens
  source 1..48: mol_type = unassigned DNA
tctctttccatgccatcagggcttctaccagtgccctgctattttaac

SEQ ID NO: 6208 - RNA, 28 nt, Homo sapiens
  source 1..28: mol_type = unassigned RNA
atgttagtcccagaaacaaccagagctc

SEQ ID NO: 6209 - DNA, 28 bp, Homo sapiens
  source 1..28: mol_type = unassigned DNA
atgttagtcccagaaacaaccagagctc

SEQ ID NO: 6210 - DNA, 28 bp, Homo sapiens
  source 1..28: mol_type = unassigned DNA
gagctctggttgtttctgggactaacat

SEQ ID NO: 6211 - RNA, 22 nt, Homo sapiens
  source 1..22: mol_type = unassigned RNA
tgttgcaaggtcaaactcacaa

SEQ ID NO: 6212 - DNA, 22 bp, Homo sapiens
  source 1..22: mol_type = unassigned DNA
tgttgcaaggtcaaactcacaa

SEQ ID NO: 6213 - DNA, 22 bp, Homo sapiens
  source 1..22: mol_type = unassigned DNA
ttgtgagtttgaccttgcaaca

SEQ ID NO: 6214 - RNA, 28 nt, Homo sapiens
  source 1..28: mol_type = unassigned RNA
ttgtttgttacagcgaacaccagctgct

SEQ ID NO: 6215 - DNA, 28 bp, Homo sapiens
  source 1..28: mol_type = unassigned DNA
ttgtttgttacagcgaacaccagctgct

SEQ ID NO: 6216 - DNA, 28 bp, Homo sapiens
  source 1..28: mol_type = unassigned DNA
agcagctggtgttcgctgtaacaaacaa

SEQ ID NO: 6217 - RNA, 33 nt, Homo sapiens
  source 1..33: mol_type = unassigned RNA
tccgcgctcaatggagacgtttgaccccaccga

SEQ ID NO: 6218 - DNA, 33 bp, Homo sapiens
  source 1..33: mol_type = unassigned DNA
tccgcgctcaatggagacgtttgaccccaccga

SEQ ID NO: 6219 - DNA, 33 bp, Homo sapiens
  source 1..33: mol_type = unassigned DNA
tcggtggggtcaaacgtctccattgagcgcgga

SEQ ID NO: 6220 - RNA, 24 nt, Homo sapiens
  source 1..24: mol_type = unassigned RNA
ttagtaattagtttgtatcattat

SEQ ID NO: 6221 - DNA, 24 bp, Homo sapiens
  source 1..24: mol_type = unassigned DNA
ttagtaattagtttgtatcattat

SEQ ID NO: 6222 - DNA, 24 bp, Homo sapiens
  source 1..24: mol_type = unassigned DNA
ataatgatacaaactaattactaa

SEQ ID NO: 6223 - RNA, 27 nt, Homo sapiens
  source 1..27: mol_type = unassigned RNA
gcgcagggtcggagctgcagagcctga

SEQ ID NO: 6224 - DNA, 27 bp, Homo sapiens
  source 1..27: mol_type = unassigned DNA
gcgcagggtcggagctgcagagcctga

SEQ ID NO: 6225 - DNA, 27 bp, Homo sapiens
  source 1..27: mol_type = unassigned DNA
tcaggctctgcagctccgaccctgcgc

SEQ ID NO: 6226 - RNA, 31 nt, Homo sapiens
  source 1..31: mol_type = unassigned RNA
cttttttctttctcctcgcgcagtgtctcca

SEQ ID NO: 6227 - DNA, 31 bp, Homo sapiens
  source 1..31: mol_type = unassigned DNA
cttttttctttctcctcgcgcagtgtctcca

SEQ ID NO: 6228 - DNA, 31 bp, Homo sapiens
  source 1..31: mol_type = unassigned DNA
tggagacactgcgcgaggagaaagaaaaaag

SEQ ID NO: 6229 - RNA, 29 nt, Homo sapiens
  source 1..29: mol_type = unassigned RNA
ccccgcagccagaagccgggcctgcagcg

SEQ ID NO: 6230 - DNA, 29 bp, Homo sapiens
  source 1..29: mol_type = unassigned DNA
ccccgcagccagaagccgggcctgcagcg

SEQ ID NO: 6231 - DNA, 29 bp, Homo sapiens
  source 1..29: mol_type = unassigned DNA
cgctgcaggcccggcttctggctgcgggg

SEQ ID NO: 6232 - RNA, 33 nt, Homo sapiens
  source 1..33: mol_type = unassigned RNA
ccctgcctcacggccaggcgctcgggaggccct

SEQ ID NO: 6233 - DNA, 33 bp, Homo sapiens
  source 1..33: mol_type = unassigned DNA
ccctgcctcacggccaggcgctcgggaggccct

SEQ ID NO: 6234 - DNA, 33 bp, Homo sapiens
  source 1..33: mol_type = unassigned DNA
agggcctcccgagcgcctggccgtgaggcaggg

SEQ ID NO: 6235 - RNA, 57 nt, Homo sapiens
  source 1..57: mol_type = unassigned RNA
ttgggaggttgaggtggaaggattgcttaagcccgggaggtcaaagctgcagtgagc

SEQ ID NO: 6236 - DNA, 57 bp, Homo sapiens
  source 1..57: mol_type = unassigned DNA
ttgggaggttgaggtggaaggattgcttaagcccgggaggtcaaagctgcagtgagc

SEQ ID NO: 6237 - DNA, 57 bp, Homo sapiens
  source 1..57: mol_type = unassigned DNA
gctcactgcagctttgacctcccgggcttaagcaatccttccacctcaacctcccaa

SEQ ID NO: 6238 - RNA, 135 nt, Homo sapiens
  source 1..135: mol_type = unassigned RNA
ttcccttagtatgtaggtgacccagggtggctttgctttggcaagggagaagtcacaagtttaatgggaagggaaccggagttagggctgtttgtgggtgattattttgctcttctctctccctttctttgtcaa

SEQ ID NO: 6239 - DNA, 135 bp, Homo sapiens
  source 1..135: mol_type = unassigned DNA
ttcccttagtatgtaggtgacccagggtggctttgctttggcaagggagaagtcacaagtttaatgggaagggaaccggagttagggctgtttgtgggtgattattttgctcttctctctccctttctttgtcaa

SEQ ID NO: 6240 - DNA, 135 bp, Homo sapiens
  source 1..135: mol_type = unassigned DNA
ttgacaaagaaagggagagagaagagcaaaataatcacccacaaacagccctaactccggttcccttcccattaaacttgtgacttctcccttgccaaagcaaagccaccctgggtcacctacatactaagggaa

SEQ ID NO: 6241 - RNA, 33 nt, Homo sapiens
  source 1..33: mol_type = unassigned RNA
ctgtcctgatggagcactttttgaacagaaggg

SEQ ID NO: 6242 - DNA, 33 bp, Homo sapiens
  source 1..33: mol_type = unassigned DNA
ctgtcctgatggagcactttttgaacagaaggg

SEQ ID NO: 6243 - DNA, 33 bp, Homo sapiens
  source 1..33: mol_type = unassigned DNA
cccttctgttcaaaaagtgctccatcaggacag

SEQ ID NO: 6244 - RNA, 127 nt, Homo sapiens
  source 1..127: mol_type = unassigned RNA
gaccccaggcatggaggagagcctggcagaaatgagtattatgactactgagcttcagagtctttgttccctgctacaagagtctaaagaagaagccatcaggactctgcagcgaaaaatgtgagtg

SEQ ID NO: 6245 - DNA, 127 bp, Homo sapiens
  source 1..127: mol_type = unassigned DNA
gaccccaggcatggaggagagcctggcagaaatgagtattatgactactgagcttcagagtctttgttccctgctacaagagtctaaagaagaagccatcaggactctgcagcgaaaaatgtgagtg

SEQ ID NO: 6246 - DNA, 127 bp, Homo sapiens
  source 1..127: mol_type = unassigned DNA
cactcacatttttcgctgcagagtcctgatggcttcttctttagactcttgtagcagggaacaaagactctgaagctcagtagtcataatactcatttctgccaggctctcctccatgcctggggtc

SEQ ID NO: 6247 - RNA, 32 nt, Homo sapiens
  source 1..32: mol_type = unassigned RNA
gctcacctgagcctgcttgttgcctgcagctc

SEQ ID NO: 6248 - DNA, 32 bp, Homo sapiens
  source 1..32: mol_type = unassigned DNA
gctcacctgagcctgcttgttgcctgcagctc

SEQ ID NO: 6249 - DNA, 32 bp, Homo sapiens
  source 1..32: mol_type = unassigned DNA
gagctgcaggcaacaagcaggctcaggtgagc

SEQ ID NO: 6250 - RNA, 177 nt, Homo sapiens
  source 1..177: mol_type = unassigned RNA
tttttatttaaatatttagctgtagcgccatcagatatggatgccttctaacaattgctgtttgtaaaataaatcaggatggtagaaagtgattatatggaaaattggaacctggatgagaccttttcgttgaattctgaagagtaatgatgtgaaaattgatacagggcaagagat

SEQ ID NO: 6251 - DNA, 177 bp, Homo sapiens
  source 1..177: mol_type = unassigned DNA
tttttatttaaatatttagctgtagcgccatcagatatggatgccttctaacaattgctgtttgtaaaataaatcaggatggtagaaagtgattatatggaaaattggaacctggatgagaccttttcgttgaattctgaagagtaatgatgtgaaaattgatacagggcaagagat

SEQ ID NO: 6252 - DNA, 177 bp, Homo sapiens
  source 1..177: mol_type = unassigned DNA
atctcttgccctgtatcaattttcacatcattactcttcagaattcaacgaaaaggtctcatccaggttccaattttccatataatcactttctaccatcctgatttattttacaaacagcaattgttagaaggcatccatatctgatggcgctacagctaaatatttaaataaaaa

SEQ ID NO: 6253 - RNA, 37 nt, Homo sapiens
  source 1..37: mol_type = unassigned RNA
tgtttgtttttctttttttgtttgtgtggttttttct

SEQ ID NO: 6254 - DNA, 37 bp, Homo sapiens
  source 1..37: mol_type = unassigned DNA
tgtttgtttttctttttttgtttgtgtggttttttct

SEQ ID NO: 6255 - DNA, 37 bp, Homo sapiens
  source 1..37: mol_type = unassigned DNA
agaaaaaaccacacaaacaaaaaaagaaaaacaaaca

SEQ ID NO: 6256 - RNA, 191 nt, Homo sapiens
  source 1..191: mol_type = unassigned RNA
gcttagaattagaaatgggcaaataatttggaagacacagaaagtacttgataatcgttgacttttttttttgtttaagtctggctacttttctagtatgttcagtggttcttggaaagaatccagcatgaatattattgaactggagattcctgaccagaacattgatgtagaaggtaactaccacaata

SEQ ID NO: 6257 - DNA, 191 bp, Homo sapiens
  source 1..191: mol_type = unassigned DNA
gcttagaattagaaatgggcaaataatttggaagacacagaaagtacttgataatcgttgacttttttttttgtttaagtctggctacttttctagtatgttcagtggttcttggaaagaatccagcatgaatattattgaactggagattcctgaccagaacattgatgtagaaggtaactaccacaata

SEQ ID NO: 6258 - DNA, 191 bp, Homo sapiens
  source 1..191: mol_type = unassigned DNA
tattgtggtagttaccttctacatcaatgttctggtcaggaatctccagttcaataatattcatgctggattctttccaagaaccactgaacatactagaaaagtagccagacttaaacaaaaaaaaaagtcaacgattatcaagtactttctgtgtcttccaaattatttgcccatttctaattctaagc

SEQ ID NO: 6259 - RNA, 114 nt, Homo sapiens
  source 1..114: mol_type = unassigned RNA
atttacaattgtccctgtcctttattagaaaattctcgcccaggctggagtgcagtggcatgatgatgactcattgaagccctgacctcaaaagcaatcctaccacttcagcca

SEQ ID NO: 6260 - DNA, 114 bp, Homo sapiens
  source 1..114: mol_type = unassigned DNA
atttacaattgtccctgtcctttattagaaaattctcgcccaggctggagtgcagtggcatgatgatgactcattgaagccctgacctcaaaagcaatcctaccacttcagcca

SEQ ID NO: 6261 - DNA, 114 bp, Homo sapiens
  source 1..114: mol_type = unassigned DNA
tggctgaagtggtaggattgcttttgaggtcagggcttcaatgagtcatcatcatgccactgcactccagcctgggcgagaattttctaataaaggacagggacaattgtaaat

SEQ ID NO: 6262 - RNA, 174 nt, Homo sapiens
  source 1..174: mol_type = unassigned RNA
cttactaaatatgttttcaggtgtgtgaagtctataaacttcacagggagaccttttacttggcacaagatttctttgaccggtatatggcgacacaagaaaatgttgtaaaaactcttttacagcttattgggatttcatctttatttattgcagccaaacttgaggtaaata

SEQ ID NO: 6263 - DNA, 174 bp, Homo sapiens
  source 1..174: mol_type = unassigned DNA
cttactaaatatgttttcaggtgtgtgaagtctataaacttcacagggagaccttttacttggcacaagatttctttgaccggtatatggcgacacaagaaaatgttgtaaaaactcttttacagcttattgggatttcatctttatttattgcagccaaacttgaggtaaata

SEQ ID NO: 6264 - DNA, 174 bp, Homo sapiens
  source 1..174: mol_type = unassigned DNA
tatttacctcaagtttggctgcaataaataaagatgaaatcccaataagctgtaaaagagtttttacaacattttcttgtgtcgccatataccggtcaaagaaatcttgtgccaagtaaaaggtctccctgtgaagtttatagacttcacacacctgaaaacatatttagtaag

SEQ ID NO: 6265 - RNA, 67 nt, Homo sapiens
  source 1..67: mol_type = unassigned RNA
ctcaggcacacatagactcgtgcacgcatgcacgccagggactgatgatgatggctgaaagtccttt

SEQ ID NO: 6266 - DNA, 67 bp, Homo sapiens
  source 1..67: mol_type = unassigned DNA
ctcaggcacacatagactcgtgcacgcatgcacgccagggactgatgatgatggctgaaagtccttt

SEQ ID NO: 6267 - DNA, 67 bp, Homo sapiens
  source 1..67: mol_type = unassigned DNA
aaaggactttcagccatcatcatcagtccctggcgtgcatgcgtgcacgagtctatgtgtgcctgag

SEQ ID NO: 6268 - RNA, 33 nt, Homo sapiens
  source 1..33: mol_type = unassigned RNA
aacctgggctgttagctcgctttgagccagagg

SEQ ID NO: 6269 - DNA, 33 bp, Homo sapiens
  source 1..33: mol_type = unassigned DNA
aacctgggctgttagctcgctttgagccagagg

SEQ ID NO: 6270 - DNA, 33 bp, Homo sapiens
  source 1..33: mol_type = unassigned DNA
cctctggctcaaagcgagctaacagcccaggtt

SEQ ID NO: 6271 - RNA, 29 nt, Homo sapiens
  source 1..29: mol_type = unassigned RNA
agctaggtcgagcttgcactgggacccta

SEQ ID NO: 6272 - DNA, 29 bp, Homo sapiens
  source 1..29: mol_type = unassigned DNA
agctaggtcgagcttgcactgggacccta

SEQ ID NO: 6273 - DNA, 29 bp, Homo sapiens
  source 1..29: mol_type = unassigned DNA
tagggtcccagtgcaagctcgacctagct

SEQ ID NO: 6274 - RNA, 23 nt, Homo sapiens
  source 1..23: mol_type = unassigned RNA
ggaggggagcctgttctgtggag

SEQ ID NO: 6275 - DNA, 23 bp, Homo sapiens
  source 1..23: mol_type = unassigned DNA
ggaggggagcctgttctgtggag

SEQ ID NO: 6276 - DNA, 23 bp, Homo sapiens
  source 1..23: mol_type = unassigned DNA
ctccacagaacaggctcccctcc

SEQ ID NO: 6277 - RNA, 31 nt, Homo sapiens
  source 1..31: mol_type = unassigned RNA
tcatagacagcttcgctctggacgagccctt

SEQ ID NO: 6278 - DNA, 31 bp, Homo sapiens
  source 1..31: mol_type = unassigned DNA
tcatagacagcttcgctctggacgagccctt

SEQ ID NO: 6279 - DNA, 31 bp, Homo sapiens
  source 1..31: mol_type = unassigned DNA
aagggctcgtccagagcgaagctgtctatga

SEQ ID NO: 6280 - RNA, 53 nt, Homo sapiens
  source 1..53: mol_type = unassigned RNA
tgaggtccgtggtgagcatttgcctgatcaccctctttaatttgcagctctcc

SEQ ID NO: 6281 - DNA, 53 bp, Homo sapiens
  source 1..53: mol_type = unassigned DNA
tgaggtccgtggtgagcatttgcctgatcaccctctttaatttgcagctctcc

SEQ ID NO: 6282 - DNA, 53 bp, Homo sapiens
  source 1..53: mol_type = unassigned DNA
ggagagctgcaaattaaagagggtgatcaggcaaatgctcaccacggacctca

SEQ ID NO: 6283 - RNA, 43 nt, Homo sapiens
  source 1..43: mol_type = unassigned RNA
tgtaaagggtcttctgagctgcagtggcaattagaccagaaga

SEQ ID NO: 6284 - DNA, 43 bp, Homo sapiens
  source 1..43: mol_type = unassigned DNA
tgtaaagggtcttctgagctgcagtggcaattagaccagaaga

SEQ ID NO: 6285 - DNA, 43 bp, Homo sapiens
  source 1..43: mol_type = unassigned DNA
tcttctggtctaattgccactgcagctcagaagaccctttaca

SEQ ID NO: 6286 - RNA, 29 nt, Homo sapiens
  source 1..29: mol_type = unassigned RNA
gagggttgagatgcgggcttagagcctaa

SEQ ID NO: 6287 - DNA, 29 bp, Homo sapiens
  source 1..29: mol_type = unassigned DNA
gagggttgagatgcgggcttagagcctaa

SEQ ID NO: 6288 - DNA, 29 bp, Homo sapiens
  source 1..29: mol_type = unassigned DNA
ttaggctctaagcccgcatctcaaccctc

SEQ ID NO: 6289 - RNA, 35 nt, Homo sapiens
  source 1..35: mol_type = unassigned RNA
aatccaggcgtgatgatgacttgctgaaccgtgct

SEQ ID NO: 6290 - DNA, 35 bp, Homo sapiens
  source 1..35: mol_type = unassigned DNA
aatccaggcgtgatgatgacttgctgaaccgtgct

SEQ ID NO: 6291 - DNA, 35 bp, Homo sapiens
  source 1..35: mol_type = unassigned DNA
agcacggttcagcaagtcatcatcacgcctggatt

SEQ ID NO: 6292 - RNA, 26 nt, Homo sapiens
  source 1..26: mol_type = unassigned RNA
ctgtatggtactggtagaaaaataca

SEQ ID NO: 6293 - DNA, 26 bp, Homo sapiens
  source 1..26: mol_type = unassigned DNA
ctgtatggtactggtagaaaaataca

SEQ ID NO: 6294 - DNA, 26 bp, Homo sapiens
  source 1..26: mol_type = unassigned DNA
tgtatttttctaccagtaccatacag

SEQ ID NO: 6295 - RNA, 141 nt, Homo sapiens
  source 1..141: mol_type = unassigned RNA
cattactcatttccaattctctgtgcttctattatctcattattcagcgagaaggtgttccgtgttaacgttgaagatgaaaatcacattaacataatccgcgagttggccagcacgacccaggtaagtaacaattttgat

SEQ ID NO: 6296 - DNA, 141 bp, Homo sapiens
  source 1..141: mol_type = unassigned DNA
cattactcatttccaattctctgtgcttctattatctcattattcagcgagaaggtgttccgtgttaacgttgaagatgaaaatcacattaacataatccgcgagttggccagcacgacccaggtaagtaacaattttgat

SEQ ID NO: 6297 - DNA, 141 bp, Homo sapiens
  source 1..141: mol_type = unassigned DNA
atcaaaattgttacttacctgggtcgtgctggccaactcgcggattatgttaatgtgattttcatcttcaacgttaacacggaacaccttctcgctgaataatgagataatagaagcacagagaattggaaatgagtaatg

SEQ ID NO: 6298 - RNA, 32 nt, Homo sapiens
  source 1..32: mol_type = unassigned RNA
ggacaccgctgggcagacagctctgacagtca

SEQ ID NO: 6299 - DNA, 32 bp, Homo sapiens
  source 1..32: mol_type = unassigned DNA
ggacaccgctgggcagacagctctgacagtca

SEQ ID NO: 6300 - DNA, 32 bp, Homo sapiens
  source 1..32: mol_type = unassigned DNA
tgactgtcagagctgtctgcccagcggtgtcc

SEQ ID NO: 6301 - RNA, 33 nt, Homo sapiens
  source 1..33: mol_type = unassigned RNA
acatactgtatgaagcttgtcctctgactaggt

SEQ ID NO: 6302 - DNA, 33 bp, Homo sapiens
  source 1..33: mol_type = unassigned DNA
acatactgtatgaagcttgtcctctgactaggt

SEQ ID NO: 6303 - DNA, 33 bp, Homo sapiens
  source 1..33: mol_type = unassigned DNA
acctagtcagaggacaagcttcatacagtatgt

SEQ ID NO: 6304 - RNA, 27 nt, Homo sapiens
  source 1..27: mol_type = unassigned RNA
cagatcagattgacctgtatgatgatg

SEQ ID NO: 6305 - DNA, 27 bp, Homo sapiens
  source 1..27: mol_type = unassigned DNA
cagatcagattgacctgtatgatgatg

SEQ ID NO: 6306 - DNA, 27 bp, Homo sapiens
  source 1..27: mol_type = unassigned DNA
catcatcatacaggtcaatctgatctg

SEQ ID NO: 6307 - RNA, 25 nt, Homo sapiens
  source 1..25: mol_type = unassigned RNA
gtgctcatgactgggtctatgaata

SEQ ID NO: 6308 - DNA, 25 bp, Homo sapiens
  source 1..25: mol_type = unassigned DNA
gtgctcatgactgggtctatgaata

SEQ ID NO: 6309 - DNA, 25 bp, Homo sapiens
  source 1..25: mol_type = unassigned DNA
tattcatagacccagtcatgagcac

SEQ ID NO: 6310 - RNA, 131 nt, Homo sapiens
  source 1..131: mol_type = unassigned RNA
ttaaaaaatcttcttgtcttctaggatcctcagtcagccatacccaaaggaacactcctagccattttaattactacattggtttacgtaggaattgcagtatctgtaggtaaatagtttcacatttcttt

SEQ ID NO: 6311 - DNA, 131 bp, Homo sapiens
  source 1..131: mol_type = unassigned DNA
ttaaaaaatcttcttgtcttctaggatcctcagtcagccatacccaaaggaacactcctagccattttaattactacattggtttacgtaggaattgcagtatctgtaggtaaatagtttcacatttcttt

SEQ ID NO: 6312 - DNA, 131 bp, Homo sapiens
  source 1..131: mol_type = unassigned DNA
aaagaaatgtgaaactatttacctacagatactgcaattcctacgtaaaccaatgtagtaattaaaatggctaggagtgttcctttgggtatggctgactgaggatcctagaagacaagaagattttttaa

SEQ ID NO: 6313 - RNA, 33 nt, Homo sapiens
  source 1..33: mol_type = unassigned RNA
tacattttagaaagtgaaatgctgtggacattt

SEQ ID NO: 6314 - DNA, 33 bp, Homo sapiens
  source 1..33: mol_type = unassigned DNA
tacattttagaaagtgaaatgctgtggacattt

SEQ ID NO: 6315 - DNA, 33 bp, Homo sapiens
  source 1..33: mol_type = unassigned DNA
aaatgtccacagcatttcactttctaaaatgta

SEQ ID NO: 6316 - RNA, 30 nt, Homo sapiens
  source 1..30: mol_type = unassigned RNA
gggtgtgtgcaaatacactgtccaggtaaa

SEQ ID NO: 6317 - DNA, 30 bp, Homo sapiens
  source 1..30: mol_type = unassigned DNA
gggtgtgtgcaaatacactgtccaggtaaa

SEQ ID NO: 6318 - DNA, 30 bp, Homo sapiens
  source 1..30: mol_type = unassigned DNA
tttacctggacagtgtatttgcacacaccc

SEQ ID NO: 6319 - RNA, 31 nt, Homo sapiens
  source 1..31: mol_type = unassigned RNA
gagaacattgggctacaggactcactgctgt

SEQ ID NO: 6320 - DNA, 31 bp, Homo sapiens
  source 1..31: mol_type = unassigned DNA
gagaacattgggctacaggactcactgctgt

SEQ ID NO: 6321 - DNA, 31 bp, Homo sapiens
  source 1..31: mol_type = unassigned DNA
acagcagtgagtcctgtagcccaatgttctc

SEQ ID NO: 6322 - RNA, 130 nt, Homo sapiens
  source 1..130: mol_type = unassigned RNA
ctcatgagtcatttgcaagtcatttgcaggctcttggagccctggaacagcacccaactcagttttctctgctagttctttatttttccatttgcgtgttgcagctcattaaaaaaatattggaatagca

SEQ ID NO: 6323 - DNA, 130 bp, Homo sapiens
  source 1..130: mol_type = unassigned DNA
ctcatgagtcatttgcaagtcatttgcaggctcttggagccctggaacagcacccaactcagttttctctgctagttctttatttttccatttgcgtgttgcagctcattaaaaaaatattggaatagca

SEQ ID NO: 6324 - DNA, 130 bp, Homo sapiens
  source 1..130: mol_type = unassigned DNA
tgctattccaatatttttttaatgagctgcaacacgcaaatggaaaaataaagaactagcagagaaaactgagttgggtgctgttccagggctccaagagcctgcaaatgacttgcaaatgactcatgag

SEQ ID NO: 6325 - RNA, 28 nt, Homo sapiens
  source 1..28: mol_type = unassigned RNA
tttggactgggtctcggaggggttcctg

SEQ ID NO: 6326 - DNA, 28 bp, Homo sapiens
  source 1..28: mol_type = unassigned DNA
tttggactgggtctcggaggggttcctg

SEQ ID NO: 6327 - DNA, 28 bp, Homo sapiens
  source 1..28: mol_type = unassigned DNA
caggaacccctccgagacccagtccaaa

SEQ ID NO: 6328 - RNA, 28 nt, Homo sapiens
  source 1..28: mol_type = unassigned RNA
gcgtcctcgtggtggccgcagttgtgct

SEQ ID NO: 6329 - DNA, 28 bp, Homo sapiens
  source 1..28: mol_type = unassigned DNA
gcgtcctcgtggtggccgcagttgtgct

SEQ ID NO: 6330 - DNA, 28 bp, Homo sapiens
  source 1..28: mol_type = unassigned DNA
agcacaactgcggccaccacgaggacgc

SEQ ID NO: 6331 - RNA, 30 nt, Homo sapiens
  source 1..30: mol_type = unassigned RNA
gttatggcacaggtaaaattctgagtaggt

SEQ ID NO: 6332 - DNA, 30 bp, Homo sapiens
  source 1..30: mol_type = unassigned DNA
gttatggcacaggtaaaattctgagtaggt

SEQ ID NO: 6333 - DNA, 30 bp, Homo sapiens
  source 1..30: mol_type = unassigned DNA
acctactcagaattttacctgtgccataac

SEQ ID NO: 6334 - RNA, 65 nt, Homo sapiens
  source 1..65: mol_type = unassigned RNA
gtctgtcctgagctccctcctcccgcagcatgcctgtctgatgaagcggctgtccctgaatggct

SEQ ID NO: 6335 - DNA, 65 bp, Homo sapiens
  source 1..65: mol_type = unassigned DNA
gtctgtcctgagctccctcctcccgcagcatgcctgtctgatgaagcggctgtccctgaatggct

SEQ ID NO: 6336 - DNA, 65 bp, Homo sapiens
  source 1..65: mol_type = unassigned DNA
agccattcagggacagccgcttcatcagacaggcatgctgcgggaggagggagctcaggacagac

SEQ ID NO: 6337 - RNA, 30 nt, Homo sapiens
  source 1..30: mol_type = unassigned RNA
atgaaatatgtggactgctctagcaaaccc

SEQ ID NO: 6338 - DNA, 30 bp, Homo sapiens
  source 1..30: mol_type = unassigned DNA
atgaaatatgtggactgctctagcaaaccc

SEQ ID NO: 6339 - DNA, 30 bp, Homo sapiens
  source 1..30: mol_type = unassigned DNA
gggtttgctagagcagtccacatatttcat

SEQ ID NO: 6340 - RNA, 113 nt, Homo sapiens
  source 1..113: mol_type = unassigned RNA
ctatcttgtgtaccagaggcagccacaaggcagatgttcagtgtggtgtagggcagatctgaatcactgtgcctgccccaggtggcacagtaatagaccccagaatcattttc

SEQ ID NO: 6341 - DNA, 113 bp, Homo sapiens
  source 1..113: mol_type = unassigned DNA
ctatcttgtgtaccagaggcagccacaaggcagatgttcagtgtggtgtagggcagatctgaatcactgtgcctgccccaggtggcacagtaatagaccccagaatcattttc

SEQ ID NO: 6342 - DNA, 113 bp, Homo sapiens
  source 1..113: mol_type = unassigned DNA
gaaaatgattctggggtctattactgtgccacctggggcaggcacagtgattcagatctgccctacaccacactgaacatctgccttgtggctgcctctggtacacaagatag

SEQ ID NO: 6343 - RNA, 28 nt, Homo sapiens
  source 1..28: mol_type = unassigned RNA
actccatttgtagtcctgccctgcgccg

SEQ ID NO: 6344 - DNA, 28 bp, Homo sapiens
  source 1..28: mol_type = unassigned DNA
actccatttgtagtcctgccctgcgccg

SEQ ID NO: 6345 - DNA, 28 bp, Homo sapiens
  source 1..28: mol_type = unassigned DNA
cggcgcagggcaggactacaaatggagt

SEQ ID NO: 6346 - RNA, 30 nt, Homo sapiens
  source 1..30: mol_type = unassigned RNA
attctctgaacgactgtcggatcatcttcg

SEQ ID NO: 6347 - DNA, 30 bp, Homo sapiens
  source 1..30: mol_type = unassigned DNA
attctctgaacgactgtcggatcatcttcg

SEQ ID NO: 6348 - DNA, 30 bp, Homo sapiens
  source 1..30: mol_type = unassigned DNA
cgaagatgatccgacagtcgttcagagaat

SEQ ID NO: 6349 - RNA, 22 nt, Homo sapiens
  source 1..22: mol_type = unassigned RNA
ccacacggttctgcaggcttta

SEQ ID NO: 6350 - DNA, 22 bp, Homo sapiens
  source 1..22: mol_type = unassigned DNA
ccacacggttctgcaggcttta

SEQ ID NO: 6351 - DNA, 22 bp, Homo sapiens
  source 1..22: mol_type = unassigned DNA
taaagcctgcagaaccgtgtgg

SEQ ID NO: 6352 - RNA, 30 nt, Homo sapiens
  source 1..30: mol_type = unassigned RNA
tgaattattctgatgaccagttgtgcgtta

SEQ ID NO: 6353 - DNA, 30 bp, Homo sapiens
  source 1..30: mol_type = unassigned DNA
tgaattattctgatgaccagttgtgcgtta

SEQ ID NO: 6354 - DNA, 30 bp, Homo sapiens
  source 1..30: mol_type = unassigned DNA
taacgcacaactggtcatcagaataattca

SEQ ID NO: 6355 - RNA, 25 nt, Homo sapiens
  source 1..25: mol_type = unassigned RNA
tttatcattggtagaattcaatgtt

SEQ ID NO: 6356 - DNA, 25 bp, Homo sapiens
  source 1..25: mol_type = unassigned DNA
tttatcattggtagaattcaatgtt

SEQ ID NO: 6357 - DNA, 25 bp, Homo sapiens
  source 1..25: mol_type = unassigned DNA
aacattgaattctaccaatgataaa

SEQ ID NO: 6358 - RNA, 47 nt, Homo sapiens
  source 1..47: mol_type = unassigned RNA
cttttagtatctatagcactgctataactcaaattagactaacaaca

SEQ ID NO: 6359 - DNA, 47 bp, Homo sapiens
  source 1..47: mol_type = unassigned DNA
cttttagtatctatagcactgctataactcaaattagactaacaaca

SEQ ID NO: 6360 - DNA, 47 bp, Homo sapiens
  source 1..47: mol_type = unassigned DNA
tgttgttagtctaatttgagttatagcagtgctatagatactaaaag

SEQ ID NO: 6361 - RNA, 33 nt, Homo sapiens
  source 1..33: mol_type = unassigned RNA
cagagaggtgtgagtctgaaacccacgttccca

SEQ ID NO: 6362 - DNA, 33 bp, Homo sapiens
  source 1..33: mol_type = unassigned DNA
cagagaggtgtgagtctgaaacccacgttccca

SEQ ID NO: 6363 - DNA, 33 bp, Homo sapiens
  source 1..33: mol_type = unassigned DNA
tgggaacgtgggtttcagactcacacctctctg

SEQ ID NO: 6364 - RNA, 25 nt, Homo sapiens
  source 1..25: mol_type = unassigned RNA
gtgcttccggctccaggacaacaca

SEQ ID NO: 6365 - DNA, 25 bp, Homo sapiens
  source 1..25: mol_type = unassigned DNA
gtgcttccggctccaggacaacaca

SEQ ID NO: 6366 - DNA, 25 bp, Homo sapiens
  source 1..25: mol_type = unassigned DNA
tgtgttgtcctggagccggaagcac

SEQ ID NO: 6367 - RNA, 37 nt, Homo sapiens
  source 1..37: mol_type = unassigned RNA
ccttgctgactctccgaatggccatggactcgtcgct

SEQ ID NO: 6368 - DNA, 37 bp, Homo sapiens
  source 1..37: mol_type = unassigned DNA
ccttgctgactctccgaatggccatggactcgtcgct

SEQ ID NO: 6369 - DNA, 37 bp, Homo sapiens
  source 1..37: mol_type = unassigned DNA
agcgacgagtccatggccattcggagagtcagcaagg

SEQ ID NO: 6370 - RNA, 86 nt, Homo sapiens
  source 1..86: mol_type = unassigned RNA
ctagtaacagagttagttcaggataggatgtggtagtgtggtagtcaggtgggggaagtacataatgcgggaaactgggaatttgc

SEQ ID NO: 6371 - DNA, 86 bp, Homo sapiens
  source 1..86: mol_type = unassigned DNA
ctagtaacagagttagttcaggataggatgtggtagtgtggtagtcaggtgggggaagtacataatgcgggaaactgggaatttgc

SEQ ID NO: 6372 - DNA, 86 bp, Homo sapiens
  source 1..86: mol_type = unassigned DNA
gcaaattcccagtttcccgcattatgtacttcccccacctgactaccacactaccacatcctatcctgaactaactctgttactag

SEQ ID NO: 6373 - RNA, 31 nt, Homo sapiens
  source 1..31: mol_type = unassigned RNA
cactgtggacagacgtgggcttcagaagctc

SEQ ID NO: 6374 - DNA, 31 bp, Homo sapiens
  source 1..31: mol_type = unassigned DNA
cactgtggacagacgtgggcttcagaagctc

SEQ ID NO: 6375 - DNA, 31 bp, Homo sapiens
  source 1..31: mol_type = unassigned DNA
gagcttctgaagcccacgtctgtccacagtg

SEQ ID NO: 6376 - RNA, 32 nt, Homo sapiens
  source 1..32: mol_type = unassigned RNA
cagaggaggagctcctggacatggcggtgcta

SEQ ID NO: 6377 - DNA, 32 bp, Homo sapiens
  source 1..32: mol_type = unassigned DNA
cagaggaggagctcctggacatggcggtgcta

SEQ ID NO: 6378 - DNA, 32 bp, Homo sapiens
  source 1..32: mol_type = unassigned DNA
tagcaccgccatgtccaggagctcctcctctg

SEQ ID NO: 6379 - RNA, 31 nt, Homo sapiens
  source 1..31: mol_type = unassigned RNA
gctgggaagcctctgttcgactgtcagatcc

SEQ ID NO: 6380 - DNA, 31 bp, Homo sapiens
  source 1..31: mol_type = unassigned DNA
gctgggaagcctctgttcgactgtcagatcc

SEQ ID NO: 6381 - DNA, 31 bp, Homo sapiens
  source 1..31: mol_type = unassigned DNA
ggatctgacagtcgaacagaggcttcccagc

SEQ ID NO: 6382 - RNA, 24 nt, Homo sapiens
  source 1..24: mol_type = unassigned RNA
tctttgaatggtagaattcactag

SEQ ID NO: 6383 - DNA, 24 bp, Homo sapiens
  source 1..24: mol_type = unassigned DNA
tctttgaatggtagaattcactag

SEQ ID NO: 6384 - DNA, 24 bp, Homo sapiens
  source 1..24: mol_type = unassigned DNA
ctagtgaattctaccattcaaaga

SEQ ID NO: 6385 - RNA, 87 nt, Homo sapiens
  source 1..87: mol_type = unassigned RNA
cacattcgggattttgcaaaagacacattcactctgagcactggagacctacatctctttgtccagttgacttaagttctcaccaag

SEQ ID NO: 6386 - DNA, 87 bp, Homo sapiens
  source 1..87: mol_type = unassigned DNA
cacattcgggattttgcaaaagacacattcactctgagcactggagacctacatctctttgtccagttgacttaagttctcaccaag

SEQ ID NO: 6387 - DNA, 87 bp, Homo sapiens
  source 1..87: mol_type = unassigned DNA
cttggtgagaacttaagtcaactggacaaagagatgtaggtctccagtgctcagagtgaatgtgtcttttgcaaaatcccgaatgtg

SEQ ID NO: 6388 - RNA, 61 nt, Homo sapiens
  source 1..61: mol_type = unassigned RNA
aatcgaaaaacaaagtcggggaggagccaagatggccgaatctacagctcccagcgtgagc

SEQ ID NO: 6389 - DNA, 61 bp, Homo sapiens
  source 1..61: mol_type = unassigned DNA
aatcgaaaaacaaagtcggggaggagccaagatggccgaatctacagctcccagcgtgagc

SEQ ID NO: 6390 - DNA, 61 bp, Homo sapiens
  source 1..61: mol_type = unassigned DNA
gctcacgctgggagctgtagattcggccatcttggctcctccccgactttgtttttcgatt

SEQ ID NO: 6391 - RNA, 32 nt, Homo sapiens
  source 1..32: mol_type = unassigned RNA
agatatgggacctgcagggctctgaggaacct

SEQ ID NO: 6392 - DNA, 32 bp, Homo sapiens
  source 1..32: mol_type = unassigned DNA
agatatgggacctgcagggctctgaggaacct

SEQ ID NO: 6393 - DNA, 32 bp, Homo sapiens
  source 1..32: mol_type = unassigned DNA
aggttcctcagagccctgcaggtcccatatct

SEQ ID NO: 6394 - RNA, 29 nt, Homo sapiens
  source 1..29: mol_type = unassigned RNA
gccaactctcagaggaaagactgtgattc

SEQ ID NO: 6395 - DNA, 29 bp, Homo sapiens
  source 1..29: mol_type = unassigned DNA
gccaactctcagaggaaagactgtgattc

SEQ ID NO: 6396 - DNA, 29 bp, Homo sapiens
  source 1..29: mol_type = unassigned DNA
gaatcacagtctttcctctgagagttggc

SEQ ID NO: 6397 - RNA, 53 nt, Homo sapiens
  source 1..53: mol_type = unassigned RNA
aagcgaggccaggtcaactgacagatctgactgatagaattcacacaggtccc

SEQ ID NO: 6398 - DNA, 53 bp, Homo sapiens
  source 1..53: mol_type = unassigned DNA
aagcgaggccaggtcaactgacagatctgactgatagaattcacacaggtccc

SEQ ID NO: 6399 - DNA, 53 bp, Homo sapiens
  source 1..53: mol_type = unassigned DNA
gggacctgtgtgaattctatcagtcagatctgtcagttgacctggcctcgctt

SEQ ID NO: 6400 - RNA, 31 nt, Homo sapiens
  source 1..31: mol_type = unassigned RNA
gatggctgttgatcagggtggctgtggcagt

SEQ ID NO: 6401 - DNA, 31 bp, Homo sapiens
  source 1..31: mol_type = unassigned DNA
gatggctgttgatcagggtggctgtggcagt

SEQ ID NO: 6402 - DNA, 31 bp, Homo sapiens
  source 1..31: mol_type = unassigned DNA
actgccacagccaccctgatcaacagccatc

SEQ ID NO: 6403 - RNA, 51 nt, Homo sapiens
  source 1..51: mol_type = unassigned RNA
gggttttgcaggcgtcttccctgggaagggaccctttggaactgcagtccg

SEQ ID NO: 6404 - DNA, 51 bp, Homo sapiens
  source 1..51: mol_type = unassigned DNA
gggttttgcaggcgtcttccctgggaagggaccctttggaactgcagtccg

SEQ ID NO: 6405 - DNA, 51 bp, Homo sapiens
  source 1..51: mol_type = unassigned DNA
cggactgcagttccaaagggtcccttcccagggaagacgcctgcaaaaccc

SEQ ID NO: 6406 - RNA, 33 nt, Homo sapiens
  source 1..33: mol_type = unassigned RNA
tcctgcgatcaggacatcaatgactgtgacccc

SEQ ID NO: 6407 - DNA, 33 bp, Homo sapiens
  source 1..33: mol_type = unassigned DNA
tcctgcgatcaggacatcaatgactgtgacccc

SEQ ID NO: 6408 - DNA, 33 bp, Homo sapiens
  source 1..33: mol_type = unassigned DNA
ggggtcacagtcattgatgtcctgatcgcagga

SEQ ID NO: 6409 - RNA, 40 nt, Homo sapiens
  source 1..40: mol_type = unassigned RNA
atcatttagaatcaagggactggttgaaatcactgaagaa

SEQ ID NO: 6410 - DNA, 40 bp, Homo sapiens
  source 1..40: mol_type = unassigned DNA
atcatttagaatcaagggactggttgaaatcactgaagaa

SEQ ID NO: 6411 - DNA, 40 bp, Homo sapiens
  source 1..40: mol_type = unassigned DNA
ttcttcagtgatttcaaccagtcccttgattctaaatgat

SEQ ID NO: 6412 - RNA, 28 nt, Homo sapiens
  source 1..28: mol_type = unassigned RNA
ttgttatgccactggtagaaataattaa

SEQ ID NO: 6413 - DNA, 28 bp, Homo sapiens
  source 1..28: mol_type = unassigned DNA
ttgttatgccactggtagaaataattaa

SEQ ID NO: 6414 - DNA, 28 bp, Homo sapiens
  source 1..28: mol_type = unassigned DNA
ttaattatttctaccagtggcataacaa

SEQ ID NO: 6415 - RNA, 24 nt, Homo sapiens
  source 1..24: mol_type = unassigned RNA
catggcactggtataaaaactggc

SEQ ID NO: 6416 - DNA, 24 bp, Homo sapiens
  source 1..24: mol_type = unassigned DNA
catggcactggtataaaaactggc

SEQ ID NO: 6417 - DNA, 24 bp, Homo sapiens
  source 1..24: mol_type = unassigned DNA
gccagtttttataccagtgccatg

SEQ ID NO: 6418 - RNA, 103 nt, Homo sapiens
  source 1..103: mol_type = unassigned RNA
ttgataaaaagagtgactttgaatttactctgaaagtgtcttacttagagatttacaatgaagaaattttggatcttctatgcccatctcgtgagaaagctca

SEQ ID NO: 6419 - DNA, 103 bp, Homo sapiens
  source 1..103: mol_type = unassigned DNA
ttgataaaaagagtgactttgaatttactctgaaagtgtcttacttagagatttacaatgaagaaattttggatcttctatgcccatctcgtgagaaagctca

SEQ ID NO: 6420 - DNA, 103 bp, Homo sapiens
  source 1..103: mol_type = unassigned DNA
tgagctttctcacgagatgggcatagaagatccaaaatttcttcattgtaaatctctaagtaagacactttcagagtaaattcaaagtcactctttttatcaa

SEQ ID NO: 6421 - RNA, 30 nt, Homo sapiens
  source 1..30: mol_type = unassigned RNA
tgctccagtgcgtgctgtctgtggagtgtg

SEQ ID NO: 6422 - DNA, 30 bp, Homo sapiens
  source 1..30: mol_type = unassigned DNA
tgctccagtgcgtgctgtctgtggagtgtg

SEQ ID NO: 6423 - DNA, 30 bp, Homo sapiens
  source 1..30: mol_type = unassigned DNA
cacactccacagacagcacgcactggagca

SEQ ID NO: 6424 - RNA, 31 nt, Homo sapiens
  source 1..31: mol_type = unassigned RNA
gcgggaagcacagaactggggacctggtggg

SEQ ID NO: 6425 - DNA, 31 bp, Homo sapiens
  source 1..31: mol_type = unassigned DNA
gcgggaagcacagaactggggacctggtggg

SEQ ID NO: 6426 - DNA, 31 bp, Homo sapiens
  source 1..31: mol_type = unassigned DNA
cccaccaggtccccagttctgtgcttcccgc

SEQ ID NO: 6427 - RNA, 30 nt, Homo sapiens
  source 1..30: mol_type = unassigned RNA
aaaaacttggtgcactctgaaagcagcact

SEQ ID NO: 6428 - DNA, 30 bp, Homo sapiens
  source 1..30: mol_type = unassigned DNA
aaaaacttggtgcactctgaaagcagcact

SEQ ID NO: 6429 - DNA, 30 bp, Homo sapiens
  source 1..30: mol_type = unassigned DNA
agtgctgctttcagagtgcaccaagttttt

SEQ ID NO: 6430 - RNA, 31 nt, Homo sapiens
  source 1..31: mol_type = unassigned RNA
cagaacatacctggatccgaactgatgtctt

SEQ ID NO: 6431 - DNA, 31 bp, Homo sapiens
  source 1..31: mol_type = unassigned DNA
cagaacatacctggatccgaactgatgtctt

SEQ ID NO: 6432 - DNA, 31 bp, Homo sapiens
  source 1..31: mol_type = unassigned DNA
aagacatcagttcggatccaggtatgttctg

SEQ ID NO: 6433 - RNA, 72 nt, Homo sapiens
  source 1..72: mol_type = unassigned RNA
ccagtgccatttattgtggttgggactctgcagggcgaaacttctcctgggctcccggtatctcctattaga

SEQ ID NO: 6434 - DNA, 72 bp, Homo sapiens
  source 1..72: mol_type = unassigned DNA
ccagtgccatttattgtggttgggactctgcagggcgaaacttctcctgggctcccggtatctcctattaga

SEQ ID NO: 6435 - DNA, 72 bp, Homo sapiens
  source 1..72: mol_type = unassigned DNA
tctaataggagataccgggagcccaggagaagtttcgccctgcagagtcccaaccacaataaatggcactgg

SEQ ID NO: 6436 - RNA, 134 nt, Homo sapiens
  source 1..134: mol_type = unassigned RNA
ttatctgttgtcttattctttcataggtacccatttgaacctcctcagatccgatttctcactccaatttatcatccaaacattgattctgctggaaggatttgtctggatgttctcaaattgccaccaaaagt

SEQ ID NO: 6437 - DNA, 134 bp, Homo sapiens
  source 1..134: mol_type = unassigned DNA
ttatctgttgtcttattctttcataggtacccatttgaacctcctcagatccgatttctcactccaatttatcatccaaacattgattctgctggaaggatttgtctggatgttctcaaattgccaccaaaagt

SEQ ID NO: 6438 - DNA, 134 bp, Homo sapiens
  source 1..134: mol_type = unassigned DNA
acttttggtggcaatttgagaacatccagacaaatccttccagcagaatcaatgtttggatgataaattggagtgagaaatcggatctgaggaggttcaaatgggtacctatgaaagaataagacaacagataa

SEQ ID NO: 6439 - RNA, 38 nt, Homo sapiens
  source 1..38: mol_type = unassigned RNA
ttttgatttgtagtttcctgatcatgacggatgttgag

SEQ ID NO: 6440 - DNA, 38 bp, Homo sapiens
  source 1..38: mol_type = unassigned DNA
ttttgatttgtagtttcctgatcatgacggatgttgag

SEQ ID NO: 6441 - DNA, 38 bp, Homo sapiens
  source 1..38: mol_type = unassigned DNA
ctcaacatccgtcatgatcaggaaactacaaatcaaaa

SEQ ID NO: 6442 - RNA, 122 nt, Homo sapiens
  source 1..122: mol_type = unassigned RNA
actctatgcaggccacagcggcctaggcagggagcccggggcgcaggcgcctaggcaaggaacccctgagccaggagagctggaccaggggcccttgccaggacgccagtagagctggcagc

SEQ ID NO: 6443 - DNA, 122 bp, Homo sapiens
  source 1..122: mol_type = unassigned DNA
actctatgcaggccacagcggcctaggcagggagcccggggcgcaggcgcctaggcaaggaacccctgagccaggagagctggaccaggggcccttgccaggacgccagtagagctggcagc

SEQ ID NO: 6444 - DNA, 122 bp, Homo sapiens
  source 1..122: mol_type = unassigned DNA
gctgccagctctactggcgtcctggcaagggcccctggtccagctctcctggctcaggggttccttgcctaggcgcctgcgccccgggctccctgcctaggccgctgtggcctgcatagagt

SEQ ID NO: 6445 - RNA, 126 nt, Homo sapiens
  source 1..126: mol_type = unassigned RNA
atttagatgccagtgaactctgaagtcatgtatccacatttaatggaaggcttcttaccattcagcaatttagttactcatctgtgagtaaagagtgattttattgtcttcgtctacattcgtatt

SEQ ID NO: 6446 - DNA, 126 bp, Homo sapiens
  source 1..126: mol_type = unassigned DNA
atttagatgccagtgaactctgaagtcatgtatccacatttaatggaaggcttcttaccattcagcaatttagttactcatctgtgagtaaagagtgattttattgtcttcgtctacattcgtatt

SEQ ID NO: 6447 - DNA, 126 bp, Homo sapiens
  source 1..126: mol_type = unassigned DNA
aatacgaatgtagacgaagacaataaaatcactctttactcacagatgagtaactaaattgctgaatggtaagaagccttccattaaatgtggatacatgacttcagagttcactggcatctaaat

SEQ ID NO: 6448 - RNA, 30 nt, Homo sapiens
  source 1..30: mol_type = unassigned RNA
tttgaagatagtaactgtagatggaaaaac

SEQ ID NO: 6449 - DNA, 30 bp, Homo sapiens
  source 1..30: mol_type = unassigned DNA
tttgaagatagtaactgtagatggaaaaac

SEQ ID NO: 6450 - DNA, 30 bp, Homo sapiens
  source 1..30: mol_type = unassigned DNA
gtttttccatctacagttactatcttcaaa

SEQ ID NO: 6451 - RNA, 29 nt, Homo sapiens
  source 1..29: mol_type = unassigned RNA
tgattcccaggtctgtgaacagagcgcag

SEQ ID NO: 6452 - DNA, 29 bp, Homo sapiens
  source 1..29: mol_type = unassigned DNA
tgattcccaggtctgtgaacagagcgcag

SEQ ID NO: 6453 - DNA, 29 bp, Homo sapiens
  source 1..29: mol_type = unassigned DNA
ctgcgctctgttcacagacctgggaatca

SEQ ID NO: 6454 - RNA, 43 nt, Homo sapiens
  source 1..43: mol_type = unassigned RNA
atctggaaacatgatgtttgagctgctaacctgattgtgtttg

SEQ ID NO: 6455 - DNA, 43 bp, Homo sapiens
  source 1..43: mol_type = unassigned DNA
atctggaaacatgatgtttgagctgctaacctgattgtgtttg

SEQ ID NO: 6456 - DNA, 43 bp, Homo sapiens
  source 1..43: mol_type = unassigned DNA
caaacacaatcaggttagcagctcaaacatcatgtttccagat

SEQ ID NO: 6457 - RNA, 31 nt, Homo sapiens
  source 1..31: mol_type = unassigned RNA
cgccagtcccggggctgcagggagcgcagcg

SEQ ID NO: 6458 - DNA, 31 bp, Homo sapiens
  source 1..31: mol_type = unassigned DNA
cgccagtcccggggctgcagggagcgcagcg

SEQ ID NO: 6459 - DNA, 31 bp, Homo sapiens
  source 1..31: mol_type = unassigned DNA
cgctgcgctccctgcagccccgggactggcg

SEQ ID NO: 6460 - RNA, 33 nt, Homo sapiens
  source 1..33: mol_type = unassigned RNA
acagtaacctcttagtgctttttgcccaggact

SEQ ID NO: 6461 - DNA, 33 bp, Homo sapiens
  source 1..33: mol_type = unassigned DNA
acagtaacctcttagtgctttttgcccaggact

SEQ ID NO: 6462 - DNA, 33 bp, Homo sapiens
  source 1..33: mol_type = unassigned DNA
agtcctgggcaaaaagcactaagaggttactgt

SEQ ID NO: 6463 - RNA, 28 nt, Homo sapiens
  source 1..28: mol_type = unassigned RNA
agattctttgtgtgcggagctgagcctt

SEQ ID NO: 6464 - DNA, 28 bp, Homo sapiens
  source 1..28: mol_type = unassigned DNA
agattctttgtgtgcggagctgagcctt

SEQ ID NO: 6465 - DNA, 28 bp, Homo sapiens
  source 1..28: mol_type = unassigned DNA
aaggctcagctccgcacacaaagaatct

SEQ ID NO: 6466 - RNA, 79 nt, Homo sapiens
  source 1..79: mol_type = unassigned RNA
aaatatgggtttctctgaacatttagagtcagctattttacccctgctttacagtgccaggttcttgatgaattactaa

SEQ ID NO: 6467 - DNA, 79 bp, Homo sapiens
  source 1..79: mol_type = unassigned DNA
aaatatgggtttctctgaacatttagagtcagctattttacccctgctttacagtgccaggttcttgatgaattactaa

SEQ ID NO: 6468 - DNA, 79 bp, Homo sapiens
  source 1..79: mol_type = unassigned DNA
ttagtaattcatcaagaacctggcactgtaaagcaggggtaaaatagctgactctaaatgttcagagaaacccatattt

SEQ ID NO: 6469 - RNA, 103 nt, Homo sapiens
  source 1..103: mol_type = unassigned RNA
ctctttctgtgtggaacttgagattcaaactgcgaggcaggaagtgcaccagcagggactctggcctggcggagagtccctgttccccttttgtacctttttg

SEQ ID NO: 6470 - DNA, 103 bp, Homo sapiens
  source 1..103: mol_type = unassigned DNA
ctctttctgtgtggaacttgagattcaaactgcgaggcaggaagtgcaccagcagggactctggcctggcggagagtccctgttccccttttgtacctttttg

SEQ ID NO: 6471 - DNA, 103 bp, Homo sapiens
  source 1..103: mol_type = unassigned DNA
caaaaaggtacaaaaggggaacagggactctccgccaggccagagtccctgctggtgcacttcctgcctcgcagtttgaatctcaagttccacacagaaagag

SEQ ID NO: 6472 - RNA, 24 nt, Homo sapiens
  source 1..24: mol_type = unassigned RNA
tccttgcccttcctaaatttggct

SEQ ID NO: 6473 - DNA, 24 bp, Homo sapiens
  source 1..24: mol_type = unassigned DNA
tccttgcccttcctaaatttggct

SEQ ID NO: 6474 - DNA, 24 bp, Homo sapiens
  source 1..24: mol_type = unassigned DNA
agccaaatttaggaagggcaagga

SEQ ID NO: 6475 - RNA, 31 nt, Homo sapiens
  source 1..31: mol_type = unassigned RNA
ctctgatttggtcaccttgtagaaccttgga

SEQ ID NO: 6476 - DNA, 31 bp, Homo sapiens
  source 1..31: mol_type = unassigned DNA
ctctgatttggtcaccttgtagaaccttgga

SEQ ID NO: 6477 - DNA, 31 bp, Homo sapiens
  source 1..31: mol_type = unassigned DNA
tccaaggttctacaaggtgaccaaatcagag

SEQ ID NO: 6478 - RNA, 26 nt, Homo sapiens
  source 1..26: mol_type = unassigned RNA
taagttacagaaggaagttgaataat

SEQ ID NO: 6479 - DNA, 26 bp, Homo sapiens
  source 1..26: mol_type = unassigned DNA
taagttacagaaggaagttgaataat

SEQ ID NO: 6480 - DNA, 26 bp, Homo sapiens
  source 1..26: mol_type = unassigned DNA
attattcaacttccttctgtaactta

SEQ ID NO: 6481 - RNA, 53 nt, Homo sapiens
  source 1..53: mol_type = unassigned RNA
ccaccagtgacacatgatgaccaggttctccagttgctgatataaactgtttg

SEQ ID NO: 6482 - DNA, 53 bp, Homo sapiens
  source 1..53: mol_type = unassigned DNA
ccaccagtgacacatgatgaccaggttctccagttgctgatataaactgtttg

SEQ ID NO: 6483 - DNA, 53 bp, Homo sapiens
  source 1..53: mol_type = unassigned DNA
caaacagtttatatcagcaactggagaacctggtcatcatgtgtcactggtgg

SEQ ID NO: 6484 - RNA, 31 nt, Homo sapiens
  source 1..31: mol_type = unassigned RNA
attttttcagactgtgcaatacttagagaac

SEQ ID NO: 6485 - DNA, 31 bp, Homo sapiens
  source 1..31: mol_type = unassigned DNA
attttttcagactgtgcaatacttagagaac

SEQ ID NO: 6486 - DNA, 31 bp, Homo sapiens
  source 1..31: mol_type = unassigned DNA
gttctctaagtattgcacagtctgaaaaaat

SEQ ID NO: 6487 - RNA, 49 nt, Homo sapiens
  source 1..49: mol_type = unassigned RNA
cttgttgctcacacaaagtctgttggtagactctcttcacacagacaga

SEQ ID NO: 6488 - DNA, 49 bp, Homo sapiens
  source 1..49: mol_type = unassigned DNA
cttgttgctcacacaaagtctgttggtagactctcttcacacagacaga

SEQ ID NO: 6489 - DNA, 49 bp, Homo sapiens
  source 1..49: mol_type = unassigned DNA
tctgtctgtgtgaagagagtctaccaacagactttgtgtgagcaacaag

SEQ ID NO: 6490 - RNA, 32 nt, Homo sapiens
  source 1..32: mol_type = unassigned RNA
cagctggaactgatagaaactcgcatcgccaa

SEQ ID NO: 6491 - DNA, 32 bp, Homo sapiens
  source 1..32: mol_type = unassigned DNA
cagctggaactgatagaaactcgcatcgccaa

SEQ ID NO: 6492 - DNA, 32 bp, Homo sapiens
  source 1..32: mol_type = unassigned DNA
ttggcgatgcgagtttctatcagttccagctg

SEQ ID NO: 6493 - RNA, 53 nt, Homo sapiens
  source 1..53: mol_type = unassigned RNA
ggtggtggataaggatggcgatgtgactgtaactaatgatggggtcaccatct

SEQ ID NO: 6494 - DNA, 53 bp, Homo sapiens
  source 1..53: mol_type = unassigned DNA
ggtggtggataaggatggcgatgtgactgtaactaatgatggggtcaccatct

SEQ ID NO: 6495 - DNA, 53 bp, Homo sapiens
  source 1..53: mol_type = unassigned DNA
agatggtgaccccatcattagttacagtcacatcgccatccttatccaccacc

SEQ ID NO: 6496 - RNA, 33 nt, Homo sapiens
  source 1..33: mol_type = unassigned RNA
gggatgtgagggaactgaactctggtgccgtgc

SEQ ID NO: 6497 - DNA, 33 bp, Homo sapiens
  source 1..33: mol_type = unassigned DNA
gggatgtgagggaactgaactctggtgccgtgc

SEQ ID NO: 6498 - DNA, 33 bp, Homo sapiens
  source 1..33: mol_type = unassigned DNA
gcacggcaccagagttcagttccctcacatccc

SEQ ID NO: 6499 - RNA, 24 nt, Homo sapiens
  source 1..24: mol_type = unassigned RNA
aatatgcaatggtagaaataactc

SEQ ID NO: 6500 - DNA, 24 bp, Homo sapiens
  source 1..24: mol_type = unassigned DNA
aatatgcaatggtagaaataactc

SEQ ID NO: 6501 - DNA, 24 bp, Homo sapiens
  source 1..24: mol_type = unassigned DNA
gagttatttctaccattgcatatt

SEQ ID NO: 6502 - RNA, 52 nt, Homo sapiens
  source 1..52: mol_type = unassigned RNA
tcagggcagtccagatctcagtggtataatccactgtctaactgaacaaaga

SEQ ID NO: 6503 - DNA, 52 bp, Homo sapiens
  source 1..52: mol_type = unassigned DNA
tcagggcagtccagatctcagtggtataatccactgtctaactgaacaaaga

SEQ ID NO: 6504 - DNA, 52 bp, Homo sapiens
  source 1..52: mol_type = unassigned DNA
tctttgttcagttagacagtggattataccactgagatctggactgccctga

SEQ ID NO: 6505 - RNA, 38 nt, Homo sapiens
  source 1..38: mol_type = unassigned RNA
cgccctcttctgagtccagcggggctgtgatgagccct

SEQ ID NO: 6506 - DNA, 38 bp, Homo sapiens
  source 1..38: mol_type = unassigned DNA
cgccctcttctgagtccagcggggctgtgatgagccct

SEQ ID NO: 6507 - DNA, 38 bp, Homo sapiens
  source 1..38: mol_type = unassigned DNA
agggctcatcacagccccgctggactcagaagagggcg

SEQ ID NO: 6508 - RNA, 31 nt, Homo sapiens
  source 1..31: mol_type = unassigned RNA
atatctaagtaggctctgtgaacatctatcc

SEQ ID NO: 6509 - DNA, 31 bp, Homo sapiens
  source 1..31: mol_type = unassigned DNA
atatctaagtaggctctgtgaacatctatcc

SEQ ID NO: 6510 - DNA, 31 bp, Homo sapiens
  source 1..31: mol_type = unassigned DNA
ggatagatgttcacagagcctacttagatat

SEQ ID NO: 6511 - RNA, 72 nt, Homo sapiens
  source 1..72: mol_type = unassigned RNA
agcatgatcatgactcactgaagcttagaactcccaggctcaagcaacccaagtagctaggttcccaagtag

SEQ ID NO: 6512 - DNA, 72 bp, Homo sapiens
  source 1..72: mol_type = unassigned DNA
agcatgatcatgactcactgaagcttagaactcccaggctcaagcaacccaagtagctaggttcccaagtag

SEQ ID NO: 6513 - DNA, 72 bp, Homo sapiens
  source 1..72: mol_type = unassigned DNA
ctacttgggaacctagctacttgggttgcttgagcctgggagttctaagcttcagtgagtcatgatcatgct

SEQ ID NO: 6514 - RNA, 30 nt, Homo sapiens
  source 1..30: mol_type = unassigned RNA
tgagggctggagaaagcactctgagtctgc

SEQ ID NO: 6515 - DNA, 30 bp, Homo sapiens
  source 1..30: mol_type = unassigned DNA
tgagggctggagaaagcactctgagtctgc

SEQ ID NO: 6516 - DNA, 30 bp, Homo sapiens
  source 1..30: mol_type = unassigned DNA
gcagactcagagtgctttctccagccctca

SEQ ID NO: 6517 - RNA, 53 nt, Homo sapiens
  source 1..53: mol_type = unassigned RNA
aaagatgaccagagacctccaaaaatgttcaagtagagtgttggaaaaataag

SEQ ID NO: 6518 - DNA, 53 bp, Homo sapiens
  source 1..53: mol_type = unassigned DNA
aaagatgaccagagacctccaaaaatgttcaagtagagtgttggaaaaataag

SEQ ID NO: 6519 - DNA, 53 bp, Homo sapiens
  source 1..53: mol_type = unassigned DNA
cttatttttccaacactctacttgaacatttttggaggtctctggtcatcttt

SEQ ID NO: 6520 - RNA, 106 nt, Homo sapiens
  source 1..106: mol_type = unassigned RNA
cttcacaaaataccaattattttgttttatgtaggctccttgaagttcgtggaaggctgtatgagcttctaactcattgtattcctcctgagataataatgaaggt

SEQ ID NO: 6521 - DNA, 106 bp, Homo sapiens
  source 1..106: mol_type = unassigned DNA
cttcacaaaataccaattattttgttttatgtaggctccttgaagttcgtggaaggctgtatgagcttctaactcattgtattcctcctgagataataatgaaggt

SEQ ID NO: 6522 - DNA, 106 bp, Homo sapiens
  source 1..106: mol_type = unassigned DNA
accttcattattatctcaggaggaatacaatgagttagaagctcatacagccttccacgaacttcaaggagcctacataaaacaaaataattggtattttgtgaag

SEQ ID NO: 6523 - RNA, 31 nt, Homo sapiens
  source 1..31: mol_type = unassigned RNA
taattttctttttgacttagtatccggcaca

SEQ ID NO: 6524 - DNA, 31 bp, Homo sapiens
  source 1..31: mol_type = unassigned DNA
taattttctttttgacttagtatccggcaca

SEQ ID NO: 6525 - DNA, 31 bp, Homo sapiens
  source 1..31: mol_type = unassigned DNA
tgtgccggatactaagtcaaaaagaaaatta

SEQ ID NO: 6526 - RNA, 30 nt, Homo sapiens
  source 1..30: mol_type = unassigned RNA
tggacaaccaggctgggacccagggccagc

SEQ ID NO: 6527 - DNA, 30 bp, Homo sapiens
  source 1..30: mol_type = unassigned DNA
tggacaaccaggctgggacccagggccagc

SEQ ID NO: 6528 - DNA, 30 bp, Homo sapiens
  source 1..30: mol_type = unassigned DNA
gctggccctgggtcccagcctggttgtcca

SEQ ID NO: 6529 - RNA, 45 nt, Homo sapiens
  source 1..45: mol_type = unassigned RNA
gaccatagtgcagactcctgttctttaatatattgtattgttttt

SEQ ID NO: 6530 - DNA, 45 bp, Homo sapiens
  source 1..45: mol_type = unassigned DNA
gaccatagtgcagactcctgttctttaatatattgtattgttttt

SEQ ID NO: 6531 - DNA, 45 bp, Homo sapiens
  source 1..45: mol_type = unassigned DNA
aaaaacaatacaatatattaaagaacaggagtctgcactatggtc

SEQ ID NO: 6532 - RNA, 114 nt, Homo sapiens
  source 1..114: mol_type = unassigned RNA
tctcggtgagctttaaaccaggtactgaacagggcagaacacaagctgaaaggaatctgagttcctgctatcccacagagaaggatctgctgatcaggaacacatgctgtgagc

SEQ ID NO: 6533 - DNA, 114 bp, Homo sapiens
  source 1..114: mol_type = unassigned DNA
tctcggtgagctttaaaccaggtactgaacagggcagaacacaagctgaaaggaatctgagttcctgctatcccacagagaaggatctgctgatcaggaacacatgctgtgagc

SEQ ID NO: 6534 - DNA, 114 bp, Homo sapiens
  source 1..114: mol_type = unassigned DNA
gctcacagcatgtgttcctgatcagcagatccttctctgtgggatagcaggaactcagattcctttcagcttgtgttctgccctgttcagtacctggtttaaagctcaccgaga

SEQ ID NO: 6535 - RNA, 29 nt, Homo sapiens
  source 1..29: mol_type = unassigned RNA
ttggcaggagtcgtctgagaaggggactc

SEQ ID NO: 6536 - DNA, 29 bp, Homo sapiens
  source 1..29: mol_type = unassigned DNA
ttggcaggagtcgtctgagaaggggactc

SEQ ID NO: 6537 - DNA, 29 bp, Homo sapiens
  source 1..29: mol_type = unassigned DNA
gagtccccttctcagacgactcctgccaa

SEQ ID NO: 6538 - RNA, 41 nt, Homo sapiens
  source 1..41: mol_type = unassigned RNA
acgtggagagaattttctctgaagagaacgaatatgcagaa

SEQ ID NO: 6539 - DNA, 41 bp, Homo sapiens
  source 1..41: mol_type = unassigned DNA
acgtggagagaattttctctgaagagaacgaatatgcagaa

SEQ ID NO: 6540 - DNA, 41 bp, Homo sapiens
  source 1..41: mol_type = unassigned DNA
ttctgcatattcgttctcttcagagaaaattctctccacgt

SEQ ID NO: 6541 - RNA, 47 nt, Homo sapiens
  source 1..47: mol_type = unassigned RNA
cttttttctttctgctcctctgattgggtaatctcaatgtacctatc

SEQ ID NO: 6542 - DNA, 47 bp, Homo sapiens
  source 1..47: mol_type = unassigned DNA
cttttttctttctgctcctctgattgggtaatctcaatgtacctatc

SEQ ID NO: 6543 - DNA, 47 bp, Homo sapiens
  source 1..47: mol_type = unassigned DNA
gataggtacattgagattacccaatcagaggagcagaaagaaaaaag

SEQ ID NO: 6544 - RNA, 30 nt, Homo sapiens
  source 1..30: mol_type = unassigned RNA
gtgctggggtacaagcagactctgaagcca

SEQ ID NO: 6545 - DNA, 30 bp, Homo sapiens
  source 1..30: mol_type = unassigned DNA
gtgctggggtacaagcagactctgaagcca

SEQ ID NO: 6546 - DNA, 30 bp, Homo sapiens
  source 1..30: mol_type = unassigned DNA
tggcttcagagtctgcttgtaccccagcac

SEQ ID NO: 6547 - RNA, 34 nt, Homo sapiens
  source 1..34: mol_type = unassigned RNA
aatctttagatcatcagattttgcgaagaatttt

SEQ ID NO: 6548 - DNA, 34 bp, Homo sapiens
  source 1..34: mol_type = unassigned DNA
aatctttagatcatcagattttgcgaagaatttt

SEQ ID NO: 6549 - DNA, 34 bp, Homo sapiens
  source 1..34: mol_type = unassigned DNA
aaaattcttcgcaaaatctgatgatctaaagatt

SEQ ID NO: 6550 - RNA, 35 nt, Homo sapiens
  source 1..35: mol_type = unassigned RNA
aacaattagaactctggccaggtgcagtggctcaa

SEQ ID NO: 6551 - DNA, 35 bp, Homo sapiens
  source 1..35: mol_type = unassigned DNA
aacaattagaactctggccaggtgcagtggctcaa

SEQ ID NO: 6552 - DNA, 35 bp, Homo sapiens
  source 1..35: mol_type = unassigned DNA
ttgagccactgcacctggccagagttctaattgtt

SEQ ID NO: 6553 - RNA, 30 nt, Homo sapiens
  source 1..30: mol_type = unassigned RNA
tcaagggcttttcggactgtttgctcaagc

SEQ ID NO: 6554 - DNA, 30 bp, Homo sapiens
  source 1..30: mol_type = unassigned DNA
tcaagggcttttcggactgtttgctcaagc

SEQ ID NO: 6555 - DNA, 30 bp, Homo sapiens
  source 1..30: mol_type = unassigned DNA
gcttgagcaaacagtccgaaaagcccttga

SEQ ID NO: 6556 - RNA, 47 nt, Homo sapiens
  source 1..47: mol_type = unassigned RNA
caaggcactggtgaaattaactgtttccttcatttaccttctccaat

SEQ ID NO: 6557 - DNA, 47 bp, Homo sapiens
  source 1..47: mol_type = unassigned DNA
caaggcactggtgaaattaactgtttccttcatttaccttctccaat

SEQ ID NO: 6558 - DNA, 47 bp, Homo sapiens
  source 1..47: mol_type = unassigned DNA
attggagaaggtaaatgaaggaaacagttaatttcaccagtgccttg

SEQ ID NO: 6559 - RNA, 44 nt, Homo sapiens
  source 1..44: mol_type = unassigned RNA
agctcttgacctgtcccctctggctgcctctgagtctgaatctc

SEQ ID NO: 6560 - DNA, 44 bp, Homo sapiens
  source 1..44: mol_type = unassigned DNA
agctcttgacctgtcccctctggctgcctctgagtctgaatctc

SEQ ID NO: 6561 - DNA, 44 bp, Homo sapiens
  source 1..44: mol_type = unassigned DNA
gagattcagactcagaggcagccagaggggacaggtcaagagct

SEQ ID NO: 6562 - RNA, 32 nt, Homo sapiens
  source 1..32: mol_type = unassigned RNA
gacatcgccagcacgccgcacgagctctaccg

SEQ ID NO: 6563 - DNA, 32 bp, Homo sapiens
  source 1..32: mol_type = unassigned DNA
gacatcgccagcacgccgcacgagctctaccg

SEQ ID NO: 6564 - DNA, 32 bp, Homo sapiens
  source 1..32: mol_type = unassigned DNA
cggtagagctcgtgcggcgtgctggcgatgtc

SEQ ID NO: 6565 - RNA, 31 nt, Homo sapiens
  source 1..31: mol_type = unassigned RNA
cactggtgacctgtgctgctctgacccaccc

SEQ ID NO: 6566 - DNA, 31 bp, Homo sapiens
  source 1..31: mol_type = unassigned DNA
cactggtgacctgtgctgctctgacccaccc

SEQ ID NO: 6567 - DNA, 31 bp, Homo sapiens
  source 1..31: mol_type = unassigned DNA
gggtgggtcagagcagcacaggtcaccagtg

SEQ ID NO: 6568 - RNA, 30 nt, Homo sapiens
  source 1..30: mol_type = unassigned RNA
caaaatgctggactgagccatgcatctacc

SEQ ID NO: 6569 - DNA, 30 bp, Homo sapiens
  source 1..30: mol_type = unassigned DNA
caaaatgctggactgagccatgcatctacc

SEQ ID NO: 6570 - DNA, 30 bp, Homo sapiens
  source 1..30: mol_type = unassigned DNA
ggtagatgcatggctcagtccagcattttg

SEQ ID NO: 6571 - RNA, 39 nt, Homo sapiens
  source 1..39: mol_type = unassigned RNA
cacacacattatgaaatgggttattagtttgtcttgatg

SEQ ID NO: 6572 - DNA, 39 bp, Homo sapiens
  source 1..39: mol_type = unassigned DNA
cacacacattatgaaatgggttattagtttgtcttgatg

SEQ ID NO: 6573 - DNA, 39 bp, Homo sapiens
  source 1..39: mol_type = unassigned DNA
catcaagacaaactaataacccatttcataatgtgtgtg

SEQ ID NO: 6574 - RNA, 30 nt, Homo sapiens
  source 1..30: mol_type = unassigned RNA
acttcttgtaagaatctgtagaagccacgt

SEQ ID NO: 6575 - DNA, 30 bp, Homo sapiens
  source 1..30: mol_type = unassigned DNA
acttcttgtaagaatctgtagaagccacgt

SEQ ID NO: 6576 - DNA, 30 bp, Homo sapiens
  source 1..30: mol_type = unassigned DNA
acgtggcttctacagattcttacaagaagt

SEQ ID NO: 6577 - RNA, 30 nt, Homo sapiens
  source 1..30: mol_type = unassigned RNA
tggtccacccagacttggacagggtgaggc

SEQ ID NO: 6578 - DNA, 30 bp, Homo sapiens
  source 1..30: mol_type = unassigned DNA
tggtccacccagacttggacagggtgaggc

SEQ ID NO: 6579 - DNA, 30 bp, Homo sapiens
  source 1..30: mol_type = unassigned DNA
gcctcaccctgtccaagtctgggtggacca

SEQ ID NO: 6580 - RNA, 41 nt, Homo sapiens
  source 1..41: mol_type = unassigned RNA
atgagtgtggcagttgtagaatgcactgttaaattgagtct

SEQ ID NO: 6581 - DNA, 41 bp, Homo sapiens
  source 1..41: mol_type = unassigned DNA
atgagtgtggcagttgtagaatgcactgttaaattgagtct

SEQ ID NO: 6582 - DNA, 41 bp, Homo sapiens
  source 1..41: mol_type = unassigned DNA
agactcaatttaacagtgcattctacaactgccacactcat

SEQ ID NO: 6583 - RNA, 32 nt, Homo sapiens
  source 1..32: mol_type = unassigned RNA
ccagacacaaccagctctctgttgaggcaagg

SEQ ID NO: 6584 - DNA, 32 bp, Homo sapiens
  source 1..32: mol_type = unassigned DNA
ccagacacaaccagctctctgttgaggcaagg

SEQ ID NO: 6585 - DNA, 32 bp, Homo sapiens
  source 1..32: mol_type = unassigned DNA
ccttgcctcaacagagagctggttgtgtctgg

SEQ ID NO: 6586 - RNA, 91 nt, Homo sapiens
  source 1..91: mol_type = unassigned RNA
ctgcagacttaaattccctgtctgacagctctgaagagagcagggttctttcagcatggtgtttgaactcagaacagacagactgcctcct

SEQ ID NO: 6587 - DNA, 91 bp, Homo sapiens
  source 1..91: mol_type = unassigned DNA
ctgcagacttaaattccctgtctgacagctctgaagagagcagggttctttcagcatggtgtttgaactcagaacagacagactgcctcct

SEQ ID NO: 6588 - DNA, 91 bp, Homo sapiens
  source 1..91: mol_type = unassigned DNA
aggaggcagtctgtctgttctgagttcaaacaccatgctgaaagaaccctgctctcttcagagctgtcagacagggaatttaagtctgcag

SEQ ID NO: 6589 - RNA, 64 nt, Homo sapiens
  source 1..64: mol_type = unassigned RNA
aaaaacctcttccgctgtgtctatgagagaactcacactgcccggccgtcttcctgaaaagttg

SEQ ID NO: 6590 - DNA, 64 bp, Homo sapiens
  source 1..64: mol_type = unassigned DNA
aaaaacctcttccgctgtgtctatgagagaactcacactgcccggccgtcttcctgaaaagttg

SEQ ID NO: 6591 - DNA, 64 bp, Homo sapiens
  source 1..64: mol_type = unassigned DNA
caacttttcaggaagacggccgggcagtgtgagttctctcatagacacagcggaagaggttttt

SEQ ID NO: 6592 - RNA, 30 nt, Homo sapiens
  source 1..30: mol_type = unassigned RNA
cgctcaacgtgctctgcagccccggcatcc

SEQ ID NO: 6593 - DNA, 30 bp, Homo sapiens
  source 1..30: mol_type = unassigned DNA
cgctcaacgtgctctgcagccccggcatcc

SEQ ID NO: 6594 - DNA, 30 bp, Homo sapiens
  source 1..30: mol_type = unassigned DNA
ggatgccggggctgcagagcacgttgagcg

SEQ ID NO: 6595 - RNA, 29 nt, Homo sapiens
  source 1..29: mol_type = unassigned RNA
tgagattccggcaggaaggacataaaaaa

SEQ ID NO: 6596 - DNA, 29 bp, Homo sapiens
  source 1..29: mol_type = unassigned DNA
tgagattccggcaggaaggacataaaaaa

SEQ ID NO: 6597 - DNA, 29 bp, Homo sapiens
  source 1..29: mol_type = unassigned DNA
ttttttatgtccttcctgccggaatctca

SEQ ID NO: 6598 - RNA, 27 nt, Homo sapiens
  source 1..27: mol_type = unassigned RNA
tttatctcctagtagaattcactaaaa

SEQ ID NO: 6599 - DNA, 27 bp, Homo sapiens
  source 1..27: mol_type = unassigned DNA
tttatctcctagtagaattcactaaaa

SEQ ID NO: 6600 - DNA, 27 bp, Homo sapiens
  source 1..27: mol_type = unassigned DNA
ttttagtgaattctactaggagataaa

SEQ ID NO: 6601 - RNA, 83 nt, Homo sapiens
  source 1..83: mol_type = unassigned RNA
gtaagcaccacgtgggcctgagctaggatgattattctctgactgctccgcagggaggttcctgtcccagcttgacccatgct

SEQ ID NO: 6602 - DNA, 83 bp, Homo sapiens
  source 1..83: mol_type = unassigned DNA
gtaagcaccacgtgggcctgagctaggatgattattctctgactgctccgcagggaggttcctgtcccagcttgacccatgct

SEQ ID NO: 6603 - DNA, 83 bp, Homo sapiens
  source 1..83: mol_type = unassigned DNA
agcatgggtcaagctgggacaggaacctccctgcggagcagtcagagaataatcatcctagctcaggcccacgtggtgcttac

SEQ ID NO: 6604 - RNA, 30 nt, Homo sapiens
  source 1..30: mol_type = unassigned RNA
ggcacaggtggtggctggctgtgggatcct

SEQ ID NO: 6605 - DNA, 30 bp, Homo sapiens
  source 1..30: mol_type = unassigned DNA
ggcacaggtggtggctggctgtgggatcct

SEQ ID NO: 6606 - DNA, 30 bp, Homo sapiens
  source 1..30: mol_type = unassigned DNA
aggatcccacagccagccaccacctgtgcc

SEQ ID NO: 6607 - RNA, 32 nt, Homo sapiens
  source 1..32: mol_type = unassigned RNA
tctatagtgttacagctctgacccaggaagtc

SEQ ID NO: 6608 - DNA, 32 bp, Homo sapiens
  source 1..32: mol_type = unassigned DNA
tctatagtgttacagctctgacccaggaagtc

SEQ ID NO: 6609 - DNA, 32 bp, Homo sapiens
  source 1..32: mol_type = unassigned DNA
gacttcctgggtcagagctgtaacactataga

SEQ ID NO: 6610 - RNA, 32 nt, Homo sapiens
  source 1..32: mol_type = unassigned RNA
cagatcatttggccctgcaccgccggaggcat

SEQ ID NO: 6611 - DNA, 32 bp, Homo sapiens
  source 1..32: mol_type = unassigned DNA
cagatcatttggccctgcaccgccggaggcat

SEQ ID NO: 6612 - DNA, 32 bp, Homo sapiens
  source 1..32: mol_type = unassigned DNA
atgcctccggcggtgcagggccaaatgatctg

SEQ ID NO: 6613 - RNA, 37 nt, Homo sapiens
  source 1..37: mol_type = unassigned RNA
caatcagtgcagttggccctgtggttagctggtctgc

SEQ ID NO: 6614 - DNA, 37 bp, Homo sapiens
  source 1..37: mol_type = unassigned DNA
caatcagtgcagttggccctgtggttagctggtctgc

SEQ ID NO: 6615 - DNA, 37 bp, Homo sapiens
  source 1..37: mol_type = unassigned DNA
gcagaccagctaaccacagggccaactgcactgattg

SEQ ID NO: 6616 - RNA, 30 nt, Homo sapiens
  source 1..30: mol_type = unassigned RNA
tgttctctgatgggaggagagagggaactt

SEQ ID NO: 6617 - DNA, 30 bp, Homo sapiens
  source 1..30: mol_type = unassigned DNA
tgttctctgatgggaggagagagggaactt

SEQ ID NO: 6618 - DNA, 30 bp, Homo sapiens
  source 1..30: mol_type = unassigned DNA
aagttccctctctcctcccatcagagaaca

SEQ ID NO: 6619 - RNA, 80 nt, Homo sapiens
  source 1..80: mol_type = unassigned RNA
gcagaacaggttaagaggaagaacgctgacaaacttttccacagttttacctgggaagatgaggaaaaaagggggccggg

SEQ ID NO: 6620 - DNA, 80 bp, Homo sapiens
  source 1..80: mol_type = unassigned DNA
gcagaacaggttaagaggaagaacgctgacaaacttttccacagttttacctgggaagatgaggaaaaaagggggccggg

SEQ ID NO: 6621 - DNA, 80 bp, Homo sapiens
  source 1..80: mol_type = unassigned DNA
cccggcccccttttttcctcatcttcccaggtaaaactgtggaaaagtttgtcagcgttcttcctcttaacctgttctgc

SEQ ID NO: 6622 - RNA, 33 nt, Homo sapiens
  source 1..33: mol_type = unassigned RNA
ctgaagaatttcatgactttgatcagccactgc

SEQ ID NO: 6623 - DNA, 33 bp, Homo sapiens
  source 1..33: mol_type = unassigned DNA
ctgaagaatttcatgactttgatcagccactgc

SEQ ID NO: 6624 - DNA, 33 bp, Homo sapiens
  source 1..33: mol_type = unassigned DNA
gcagtggctgatcaaagtcatgaaattcttcag

SEQ ID NO: 6625 - RNA, 30 nt, Homo sapiens
  source 1..30: mol_type = unassigned RNA
ttatcgctgtctggaaagatggcaacacgt

SEQ ID NO: 6626 - DNA, 30 bp, Homo sapiens
  source 1..30: mol_type = unassigned DNA
ttatcgctgtctggaaagatggcaacacgt

SEQ ID NO: 6627 - DNA, 30 bp, Homo sapiens
  source 1..30: mol_type = unassigned DNA
acgtgttgccatctttccagacagcgataa

SEQ ID NO: 6628 - RNA, 34 nt, Homo sapiens
  source 1..34: mol_type = unassigned RNA
cactttctgtggctctgatcagcgcaggggccag

SEQ ID NO: 6629 - DNA, 34 bp, Homo sapiens
  source 1..34: mol_type = unassigned DNA
cactttctgtggctctgatcagcgcaggggccag

SEQ ID NO: 6630 - DNA, 34 bp, Homo sapiens
  source 1..34: mol_type = unassigned DNA
ctggcccctgcgctgatcagagccacagaaagtg

SEQ ID NO: 6631 - RNA, 160 nt, Homo sapiens
  source 1..160: mol_type = unassigned RNA
aggtattttatatgcattacctgagtctgaacgaaaactacagagttctattcaggatttgtgtgttacctggtgggagaaaggcctgcctgccaaggaagacacaggaaagacagcctttgtcatgttactaaggaggagtctggagactaagacagta

SEQ ID NO: 6632 - DNA, 160 bp, Homo sapiens
  source 1..160: mol_type = unassigned DNA
aggtattttatatgcattacctgagtctgaacgaaaactacagagttctattcaggatttgtgtgttacctggtgggagaaaggcctgcctgccaaggaagacacaggaaagacagcctttgtcatgttactaaggaggagtctggagactaagacagta

SEQ ID NO: 6633 - DNA, 160 bp, Homo sapiens
  source 1..160: mol_type = unassigned DNA
tactgtcttagtctccagactcctccttagtaacatgacaaaggctgtctttcctgtgtcttccttggcaggcaggcctttctcccaccaggtaacacacaaatcctgaatagaactctgtagttttcgttcagactcaggtaatgcatataaaatacct

SEQ ID NO: 6634 - RNA, 24 nt, Homo sapiens
  source 1..24: mol_type = unassigned RNA
atcctgcactggtacaactcacct

SEQ ID NO: 6635 - DNA, 24 bp, Homo sapiens
  source 1..24: mol_type = unassigned DNA
atcctgcactggtacaactcacct

SEQ ID NO: 6636 - DNA, 24 bp, Homo sapiens
  source 1..24: mol_type = unassigned DNA
aggtgagttgtaccagtgcaggat

SEQ ID NO: 6637 - RNA, 54 nt, Homo sapiens
  source 1..54: mol_type = unassigned RNA
tcactgatgactgtggcctgggcctcagctacgactcagaccactgtgagaagg

SEQ ID NO: 6638 - DNA, 54 bp, Homo sapiens
  source 1..54: mol_type = unassigned DNA
tcactgatgactgtggcctgggcctcagctacgactcagaccactgtgagaagg

SEQ ID NO: 6639 - DNA, 54 bp, Homo sapiens
  source 1..54: mol_type = unassigned DNA
ccttctcacagtggtctgagtcgtagctgaggcccaggccacagtcatcagtga

SEQ ID NO: 6640 - RNA, 56 nt, Homo sapiens
  source 1..56: mol_type = unassigned RNA
acccctttacattgagaaaacattctgaaatttgccttggtagaactcagctccta

SEQ ID NO: 6641 - DNA, 56 bp, Homo sapiens
  source 1..56: mol_type = unassigned DNA
acccctttacattgagaaaacattctgaaatttgccttggtagaactcagctccta

SEQ ID NO: 6642 - DNA, 56 bp, Homo sapiens
  source 1..56: mol_type = unassigned DNA
taggagctgagttctaccaaggcaaatttcagaatgttttctcaatgtaaaggggt

SEQ ID NO: 6643 - RNA, 128 nt, Homo sapiens
  source 1..128: mol_type = unassigned RNA
gtggaaagtcccagggagtggcagatgtaggccaagtttgggtcatgtacacatccctgaagcactgtgcccagggcaatgatgtttcatgattggctgagcctcagtaagggaccacctctgtgcct

SEQ ID NO: 6644 - DNA, 128 bp, Homo sapiens
  source 1..128: mol_type = unassigned DNA
gtggaaagtcccagggagtggcagatgtaggccaagtttgggtcatgtacacatccctgaagcactgtgcccagggcaatgatgtttcatgattggctgagcctcagtaagggaccacctctgtgcct

SEQ ID NO: 6645 - DNA, 128 bp, Homo sapiens
  source 1..128: mol_type = unassigned DNA
aggcacagaggtggtcccttactgaggctcagccaatcatgaaacatcattgccctgggcacagtgcttcagggatgtgtacatgacccaaacttggcctacatctgccactccctgggactttccac

SEQ ID NO: 6646 - RNA, 90 nt, Homo sapiens
  source 1..90: mol_type = unassigned RNA
tgtgcacctgtaactcccagctactccagaggctgaggtgggaagactgctcaagcccgggaggtcaaagctgcagtgagagaccttgtc

SEQ ID NO: 6647 - DNA, 90 bp, Homo sapiens
  source 1..90: mol_type = unassigned DNA
tgtgcacctgtaactcccagctactccagaggctgaggtgggaagactgctcaagcccgggaggtcaaagctgcagtgagagaccttgtc

SEQ ID NO: 6648 - DNA, 90 bp, Homo sapiens
  source 1..90: mol_type = unassigned DNA
gacaaggtctctcactgcagctttgacctcccgggcttgagcagtcttcccacctcagcctctggagtagctgggagttacaggtgcaca

SEQ ID NO: 6649 - RNA, 26 nt, Homo sapiens
  source 1..26: mol_type = unassigned RNA
ttacagatgagccaactgaaggctag

SEQ ID NO: 6650 - DNA, 26 bp, Homo sapiens
  source 1..26: mol_type = unassigned DNA
ttacagatgagccaactgaaggctag

SEQ ID NO: 6651 - DNA, 26 bp, Homo sapiens
  source 1..26: mol_type = unassigned DNA
ctagccttcagttggctcatctgtaa

SEQ ID NO: 6652 - RNA, 32 nt, Homo sapiens
  source 1..32: mol_type = unassigned RNA
ccttcaattgcatggtaggactcacactggag

SEQ ID NO: 6653 - DNA, 32 bp, Homo sapiens
  source 1..32: mol_type = unassigned DNA
ccttcaattgcatggtaggactcacactggag

SEQ ID NO: 6654 - DNA, 32 bp, Homo sapiens
  source 1..32: mol_type = unassigned DNA
ctccagtgtgagtcctaccatgcaattgaagg

SEQ ID NO: 6655 - RNA, 31 nt, Homo sapiens
  source 1..31: mol_type = unassigned RNA
gttgaccctctggaggagagcgctgtggagc

SEQ ID NO: 6656 - DNA, 31 bp, Homo sapiens
  source 1..31: mol_type = unassigned DNA
gttgaccctctggaggagagcgctgtggagc

SEQ ID NO: 6657 - DNA, 31 bp, Homo sapiens
  source 1..31: mol_type = unassigned DNA
gctccacagcgctctcctccagagggtcaac

SEQ ID NO: 6658 - RNA, 99 nt, Homo sapiens
  source 1..99: mol_type = unassigned RNA
aatcttgctctagactagtagttctcacacttgagtttgcatcagaatcacctggagagcttattaaagcaaattgctgggctgcactctcagagtttt

SEQ ID NO: 6659 - DNA, 99 bp, Homo sapiens
  source 1..99: mol_type = unassigned DNA
aatcttgctctagactagtagttctcacacttgagtttgcatcagaatcacctggagagcttattaaagcaaattgctgggctgcactctcagagtttt

SEQ ID NO: 6660 - DNA, 99 bp, Homo sapiens
  source 1..99: mol_type = unassigned DNA
aaaactctgagagtgcagcccagcaatttgctttaataagctctccaggtgattctgatgcaaactcaagtgtgagaactactagtctagagcaagatt

SEQ ID NO: 6661 - RNA, 31 nt, Homo sapiens
  source 1..31: mol_type = unassigned RNA
gctgatcttgctccgtctcttcattctgtga

SEQ ID NO: 6662 - DNA, 31 bp, Homo sapiens
  source 1..31: mol_type = unassigned DNA
gctgatcttgctccgtctcttcattctgtga

SEQ ID NO: 6663 - DNA, 31 bp, Homo sapiens
  source 1..31: mol_type = unassigned DNA
tcacagaatgaagagacggagcaagatcagc

SEQ ID NO: 6664 - RNA, 33 nt, Homo sapiens
  source 1..33: mol_type = unassigned RNA
ttgcacaaaactccagaacaaaactcgtacatt

SEQ ID NO: 6665 - DNA, 33 bp, Homo sapiens
  source 1..33: mol_type = unassigned DNA
ttgcacaaaactccagaacaaaactcgtacatt

SEQ ID NO: 6666 - DNA, 33 bp, Homo sapiens
  source 1..33: mol_type = unassigned DNA
aatgtacgagttttgttctggagttttgtgcaa

SEQ ID NO: 6667 - RNA, 73 nt, Homo sapiens
  source 1..73: mol_type = unassigned RNA
ctcttatcctacttagcactagtgctgttcaaggtagaactcacagcataagaattcactctgaaacatagaa

SEQ ID NO: 6668 - DNA, 73 bp, Homo sapiens
  source 1..73: mol_type = unassigned DNA
ctcttatcctacttagcactagtgctgttcaaggtagaactcacagcataagaattcactctgaaacatagaa

SEQ ID NO: 6669 - DNA, 73 bp, Homo sapiens
  source 1..73: mol_type = unassigned DNA
ttctatgtttcagagtgaattcttatgctgtgagttctaccttgaacagcactagtgctaagtaggataagag

SEQ ID NO: 6670 - RNA, 33 nt, Homo sapiens
  source 1..33: mol_type = unassigned RNA
cacctcacatctcttgctctcccccaggtctcc

SEQ ID NO: 6671 - DNA, 33 bp, Homo sapiens
  source 1..33: mol_type = unassigned DNA
cacctcacatctcttgctctcccccaggtctcc

SEQ ID NO: 6672 - DNA, 33 bp, Homo sapiens
  source 1..33: mol_type = unassigned DNA
ggagacctgggggagagcaagagatgtgaggtg

SEQ ID NO: 6673 - RNA, 31 nt, Homo sapiens
  source 1..31: mol_type = unassigned RNA
aatgcaccttcttggccagcttcgaaaaccc

SEQ ID NO: 6674 - DNA, 31 bp, Homo sapiens
  source 1..31: mol_type = unassigned DNA
aatgcaccttcttggccagcttcgaaaaccc

SEQ ID NO: 6675 - DNA, 31 bp, Homo sapiens
  source 1..31: mol_type = unassigned DNA
gggttttcgaagctggccaagaaggtgcatt

SEQ ID NO: 6676 - RNA, 62 nt, Homo sapiens
  source 1..62: mol_type = unassigned RNA
gcttcactagcttccttgattctgaggcttctgggctgagccaggctactgtcttctcttgt

SEQ ID NO: 6677 - DNA, 62 bp, Homo sapiens
  source 1..62: mol_type = unassigned DNA
gcttcactagcttccttgattctgaggcttctgggctgagccaggctactgtcttctcttgt

SEQ ID NO: 6678 - DNA, 62 bp, Homo sapiens
  source 1..62: mol_type = unassigned DNA
acaagagaagacagtagcctggctcagcccagaagcctcagaatcaaggaagctagtgaagc

SEQ ID NO: 6679 - RNA, 57 nt, Homo sapiens
  source 1..57: mol_type = unassigned RNA
cacgcctgtctctgcctctgggtcatattgcctctgcctcttctgcctgtaccagtg

SEQ ID NO: 6680 - DNA, 57 bp, Homo sapiens
  source 1..57: mol_type = unassigned DNA
cacgcctgtctctgcctctgggtcatattgcctctgcctcttctgcctgtaccagtg

SEQ ID NO: 6681 - DNA, 57 bp, Homo sapiens
  source 1..57: mol_type = unassigned DNA
cactggtacaggcagaagaggcagaggcaatatgacccagaggcagagacaggcgtg

SEQ ID NO: 6682 - RNA, 96 nt, Homo sapiens
  source 1..96: mol_type = unassigned RNA
ctcttccaacttaacagattgagtcggttacttcacaaacacagatttgctgaagctgagagttttgccattcagtttggactagatgttgaggta

SEQ ID NO: 6683 - DNA, 96 bp, Homo sapiens
  source 1..96: mol_type = unassigned DNA
ctcttccaacttaacagattgagtcggttacttcacaaacacagatttgctgaagctgagagttttgccattcagtttggactagatgttgaggta

SEQ ID NO: 6684 - DNA, 96 bp, Homo sapiens
  source 1..96: mol_type = unassigned DNA
tacctcaacatctagtccaaactgaatggcaaaactctcagcttcagcaaatctgtgtttgtgaagtaaccgactcaatctgttaagttggaagag

SEQ ID NO: 6685 - RNA, 52 nt, Homo sapiens
  source 1..52: mol_type = unassigned RNA
tatttcaatggtaagaacacacagaactgataagaacattggaaggattaca

SEQ ID NO: 6686 - DNA, 52 bp, Homo sapiens
  source 1..52: mol_type = unassigned DNA
tatttcaatggtaagaacacacagaactgataagaacattggaaggattaca

SEQ ID NO: 6687 - DNA, 52 bp, Homo sapiens
  source 1..52: mol_type = unassigned DNA
tgtaatccttccaatgttcttatcagttctgtgtgttcttaccattgaaata

SEQ ID NO: 6688 - RNA, 23 nt, Homo sapiens
  source 1..23: mol_type = unassigned RNA
ttagttaatagtttgtctctttg

SEQ ID NO: 6689 - DNA, 23 bp, Homo sapiens
  source 1..23: mol_type = unassigned DNA
ttagttaatagtttgtctctttg

SEQ ID NO: 6690 - DNA, 23 bp, Homo sapiens
  source 1..23: mol_type = unassigned DNA
caaagagacaaactattaactaa

SEQ ID NO: 6691 - RNA, 62 nt, Homo sapiens
  source 1..62: mol_type = unassigned RNA
atcagacttcctgtgatgctgaagcaggcagaactgaggatgctctgttggatggctcttgt

SEQ ID NO: 6692 - DNA, 62 bp, Homo sapiens
  source 1..62: mol_type = unassigned DNA
atcagacttcctgtgatgctgaagcaggcagaactgaggatgctctgttggatggctcttgt

SEQ ID NO: 6693 - DNA, 62 bp, Homo sapiens
  source 1..62: mol_type = unassigned DNA
acaagagccatccaacagagcatcctcagttctgcctgcttcagcatcacaggaagtctgat

SEQ ID NO: 6694 - RNA, 91 nt, Homo sapiens
  source 1..91: mol_type = unassigned RNA
gggtgtcacacccttcacacgccaccatcgctcttgcctcttcttcttgtcatggcttctctctggcccacgcttctgcctcccacgtcca

SEQ ID NO: 6695 - DNA, 91 bp, Homo sapiens
  source 1..91: mol_type = unassigned DNA
gggtgtcacacccttcacacgccaccatcgctcttgcctcttcttcttgtcatggcttctctctggcccacgcttctgcctcccacgtcca

SEQ ID NO: 6696 - DNA, 91 bp, Homo sapiens
  source 1..91: mol_type = unassigned DNA
tggacgtgggaggcagaagcgtgggccagagagaagccatgacaagaagaagaggcaagagcgatggtggcgtgtgaagggtgtgacaccc

SEQ ID NO: 6697 - RNA, 27 nt, Homo sapiens
  source 1..27: mol_type = unassigned RNA
aacaggctgtaacctactcttgtacca

SEQ ID NO: 6698 - DNA, 27 bp, Homo sapiens
  source 1..27: mol_type = unassigned DNA
aacaggctgtaacctactcttgtacca

SEQ ID NO: 6699 - DNA, 27 bp, Homo sapiens
  source 1..27: mol_type = unassigned DNA
tggtacaagagtaggttacagcctgtt

SEQ ID NO: 6700 - RNA, 29 nt, Homo sapiens
  source 1..29: mol_type = unassigned RNA
gtcagatctgatgcctgacatggagccag

SEQ ID NO: 6701 - DNA, 29 bp, Homo sapiens
  source 1..29: mol_type = unassigned DNA
gtcagatctgatgcctgacatggagccag

SEQ ID NO: 6702 - DNA, 29 bp, Homo sapiens
  source 1..29: mol_type = unassigned DNA
ctggctccatgtcaggcatcagatctgac

SEQ ID NO: 6703 - RNA, 33 nt, Homo sapiens
  source 1..33: mol_type = unassigned RNA
atttttaaaagttatttatggcctgggaaacaa

SEQ ID NO: 6704 - DNA, 33 bp, Homo sapiens
  source 1..33: mol_type = unassigned DNA
atttttaaaagttatttatggcctgggaaacaa

SEQ ID NO: 6705 - DNA, 33 bp, Homo sapiens
  source 1..33: mol_type = unassigned DNA
ttgtttcccaggccataaataacttttaaaaat

SEQ ID NO: 6706 - RNA, 28 nt, Homo sapiens
  source 1..28: mol_type = unassigned RNA
tttgtaaatggtagaaatcaggattaga

SEQ ID NO: 6707 - DNA, 28 bp, Homo sapiens
  source 1..28: mol_type = unassigned DNA
tttgtaaatggtagaaatcaggattaga

SEQ ID NO: 6708 - DNA, 28 bp, Homo sapiens
  source 1..28: mol_type = unassigned DNA
tctaatcctgatttctaccatttacaaa

SEQ ID NO: 6709 - RNA, 95 nt, Homo sapiens
  source 1..95: mol_type = unassigned RNA
aaggctgaggcccaggggagccaatgatgcaggtcctggtctgagtccaaaggcctgagagccagaacgctgacatctagctccaaggagagagc

SEQ ID NO: 6710 - DNA, 95 bp, Homo sapiens
  source 1..95: mol_type = unassigned DNA
aaggctgaggcccaggggagccaatgatgcaggtcctggtctgagtccaaaggcctgagagccagaacgctgacatctagctccaaggagagagc

SEQ ID NO: 6711 - DNA, 95 bp, Homo sapiens
  source 1..95: mol_type = unassigned DNA
gctctctccttggagctagatgtcagcgttctggctctcaggcctttggactcagaccaggacctgcatcattggctcccctgggcctcagcctt

SEQ ID NO: 6712 - RNA, 37 nt, Homo sapiens
  source 1..37: mol_type = unassigned RNA
atattccttccatgtaatgatgaaaaggatacagaat

SEQ ID NO: 6713 - DNA, 37 bp, Homo sapiens
  source 1..37: mol_type = unassigned DNA
atattccttccatgtaatgatgaaaaggatacagaat

SEQ ID NO: 6714 - DNA, 37 bp, Homo sapiens
  source 1..37: mol_type = unassigned DNA
attctgtatccttttcatcattacatggaaggaatat

SEQ ID NO: 6715 - RNA, 28 nt, Homo sapiens
  source 1..28: mol_type = unassigned RNA
gaagacctgggcctgctgaatgggccac

SEQ ID NO: 6716 - DNA, 28 bp, Homo sapiens
  source 1..28: mol_type = unassigned DNA
gaagacctgggcctgctgaatgggccac

SEQ ID NO: 6717 - DNA, 28 bp, Homo sapiens
  source 1..28: mol_type = unassigned DNA
gtggcccattcagcaggcccaggtcttc

SEQ ID NO: 6718 - RNA, 30 nt, Homo sapiens
  source 1..30: mol_type = unassigned RNA
gcgccaaccagccttcctgctctgctctcc

SEQ ID NO: 6719 - DNA, 30 bp, Homo sapiens
  source 1..30: mol_type = unassigned DNA
gcgccaaccagccttcctgctctgctctcc

SEQ ID NO: 6720 - DNA, 30 bp, Homo sapiens
  source 1..30: mol_type = unassigned DNA
ggagagcagagcaggaaggctggttggcgc

SEQ ID NO: 6721 - RNA, 55 nt, Homo sapiens
  source 1..55: mol_type = unassigned RNA
cctcactctgagtggcaggcagagaaccaaagctgcttcgctgctctccagggag

SEQ ID NO: 6722 - DNA, 55 bp, Homo sapiens
  source 1..55: mol_type = unassigned DNA
cctcactctgagtggcaggcagagaaccaaagctgcttcgctgctctccagggag

SEQ ID NO: 6723 - DNA, 55 bp, Homo sapiens
  source 1..55: mol_type = unassigned DNA
ctccctggagagcagcgaagcagctttggttctctgcctgccactcagagtgagg

SEQ ID NO: 6724 - RNA, 24 nt, Homo sapiens
  source 1..24: mol_type = unassigned RNA
aatggaactggtataattagcttc

SEQ ID NO: 6725 - DNA, 24 bp, Homo sapiens
  source 1..24: mol_type = unassigned DNA
aatggaactggtataattagcttc

SEQ ID NO: 6726 - DNA, 24 bp, Homo sapiens
  source 1..24: mol_type = unassigned DNA
gaagctaattataccagttccatt

SEQ ID NO: 6727 - RNA, 26 nt, Homo sapiens
  source 1..26: mol_type = unassigned RNA
agttccccagatcaaggaggggaaac

SEQ ID NO: 6728 - DNA, 26 bp, Homo sapiens
  source 1..26: mol_type = unassigned DNA
agttccccagatcaaggaggggaaac

SEQ ID NO: 6729 - DNA, 26 bp, Homo sapiens
  source 1..26: mol_type = unassigned DNA
gtttcccctccttgatctggggaact

SEQ ID NO: 6730 - RNA, 161 nt, Homo sapiens
  source 1..161: mol_type = unassigned RNA
tccatttcctgtgaaagcactgtacggactggaagaatacgacactcaggatgggatcgccataaacctcctgccgctgctgttttctcaggactttgcaaaagatgggggtctggtgacctcacaggaatcaggccaaaagtcagtatagtttttctttt

SEQ ID NO: 6731 - DNA, 161 bp, Homo sapiens
  source 1..161: mol_type = unassigned DNA
tccatttcctgtgaaagcactgtacggactggaagaatacgacactcaggatgggatcgccataaacctcctgccgctgctgttttctcaggactttgcaaaagatgggggtctggtgacctcacaggaatcaggccaaaagtcagtatagtttttctttt

SEQ ID NO: 6732 - DNA, 161 bp, Homo sapiens
  source 1..161: mol_type = unassigned DNA
aaaagaaaaactatactgacttttggcctgattcctgtgaggtcaccagacccccatcttttgcaaagtcctgagaaaacagcagcggcaggaggtttatggcgatcccatcctgagtgtcgtattcttccagtccgtacagtgctttcacaggaaatgga

SEQ ID NO: 6733 - RNA, 26 nt, Homo sapiens
  source 1..26: mol_type = unassigned RNA
gcgacagactgtgtcctctttcccac

SEQ ID NO: 6734 - DNA, 26 bp, Homo sapiens
  source 1..26: mol_type = unassigned DNA
gcgacagactgtgtcctctttcccac

SEQ ID NO: 6735 - DNA, 26 bp, Homo sapiens
  source 1..26: mol_type = unassigned DNA
gtgggaaagaggacacagtctgtcgc

SEQ ID NO: 6736 - RNA, 32 nt, Homo sapiens
  source 1..32: mol_type = unassigned RNA
cagagccatgggagcgaaaagagactgctgcg

SEQ ID NO: 6737 - DNA, 32 bp, Homo sapiens
  source 1..32: mol_type = unassigned DNA
cagagccatgggagcgaaaagagactgctgcg

SEQ ID NO: 6738 - DNA, 32 bp, Homo sapiens
  source 1..32: mol_type = unassigned DNA
cgcagcagtctcttttcgctcccatggctctg

SEQ ID NO: 6739 - RNA, 43 nt, Homo sapiens
  source 1..43: mol_type = unassigned RNA
tttttttctttcggcaccatgactatatcaacctactacctct

SEQ ID NO: 6740 - DNA, 43 bp, Homo sapiens
  source 1..43: mol_type = unassigned DNA
tttttttctttcggcaccatgactatatcaacctactacctct

SEQ ID NO: 6741 - DNA, 43 bp, Homo sapiens
  source 1..43: mol_type = unassigned DNA
agaggtagtaggttgatatagtcatggtgccgaaagaaaaaaa

SEQ ID NO: 6742 - RNA, 30 nt, Homo sapiens
  source 1..30: mol_type = unassigned RNA
agcagacaggacgtgggagagctcgggaga

SEQ ID NO: 6743 - DNA, 30 bp, Homo sapiens
  source 1..30: mol_type = unassigned DNA
agcagacaggacgtgggagagctcgggaga

SEQ ID NO: 6744 - DNA, 30 bp, Homo sapiens
  source 1..30: mol_type = unassigned DNA
tctcccgagctctcccacgtcctgtctgct

SEQ ID NO: 6745 - RNA, 27 nt, Homo sapiens
  source 1..27: mol_type = unassigned RNA
gcatccgtgccggggtcgggaggagcc

SEQ ID NO: 6746 - DNA, 27 bp, Homo sapiens
  source 1..27: mol_type = unassigned DNA
gcatccgtgccggggtcgggaggagcc

SEQ ID NO: 6747 - DNA, 27 bp, Homo sapiens
  source 1..27: mol_type = unassigned DNA
ggctcctcccgaccccggcacggatgc

SEQ ID NO: 6748 - RNA, 117 nt, Homo sapiens
  source 1..117: mol_type = unassigned RNA
ggaaacccctaggagtctcttgtctcactgcctgtattaatctgtgggaagaaaaaacacacacacacaggttgaactcacacttcctcttcttaacctgtagttttcttggtctaa

SEQ ID NO: 6749 - DNA, 117 bp, Homo sapiens
  source 1..117: mol_type = unassigned DNA
ggaaacccctaggagtctcttgtctcactgcctgtattaatctgtgggaagaaaaaacacacacacacaggttgaactcacacttcctcttcttaacctgtagttttcttggtctaa

SEQ ID NO: 6750 - DNA, 117 bp, Homo sapiens
  source 1..117: mol_type = unassigned DNA
ttagaccaagaaaactacaggttaagaagaggaagtgtgagttcaacctgtgtgtgtgtgttttttcttcccacagattaatacaggcagtgagacaagagactcctaggggtttcc

SEQ ID NO: 6751 - RNA, 60 nt, Homo sapiens
  source 1..60: mol_type = unassigned RNA
ggaaagtgatgggccagatgacagcagaccagaatctgcaagtgactctgatacataaag

SEQ ID NO: 6752 - DNA, 60 bp, Homo sapiens
  source 1..60: mol_type = unassigned DNA
ggaaagtgatgggccagatgacagcagaccagaatctgcaagtgactctgatacataaag

SEQ ID NO: 6753 - DNA, 60 bp, Homo sapiens
  source 1..60: mol_type = unassigned DNA
ctttatgtatcagagtcacttgcagattctggtctgctgtcatctggcccatcactttcc

SEQ ID NO: 6754 - RNA, 106 nt, Homo sapiens
  source 1..106: mol_type = unassigned RNA
gtcttcctcccatttctgtggagggtgggggagaggctcctgggcccaccaggttgtggggaggatgttagtttgatcggcagggaaattgggaggcccaggcagc

SEQ ID NO: 6755 - DNA, 106 bp, Homo sapiens
  source 1..106: mol_type = unassigned DNA
gtcttcctcccatttctgtggagggtgggggagaggctcctgggcccaccaggttgtggggaggatgttagtttgatcggcagggaaattgggaggcccaggcagc

SEQ ID NO: 6756 - DNA, 106 bp, Homo sapiens
  source 1..106: mol_type = unassigned DNA
gctgcctgggcctcccaatttccctgccgatcaaactaacatcctccccacaacctggtgggcccaggagcctctcccccaccctccacagaaatgggaggaagac

SEQ ID NO: 6757 - RNA, 31 nt, Homo sapiens
  source 1..31: mol_type = unassigned RNA
tgggtcagctgaccaggtagaggattcaaga

SEQ ID NO: 6758 - DNA, 31 bp, Homo sapiens
  source 1..31: mol_type = unassigned DNA
tgggtcagctgaccaggtagaggattcaaga

SEQ ID NO: 6759 - DNA, 31 bp, Homo sapiens
  source 1..31: mol_type = unassigned DNA
tcttgaatcctctacctggtcagctgaccca

SEQ ID NO: 6760 - RNA, 30 nt, Homo sapiens
  source 1..30: mol_type = unassigned RNA
acattattggaactggtacaagtcactgtg

SEQ ID NO: 6761 - DNA, 30 bp, Homo sapiens
  source 1..30: mol_type = unassigned DNA
acattattggaactggtacaagtcactgtg

SEQ ID NO: 6762 - DNA, 30 bp, Homo sapiens
  source 1..30: mol_type = unassigned DNA
cacagtgacttgtaccagttccaataatgt

SEQ ID NO: 6763 - RNA, 66 nt, Homo sapiens
  source 1..66: mol_type = unassigned RNA
tcaaactggtgaatgatgaaacctagatttgaaactctgatccagacatagggagaggtctgcttt

SEQ ID NO: 6764 - DNA, 66 bp, Homo sapiens
  source 1..66: mol_type = unassigned DNA
tcaaactggtgaatgatgaaacctagatttgaaactctgatccagacatagggagaggtctgcttt

SEQ ID NO: 6765 - DNA, 66 bp, Homo sapiens
  source 1..66: mol_type = unassigned DNA
aaagcagacctctccctatgtctggatcagagtttcaaatctaggtttcatcattcaccagtttga

SEQ ID NO: 6766 - RNA, 70 nt, Homo sapiens
  source 1..70: mol_type = unassigned RNA
gagtttctacatctggccaaattttctgtctggatacagatactgtatctcattgccctggcttctcctt

SEQ ID NO: 6767 - DNA, 70 bp, Homo sapiens
  source 1..70: mol_type = unassigned DNA
gagtttctacatctggccaaattttctgtctggatacagatactgtatctcattgccctggcttctcctt

SEQ ID NO: 6768 - DNA, 70 bp, Homo sapiens
  source 1..70: mol_type = unassigned DNA
aaggagaagccagggcaatgagatacagtatctgtatccagacagaaaatttggccagatgtagaaactc

SEQ ID NO: 6769 - RNA, 29 nt, Homo sapiens
  source 1..29: mol_type = unassigned RNA
ttttagtgcaatgaccagatgagaggctt

SEQ ID NO: 6770 - DNA, 29 bp, Homo sapiens
  source 1..29: mol_type = unassigned DNA
ttttagtgcaatgaccagatgagaggctt

SEQ ID NO: 6771 - DNA, 29 bp, Homo sapiens
  source 1..29: mol_type = unassigned DNA
aagcctctcatctggtcattgcactaaaa

SEQ ID NO: 6772 - RNA, 45 nt, Homo sapiens
  source 1..45: mol_type = unassigned RNA
ctcatgtcactggtagcatttaaactggagccgaatgactatgag

SEQ ID NO: 6773 - DNA, 45 bp, Homo sapiens
  source 1..45: mol_type = unassigned DNA
ctcatgtcactggtagcatttaaactggagccgaatgactatgag

SEQ ID NO: 6774 - DNA, 45 bp, Homo sapiens
  source 1..45: mol_type = unassigned DNA
ctcatagtcattcggctccagtttaaatgctaccagtgacatgag

SEQ ID NO: 6775 - RNA, 30 nt, Homo sapiens
  source 1..30: mol_type = unassigned RNA
agtgagatgcaaattcattttccaggtccc

SEQ ID NO: 6776 - DNA, 30 bp, Homo sapiens
  source 1..30: mol_type = unassigned DNA
agtgagatgcaaattcattttccaggtccc

SEQ ID NO: 6777 - DNA, 30 bp, Homo sapiens
  source 1..30: mol_type = unassigned DNA
gggacctggaaaatgaatttgcatctcact

SEQ ID NO: 6778 - RNA, 140 nt, Homo sapiens
  source 1..140: mol_type = unassigned RNA
cctttttcttcactaaattaaaaacggctggttatcaggcagtgaaacgttggacaaagaaagtagatgtattttctgttgacattcttttggtgcccattcacctgggagtacactggtgtctagctgtgagtacccct

SEQ ID NO: 6779 - DNA, 140 bp, Homo sapiens
  source 1..140: mol_type = unassigned DNA
cctttttcttcactaaattaaaaacggctggttatcaggcagtgaaacgttggacaaagaaagtagatgtattttctgttgacattcttttggtgcccattcacctgggagtacactggtgtctagctgtgagtacccct

SEQ ID NO: 6780 - DNA, 140 bp, Homo sapiens
  source 1..140: mol_type = unassigned DNA
aggggtactcacagctagacaccagtgtactcccaggtgaatgggcaccaaaagaatgtcaacagaaaatacatctactttctttgtccaacgtttcactgcctgataaccagccgtttttaatttagtgaagaaaaagg

SEQ ID NO: 6781 - RNA, 32 nt, Homo sapiens
  source 1..32: mol_type = unassigned RNA
taccactcatggatctgaatcagatggtgagt

SEQ ID NO: 6782 - DNA, 32 bp, Homo sapiens
  source 1..32: mol_type = unassigned DNA
taccactcatggatctgaatcagatggtgagt

SEQ ID NO: 6783 - DNA, 32 bp, Homo sapiens
  source 1..32: mol_type = unassigned DNA
actcaccatctgattcagatccatgagtggta

SEQ ID NO: 6784 - RNA, 33 nt, Homo sapiens
  source 1..33: mol_type = unassigned RNA
ggcctaggaggttggtcaggttccgttggttta

SEQ ID NO: 6785 - DNA, 33 bp, Homo sapiens
  source 1..33: mol_type = unassigned DNA
ggcctaggaggttggtcaggttccgttggttta

SEQ ID NO: 6786 - DNA, 33 bp, Homo sapiens
  source 1..33: mol_type = unassigned DNA
taaaccaacggaacctgaccaacctcctaggcc

SEQ ID NO: 6787 - RNA, 64 nt, Homo sapiens
  source 1..64: mol_type = unassigned RNA
aaaagatgaagcagggtaaatagtggattgctgatgatgtatgttttctgaacatttacttata

SEQ ID NO: 6788 - DNA, 64 bp, Homo sapiens
  source 1..64: mol_type = unassigned DNA
aaaagatgaagcagggtaaatagtggattgctgatgatgtatgttttctgaacatttacttata

SEQ ID NO: 6789 - DNA, 64 bp, Homo sapiens
  source 1..64: mol_type = unassigned DNA
tataagtaaatgttcagaaaacatacatcatcagcaatccactatttaccctgcttcatctttt

SEQ ID NO: 6790 - RNA, 26 nt, Homo sapiens
  source 1..26: mol_type = unassigned RNA
aaattatgaaactttccccctcatta

SEQ ID NO: 6791 - DNA, 26 bp, Homo sapiens
  source 1..26: mol_type = unassigned DNA
aaattatgaaactttccccctcatta

SEQ ID NO: 6792 - DNA, 26 bp, Homo sapiens
  source 1..26: mol_type = unassigned DNA
taatgagggggaaagtttcataattt

SEQ ID NO: 6793 - RNA, 33 nt, Homo sapiens
  source 1..33: mol_type = unassigned RNA
gctaggacggccctgccctccgggaccagagag

SEQ ID NO: 6794 - DNA, 33 bp, Homo sapiens
  source 1..33: mol_type = unassigned DNA
gctaggacggccctgccctccgggaccagagag

SEQ ID NO: 6795 - DNA, 33 bp, Homo sapiens
  source 1..33: mol_type = unassigned DNA
ctctctggtcccggagggcagggccgtcctagc

SEQ ID NO: 6796 - RNA, 30 nt, Homo sapiens
  source 1..30: mol_type = unassigned RNA
cagctgtgtctggggtgaacaagatgtgct

SEQ ID NO: 6797 - DNA, 30 bp, Homo sapiens
  source 1..30: mol_type = unassigned DNA
cagctgtgtctggggtgaacaagatgtgct

SEQ ID NO: 6798 - DNA, 30 bp, Homo sapiens
  source 1..30: mol_type = unassigned DNA
agcacatcttgttcaccccagacacagctg

SEQ ID NO: 6799 - RNA, 30 nt, Homo sapiens
  source 1..30: mol_type = unassigned RNA
gactgcactgagagctctaggagacgctgc

SEQ ID NO: 6800 - DNA, 30 bp, Homo sapiens
  source 1..30: mol_type = unassigned DNA
gactgcactgagagctctaggagacgctgc

SEQ ID NO: 6801 - DNA, 30 bp, Homo sapiens
  source 1..30: mol_type = unassigned DNA
gcagcgtctcctagagctctcagtgcagtc

SEQ ID NO: 6802 - RNA, 31 nt, Homo sapiens
  source 1..31: mol_type = unassigned RNA
gctgcacgggccccaagcactctgactgcct

SEQ ID NO: 6803 - DNA, 31 bp, Homo sapiens
  source 1..31: mol_type = unassigned DNA
gctgcacgggccccaagcactctgactgcct

SEQ ID NO: 6804 - DNA, 31 bp, Homo sapiens
  source 1..31: mol_type = unassigned DNA
aggcagtcagagtgcttggggcccgtgcagc

SEQ ID NO: 6805 - RNA, 39 nt, Homo sapiens
  source 1..39: mol_type = unassigned RNA
gacaggagtcagatctgatgcctgacatggagccaggtg

SEQ ID NO: 6806 - DNA, 39 bp, Homo sapiens
  source 1..39: mol_type = unassigned DNA
gacaggagtcagatctgatgcctgacatggagccaggtg

SEQ ID NO: 6807 - DNA, 39 bp, Homo sapiens
  source 1..39: mol_type = unassigned DNA
cacctggctccatgtcaggcatcagatctgactcctgtc

SEQ ID NO: 6808 - RNA, 30 nt, Homo sapiens
  source 1..30: mol_type = unassigned RNA
gacagccaagcggcagggctgccagcagcc

SEQ ID NO: 6809 - DNA, 30 bp, Homo sapiens
  source 1..30: mol_type = unassigned DNA
gacagccaagcggcagggctgccagcagcc

SEQ ID NO: 6810 - DNA, 30 bp, Homo sapiens
  source 1..30: mol_type = unassigned DNA
ggctgctggcagccctgccgcttggctgtc

SEQ ID NO: 6811 - RNA, 64 nt, Homo sapiens
  source 1..64: mol_type = unassigned RNA
atcatttttaaggctgtgaatctggctccagtgataaatttggctgcactgcataaatttgtaa

SEQ ID NO: 6812 - DNA, 64 bp, Homo sapiens
  source 1..64: mol_type = unassigned DNA
atcatttttaaggctgtgaatctggctccagtgataaatttggctgcactgcataaatttgtaa

SEQ ID NO: 6813 - DNA, 64 bp, Homo sapiens
  source 1..64: mol_type = unassigned DNA
ttacaaatttatgcagtgcagccaaatttatcactggagccagattcacagccttaaaaatgat

SEQ ID NO: 6814 - RNA, 27 nt, Homo sapiens
  source 1..27: mol_type = unassigned RNA
atttaggcaccagctacttcggcgtca

SEQ ID NO: 6815 - DNA, 27 bp, Homo sapiens
  source 1..27: mol_type = unassigned DNA
atttaggcaccagctacttcggcgtca

SEQ ID NO: 6816 - DNA, 27 bp, Homo sapiens
  source 1..27: mol_type = unassigned DNA
tgacgccgaagtagctggtgcctaaat

SEQ ID NO: 6817 - RNA, 84 nt, Homo sapiens
  source 1..84: mol_type = unassigned RNA
ctcccctgccccctaagaagtcatccctgaagcctctgtcatctggtccaccttttctgaatccaaagccacctttatcttgtt

SEQ ID NO: 6818 - DNA, 84 bp, Homo sapiens
  source 1..84: mol_type = unassigned DNA
ctcccctgccccctaagaagtcatccctgaagcctctgtcatctggtccaccttttctgaatccaaagccacctttatcttgtt

SEQ ID NO: 6819 - DNA, 84 bp, Homo sapiens
  source 1..84: mol_type = unassigned DNA
aacaagataaaggtggctttggattcagaaaaggtggaccagatgacagaggcttcagggatgacttcttagggggcaggggag

SEQ ID NO: 6820 - RNA, 31 nt, Homo sapiens
  source 1..31: mol_type = unassigned RNA
gccaacctcgcctggagtggacctgcagagc

SEQ ID NO: 6821 - DNA, 31 bp, Homo sapiens
  source 1..31: mol_type = unassigned DNA
gccaacctcgcctggagtggacctgcagagc

SEQ ID NO: 6822 - DNA, 31 bp, Homo sapiens
  source 1..31: mol_type = unassigned DNA
gctctgcaggtccactccaggcgaggttggc

SEQ ID NO: 6823 - RNA, 31 nt, Homo sapiens
  source 1..31: mol_type = unassigned RNA
ctctgcggtagtgacaccggactgctcaggc

SEQ ID NO: 6824 - DNA, 31 bp, Homo sapiens
  source 1..31: mol_type = unassigned DNA
ctctgcggtagtgacaccggactgctcaggc

SEQ ID NO: 6825 - DNA, 31 bp, Homo sapiens
  source 1..31: mol_type = unassigned DNA
gcctgagcagtccggtgtcactaccgcagag

SEQ ID NO: 6826 - RNA, 176 nt, Homo sapiens
  source 1..176: mol_type = unassigned RNA
gataagatgacatttcctgcctaaaggagatgacgcacacttcactgtgactaaggaggatatttttctcttcagggtgagagaggtgaaactggccctccaggacctgctggtttccctggtgctcctgtaagtgtgaatatttatacatacatgtcccatagcccaggatctct

SEQ ID NO: 6827 - DNA, 176 bp, Homo sapiens
  source 1..176: mol_type = unassigned DNA
gataagatgacatttcctgcctaaaggagatgacgcacacttcactgtgactaaggaggatatttttctcttcagggtgagagaggtgaaactggccctccaggacctgctggtttccctggtgctcctgtaagtgtgaatatttatacatacatgtcccatagcccaggatctct

SEQ ID NO: 6828 - DNA, 176 bp, Homo sapiens
  source 1..176: mol_type = unassigned DNA
agagatcctgggctatgggacatgtatgtataaatattcacacttacaggagcaccagggaaaccagcaggtcctggagggccagtttcacctctctcaccctgaagagaaaaatatcctccttagtcacagtgaagtgtgcgtcatctcctttaggcaggaaatgtcatcttatc

SEQ ID NO: 6829 - RNA, 35 nt, Homo sapiens
  source 1..35: mol_type = unassigned RNA
ccaatcgttctctgacagaaggcctggtcctggac

SEQ ID NO: 6830 - DNA, 35 bp, Homo sapiens
  source 1..35: mol_type = unassigned DNA
ccaatcgttctctgacagaaggcctggtcctggac

SEQ ID NO: 6831 - DNA, 35 bp, Homo sapiens
  source 1..35: mol_type = unassigned DNA
gtccaggaccaggccttctgtcagagaacgattgg

SEQ ID NO: 6832 - RNA, 112 nt, Homo sapiens
  source 1..112: mol_type = unassigned RNA
ctttgtgaaacctgggattcaaactgcaaggcaggaaggaaccagcaggaattctagccttgcagaaagtccctgttccccctttgttttcctttttgccccataaatccca

SEQ ID NO: 6833 - DNA, 112 bp, Homo sapiens
  source 1..112: mol_type = unassigned DNA
ctttgtgaaacctgggattcaaactgcaaggcaggaaggaaccagcaggaattctagccttgcagaaagtccctgttccccctttgttttcctttttgccccataaatccca

SEQ ID NO: 6834 - DNA, 112 bp, Homo sapiens
  source 1..112: mol_type = unassigned DNA
tgggatttatggggcaaaaaggaaaacaaagggggaacagggactttctgcaaggctagaattcctgctggttccttcctgccttgcagtttgaatcccaggtttcacaaag

SEQ ID NO: 6835 - RNA, 30 nt, Homo sapiens
  source 1..30: mol_type = unassigned RNA
tatttcagggatggtgggctgtggggtgga

SEQ ID NO: 6836 - DNA, 30 bp, Homo sapiens
  source 1..30: mol_type = unassigned DNA
tatttcagggatggtgggctgtggggtgga

SEQ ID NO: 6837 - DNA, 30 bp, Homo sapiens
  source 1..30: mol_type = unassigned DNA
tccaccccacagcccaccatccctgaaata

SEQ ID NO: 6838 - RNA, 35 nt, Homo sapiens
  source 1..35: mol_type = unassigned RNA
acactgtatgtctgcgatcctggcagtgtagagaa

SEQ ID NO: 6839 - DNA, 35 bp, Homo sapiens
  source 1..35: mol_type = unassigned DNA
acactgtatgtctgcgatcctggcagtgtagagaa

SEQ ID NO: 6840 - DNA, 35 bp, Homo sapiens
  source 1..35: mol_type = unassigned DNA
ttctctacactgccaggatcgcagacatacagtgt

SEQ ID NO: 6841 - RNA, 29 nt, Homo sapiens
  source 1..29: mol_type = unassigned RNA
cacaccagatgaaaggtgcggtcggtcca

SEQ ID NO: 6842 - DNA, 29 bp, Homo sapiens
  source 1..29: mol_type = unassigned DNA
cacaccagatgaaaggtgcggtcggtcca

SEQ ID NO: 6843 - DNA, 29 bp, Homo sapiens
  source 1..29: mol_type = unassigned DNA
tggaccgaccgcacctttcatctggtgtg

SEQ ID NO: 6844 - RNA, 27 nt, Homo sapiens
  source 1..27: mol_type = unassigned RNA
agagtgtctgcaattgaagaactcact

SEQ ID NO: 6845 - DNA, 27 bp, Homo sapiens
  source 1..27: mol_type = unassigned DNA
agagtgtctgcaattgaagaactcact

SEQ ID NO: 6846 - DNA, 27 bp, Homo sapiens
  source 1..27: mol_type = unassigned DNA
agtgagttcttcaattgcagacactct

SEQ ID NO: 6847 - RNA, 31 nt, Homo sapiens
  source 1..31: mol_type = unassigned RNA
gagatctcagaccatgtccttcggatgcacc

SEQ ID NO: 6848 - DNA, 31 bp, Homo sapiens
  source 1..31: mol_type = unassigned DNA
gagatctcagaccatgtccttcggatgcacc

SEQ ID NO: 6849 - DNA, 31 bp, Homo sapiens
  source 1..31: mol_type = unassigned DNA
ggtgcatccgaaggacatggtctgagatctc

SEQ ID NO: 6850 - RNA, 29 nt, Homo sapiens
  source 1..29: mol_type = unassigned RNA
gctactagtatcctgtcgtctgtgtccag

SEQ ID NO: 6851 - DNA, 29 bp, Homo sapiens
  source 1..29: mol_type = unassigned DNA
gctactagtatcctgtcgtctgtgtccag

SEQ ID NO: 6852 - DNA, 29 bp, Homo sapiens
  source 1..29: mol_type = unassigned DNA
ctggacacagacgacaggatactagtagc

SEQ ID NO: 6853 - RNA, 77 nt, Homo sapiens
  source 1..77: mol_type = unassigned RNA
taccatgaagaggagctcagacagctcttaccacatgatacaagagccggctggtggaagagtggggaccagaaagg

SEQ ID NO: 6854 - DNA, 77 bp, Homo sapiens
  source 1..77: mol_type = unassigned DNA
taccatgaagaggagctcagacagctcttaccacatgatacaagagccggctggtggaagagtggggaccagaaagg

SEQ ID NO: 6855 - DNA, 77 bp, Homo sapiens
  source 1..77: mol_type = unassigned DNA
cctttctggtccccactcttccaccagccggctcttgtatcatgtggtaagagctgtctgagctcctcttcatggta

SEQ ID NO: 6856 - RNA, 33 nt, Homo sapiens
  source 1..33: mol_type = unassigned RNA
tccagcttcagacttgtagatataactcgttca

SEQ ID NO: 6857 - DNA, 33 bp, Homo sapiens
  source 1..33: mol_type = unassigned DNA
tccagcttcagacttgtagatataactcgttca

SEQ ID NO: 6858 - DNA, 33 bp, Homo sapiens
  source 1..33: mol_type = unassigned DNA
tgaacgagttatatctacaagtctgaagctgga

SEQ ID NO: 6859 - RNA, 112 nt, Homo sapiens
  source 1..112: mol_type = unassigned RNA
cttttgttttcagtagtttcattacaacgtgcctagatgtagttctctttgcacttatcctgcttagagcttgccaaaatcatatatttcaccaaattcggaaacactttgg

SEQ ID NO: 6860 - DNA, 112 bp, Homo sapiens
  source 1..112: mol_type = unassigned DNA
cttttgttttcagtagtttcattacaacgtgcctagatgtagttctctttgcacttatcctgcttagagcttgccaaaatcatatatttcaccaaattcggaaacactttgg

SEQ ID NO: 6861 - DNA, 112 bp, Homo sapiens
  source 1..112: mol_type = unassigned DNA
ccaaagtgtttccgaatttggtgaaatatatgattttggcaagctctaagcaggataagtgcaaagagaactacatctaggcacgttgtaatgaaactactgaaaacaaaag

SEQ ID NO: 6862 - RNA, 30 nt, Homo sapiens
  source 1..30: mol_type = unassigned RNA
tagtcacggactttcaggattctgtcttta

SEQ ID NO: 6863 - DNA, 30 bp, Homo sapiens
  source 1..30: mol_type = unassigned DNA
tagtcacggactttcaggattctgtcttta

SEQ ID NO: 6864 - DNA, 30 bp, Homo sapiens
  source 1..30: mol_type = unassigned DNA
taaagacagaatcctgaaagtccgtgacta

SEQ ID NO: 6865 - RNA, 23 nt, Homo sapiens
  source 1..23: mol_type = unassigned RNA
ttagatgttagtttgtgttgttc

SEQ ID NO: 6866 - DNA, 23 bp, Homo sapiens
  source 1..23: mol_type = unassigned DNA
ttagatgttagtttgtgttgttc

SEQ ID NO: 6867 - DNA, 23 bp, Homo sapiens
  source 1..23: mol_type = unassigned DNA
gaacaacacaaactaacatctaa

SEQ ID NO: 6868 - RNA, 29 nt, Homo sapiens
  source 1..29: mol_type = unassigned RNA
tcttctcccagtttggccagatcctggat

SEQ ID NO: 6869 - DNA, 29 bp, Homo sapiens
  source 1..29: mol_type = unassigned DNA
tcttctcccagtttggccagatcctggat

SEQ ID NO: 6870 - DNA, 29 bp, Homo sapiens
  source 1..29: mol_type = unassigned DNA
atccaggatctggccaaactgggagaaga

SEQ ID NO: 6871 - RNA, 26 nt, Homo sapiens
  source 1..26: mol_type = unassigned RNA
aaacaggctgtaacctactcttgtga

SEQ ID NO: 6872 - DNA, 26 bp, Homo sapiens
  source 1..26: mol_type = unassigned DNA
aaacaggctgtaacctactcttgtga

SEQ ID NO: 6873 - DNA, 26 bp, Homo sapiens
  source 1..26: mol_type = unassigned DNA
tcacaagagtaggttacagcctgttt

SEQ ID NO: 6874 - RNA, 47 nt, Homo sapiens
  source 1..47: mol_type = unassigned RNA
catgtaactgagtggactgtgcttgtcaacggatgtgtagcttttca

SEQ ID NO: 6875 - DNA, 47 bp, Homo sapiens
  source 1..47: mol_type = unassigned DNA
catgtaactgagtggactgtgcttgtcaacggatgtgtagcttttca

SEQ ID NO: 6876 - DNA, 47 bp, Homo sapiens
  source 1..47: mol_type = unassigned DNA
tgaaaagctacacatccgttgacaagcacagtccactcagttacatg

SEQ ID NO: 6877 - RNA, 29 nt, Homo sapiens
  source 1..29: mol_type = unassigned RNA
gccggctcgcggacttgaaaccaggctgt

SEQ ID NO: 6878 - DNA, 29 bp, Homo sapiens
  source 1..29: mol_type = unassigned DNA
gccggctcgcggacttgaaaccaggctgt

SEQ ID NO: 6879 - DNA, 29 bp, Homo sapiens
  source 1..29: mol_type = unassigned DNA
acagcctggtttcaagtccgcgagccggc

SEQ ID NO: 6880 - RNA, 35 nt, Homo sapiens
  source 1..35: mol_type = unassigned RNA
aattggcactggtataatccacaaaatgtattcag

SEQ ID NO: 6881 - DNA, 35 bp, Homo sapiens
  source 1..35: mol_type = unassigned DNA
aattggcactggtataatccacaaaatgtattcag

SEQ ID NO: 6882 - DNA, 35 bp, Homo sapiens
  source 1..35: mol_type = unassigned DNA
ctgaatacattttgtggattataccagtgccaatt

SEQ ID NO: 6883 - RNA, 34 nt, Homo sapiens
  source 1..34: mol_type = unassigned RNA
tgccactgtaggtcgtcgatacctctggctgaag

SEQ ID NO: 6884 - DNA, 34 bp, Homo sapiens
  source 1..34: mol_type = unassigned DNA
tgccactgtaggtcgtcgatacctctggctgaag

SEQ ID NO: 6885 - DNA, 34 bp, Homo sapiens
  source 1..34: mol_type = unassigned DNA
cttcagccagaggtatcgacgacctacagtggca

SEQ ID NO: 6886 - RNA, 80 nt, Homo sapiens
  source 1..80: mol_type = unassigned RNA
catcaccagagctgccctcaccaactgagtgtctgaattcctacaagcagctgccactggactggagggctcattgagcc

SEQ ID NO: 6887 - DNA, 80 bp, Homo sapiens
  source 1..80: mol_type = unassigned DNA
catcaccagagctgccctcaccaactgagtgtctgaattcctacaagcagctgccactggactggagggctcattgagcc

SEQ ID NO: 6888 - DNA, 80 bp, Homo sapiens
  source 1..80: mol_type = unassigned DNA
ggctcaatgagccctccagtccagtggcagctgcttgtaggaattcagacactcagttggtgagggcagctctggtgatg

SEQ ID NO: 6889 - RNA, 30 nt, Homo sapiens
  source 1..30: mol_type = unassigned RNA
gttcacttgggactgttgatgctccaagta

SEQ ID NO: 6890 - DNA, 30 bp, Homo sapiens
  source 1..30: mol_type = unassigned DNA
gttcacttgggactgttgatgctccaagta

SEQ ID NO: 6891 - DNA, 30 bp, Homo sapiens
  source 1..30: mol_type = unassigned DNA
tacttggagcatcaacagtcccaagtgaac

SEQ ID NO: 6892 - RNA, 30 nt, Homo sapiens
  source 1..30: mol_type = unassigned RNA
tgcaggcatctggacaactggcagtgttga

SEQ ID NO: 6893 - DNA, 30 bp, Homo sapiens
  source 1..30: mol_type = unassigned DNA
tgcaggcatctggacaactggcagtgttga

SEQ ID NO: 6894 - DNA, 30 bp, Homo sapiens
  source 1..30: mol_type = unassigned DNA
tcaacactgccagttgtccagatgcctgca

SEQ ID NO: 6895 - RNA, 29 nt, Homo sapiens
  source 1..29: mol_type = unassigned RNA
ccagctccctgactagaaacgaagcctcc

SEQ ID NO: 6896 - DNA, 29 bp, Homo sapiens
  source 1..29: mol_type = unassigned DNA
ccagctccctgactagaaacgaagcctcc

SEQ ID NO: 6897 - DNA, 29 bp, Homo sapiens
  source 1..29: mol_type = unassigned DNA
ggaggcttcgtttctagtcagggagctgg

SEQ ID NO: 6898 - RNA, 31 nt, Homo sapiens
  source 1..31: mol_type = unassigned RNA
ttcacagtgctgaaccagacgtgggtcctga

SEQ ID NO: 6899 - DNA, 31 bp, Homo sapiens
  source 1..31: mol_type = unassigned DNA
ttcacagtgctgaaccagacgtgggtcctga

SEQ ID NO: 6900 - DNA, 31 bp, Homo sapiens
  source 1..31: mol_type = unassigned DNA
tcaggacccacgtctggttcagcactgtgaa

SEQ ID NO: 6901 - RNA, 72 nt, Homo sapiens
  source 1..72: mol_type = unassigned RNA
gctaatggccattactcctatggctctgagtctgtggaatctagattctagtgggggatggagaggattttt

SEQ ID NO: 6902 - DNA, 72 bp, Homo sapiens
  source 1..72: mol_type = unassigned DNA
gctaatggccattactcctatggctctgagtctgtggaatctagattctagtgggggatggagaggattttt

SEQ ID NO: 6903 - DNA, 72 bp, Homo sapiens
  source 1..72: mol_type = unassigned DNA
aaaaatcctctccatcccccactagaatctagattccacagactcagagccataggagtaatggccattagc

SEQ ID NO: 6904 - RNA, 31 nt, Homo sapiens
  source 1..31: mol_type = unassigned RNA
acctgaacaagagcttgaccagaacaagggg

SEQ ID NO: 6905 - DNA, 31 bp, Homo sapiens
  source 1..31: mol_type = unassigned DNA
acctgaacaagagcttgaccagaacaagggg

SEQ ID NO: 6906 - DNA, 31 bp, Homo sapiens
  source 1..31: mol_type = unassigned DNA
ccccttgttctggtcaagctcttgttcaggt

SEQ ID NO: 6907 - RNA, 34 nt, Homo sapiens
  source 1..34: mol_type = unassigned RNA
tcatatcatttggccgagtcagcacgtagtttgc

SEQ ID NO: 6908 - DNA, 34 bp, Homo sapiens
  source 1..34: mol_type = unassigned DNA
tcatatcatttggccgagtcagcacgtagtttgc

SEQ ID NO: 6909 - DNA, 34 bp, Homo sapiens
  source 1..34: mol_type = unassigned DNA
gcaaactacgtgctgactcggccaaatgatatga

SEQ ID NO: 6910 - RNA, 31 nt, Homo sapiens
  source 1..31: mol_type = unassigned RNA
gatgccaagatggactctgcaatgggcatac

SEQ ID NO: 6911 - DNA, 31 bp, Homo sapiens
  source 1..31: mol_type = unassigned DNA
gatgccaagatggactctgcaatgggcatac

SEQ ID NO: 6912 - DNA, 31 bp, Homo sapiens
  source 1..31: mol_type = unassigned DNA
gtatgcccattgcagagtccatcttggcatc

SEQ ID NO: 6913 - RNA, 43 nt, Homo sapiens
  source 1..43: mol_type = unassigned RNA
ccagtactggaggcggccctgggtcagtggaatacagacccag

SEQ ID NO: 6914 - DNA, 43 bp, Homo sapiens
  source 1..43: mol_type = unassigned DNA
ccagtactggaggcggccctgggtcagtggaatacagacccag

SEQ ID NO: 6915 - DNA, 43 bp, Homo sapiens
  source 1..43: mol_type = unassigned DNA
ctgggtctgtattccactgacccagggccgcctccagtactgg

SEQ ID NO: 6916 - RNA, 22 nt, Homo sapiens
  source 1..22: mol_type = unassigned RNA
ttttttctttttgctcccctga

SEQ ID NO: 6917 - DNA, 22 bp, Homo sapiens
  source 1..22: mol_type = unassigned DNA
ttttttctttttgctcccctga

SEQ ID NO: 6918 - DNA, 22 bp, Homo sapiens
  source 1..22: mol_type = unassigned DNA
tcaggggagcaaaaagaaaaaa

SEQ ID NO: 6919 - RNA, 32 nt, Homo sapiens
  source 1..32: mol_type = unassigned RNA
tcttcaattgcatggtaggactcacactggag

SEQ ID NO: 6920 - DNA, 32 bp, Homo sapiens
  source 1..32: mol_type = unassigned DNA
tcttcaattgcatggtaggactcacactggag

SEQ ID NO: 6921 - DNA, 32 bp, Homo sapiens
  source 1..32: mol_type = unassigned DNA
ctccagtgtgagtcctaccatgcaattgaaga

SEQ ID NO: 6922 - RNA, 60 nt, Homo sapiens
  source 1..60: mol_type = unassigned RNA
gcttgagagctgtgatgcccacctgtttacctgagacatttcaagttactgatcattgga

SEQ ID NO: 6923 - DNA, 60 bp, Homo sapiens
  source 1..60: mol_type = unassigned DNA
gcttgagagctgtgatgcccacctgtttacctgagacatttcaagttactgatcattgga

SEQ ID NO: 6924 - DNA, 60 bp, Homo sapiens
  source 1..60: mol_type = unassigned DNA
tccaatgatcagtaacttgaaatgtctcaggtaaacaggtgggcatcacagctctcaagc

SEQ ID NO: 6925 - RNA, 29 nt, Homo sapiens
  source 1..29: mol_type = unassigned RNA
cttacatgtggtagcagctctggtttgat

SEQ ID NO: 6926 - DNA, 29 bp, Homo sapiens
  source 1..29: mol_type = unassigned DNA
cttacatgtggtagcagctctggtttgat

SEQ ID NO: 6927 - DNA, 29 bp, Homo sapiens
  source 1..29: mol_type = unassigned DNA
atcaaaccagagctgctaccacatgtaag

SEQ ID NO: 6928 - RNA, 28 nt, Homo sapiens
  source 1..28: mol_type = unassigned RNA
ccaacattacaagaactgaccaggcgct

SEQ ID NO: 6929 - DNA, 28 bp, Homo sapiens
  source 1..28: mol_type = unassigned DNA
ccaacattacaagaactgaccaggcgct

SEQ ID NO: 6930 - DNA, 28 bp, Homo sapiens
  source 1..28: mol_type = unassigned DNA
agcgcctggtcagttcttgtaatgttgg

SEQ ID NO: 6931 - RNA, 37 nt, Homo sapiens
  source 1..37: mol_type = unassigned RNA
ggactcgaggacacaggaccctgggctggcgggaggg

SEQ ID NO: 6932 - DNA, 37 bp, Homo sapiens
  source 1..37: mol_type = unassigned DNA
ggactcgaggacacaggaccctgggctggcgggaggg

SEQ ID NO: 6933 - DNA, 37 bp, Homo sapiens
  source 1..37: mol_type = unassigned DNA
ccctcccgccagcccagggtcctgtgtcctcgagtcc

SEQ ID NO: 6934 - RNA, 27 nt, Homo sapiens
  source 1..27: mol_type = unassigned RNA
attcaatctgatagtctctgcttgtaa

SEQ ID NO: 6935 - DNA, 27 bp, Homo sapiens
  source 1..27: mol_type = unassigned DNA
attcaatctgatagtctctgcttgtaa

SEQ ID NO: 6936 - DNA, 27 bp, Homo sapiens
  source 1..27: mol_type = unassigned DNA
ttacaagcagagactatcagattgaat

SEQ ID NO: 6937 - RNA, 73 nt, Homo sapiens
  source 1..73: mol_type = unassigned RNA
aagccatggagtgcttcgggtacaggaatggcaagaccagcaagaagatcaccattgctgactgtggatcatt

SEQ ID NO: 6938 - DNA, 73 bp, Homo sapiens
  source 1..73: mol_type = unassigned DNA
aagccatggagtgcttcgggtacaggaatggcaagaccagcaagaagatcaccattgctgactgtggatcatt

SEQ ID NO: 6939 - DNA, 73 bp, Homo sapiens
  source 1..73: mol_type = unassigned DNA
aatgatccacagtcagcaatggtgatcttcttgctggtcttgccattcctgtacccgaagcactccatggctt

SEQ ID NO: 6940 - RNA, 31 nt, Homo sapiens
  source 1..31: mol_type = unassigned RNA
ccagccacaactaccctgccctcatcttcgc

SEQ ID NO: 6941 - DNA, 31 bp, Homo sapiens
  source 1..31: mol_type = unassigned DNA
ccagccacaactaccctgccctcatcttcgc

SEQ ID NO: 6942 - DNA, 31 bp, Homo sapiens
  source 1..31: mol_type = unassigned DNA
gcgaagatgagggcagggtagttgtggctgg

SEQ ID NO: 6943 - RNA, 176 nt, Homo sapiens
  source 1..176: mol_type = unassigned RNA
cagtagttgatgtcagaaggcaggacagttcatgttcacctgcatctcctccagcccctccagctgacctgggctgtgcctggctgccagaggaaggccccttttcctgtatccatttgttcagaggagctgacaaatggcttcctctgagttcccaatttctgctgggattttcc

SEQ ID NO: 6944 - DNA, 176 bp, Homo sapiens
  source 1..176: mol_type = unassigned DNA
cagtagttgatgtcagaaggcaggacagttcatgttcacctgcatctcctccagcccctccagctgacctgggctgtgcctggctgccagaggaaggccccttttcctgtatccatttgttcagaggagctgacaaatggcttcctctgagttcccaatttctgctgggattttcc

SEQ ID NO: 6945 - DNA, 176 bp, Homo sapiens
  source 1..176: mol_type = unassigned DNA
ggaaaatcccagcagaaattgggaactcagaggaagccatttgtcagctcctctgaacaaatggatacaggaaaaggggccttcctctggcagccaggcacagcccaggtcagctggaggggctggaggagatgcaggtgaacatgaactgtcctgccttctgacatcaactactg

SEQ ID NO: 6946 - RNA, 36 nt, Homo sapiens
  source 1..36: mol_type = unassigned RNA
tgagatgtatttttgtaaatagtaggttgtgccaaa

SEQ ID NO: 6947 - DNA, 36 bp, Homo sapiens
  source 1..36: mol_type = unassigned DNA
tgagatgtatttttgtaaatagtaggttgtgccaaa

SEQ ID NO: 6948 - DNA, 36 bp, Homo sapiens
  source 1..36: mol_type = unassigned DNA
tttggcacaacctactatttacaaaaatacatctca

SEQ ID NO: 6949 - RNA, 32 nt, Homo sapiens
  source 1..32: mol_type = unassigned RNA
gagccatgaacagagagtccctggatggtcac

SEQ ID NO: 6950 - DNA, 32 bp, Homo sapiens
  source 1..32: mol_type = unassigned DNA
gagccatgaacagagagtccctggatggtcac

SEQ ID NO: 6951 - DNA, 32 bp, Homo sapiens
  source 1..32: mol_type = unassigned DNA
gtgaccatccagggactctctgttcatggctc

SEQ ID NO: 6952 - RNA, 165 nt, Homo sapiens
  source 1..165: mol_type = unassigned RNA
attgaatataacgggtttcctctttattctgtttgtcccaggactgtcctgattgcctgtaatgttaagcagatgagcaaggatgctcagccctctttctctgctgaggatatagccaagatcaagaagttcagtaaaacccgatccaaggtctgggcatccttt

SEQ ID NO: 6953 - DNA, 165 bp, Homo sapiens
  source 1..165: mol_type = unassigned DNA
attgaatataacgggtttcctctttattctgtttgtcccaggactgtcctgattgcctgtaatgttaagcagatgagcaaggatgctcagccctctttctctgctgaggatatagccaagatcaagaagttcagtaaaacccgatccaaggtctgggcatccttt

SEQ ID NO: 6954 - DNA, 165 bp, Homo sapiens
  source 1..165: mol_type = unassigned DNA
aaaggatgcccagaccttggatcgggttttactgaacttcttgatcttggctatatcctcagcagagaaagagggctgagcatccttgctcatctgcttaacattacaggcaatcaggacagtcctgggacaaacagaataaagaggaaacccgttatattcaat

SEQ ID NO: 6955 - RNA, 32 nt, Homo sapiens
  source 1..32: mol_type = unassigned RNA
aactttgactggagcctgaccttcggctggga

SEQ ID NO: 6956 - DNA, 32 bp, Homo sapiens
  source 1..32: mol_type = unassigned DNA
aactttgactggagcctgaccttcggctggga

SEQ ID NO: 6957 - DNA, 32 bp, Homo sapiens
  source 1..32: mol_type = unassigned DNA
tcccagccgaaggtcaggctccagtcaaagtt

SEQ ID NO: 6958 - RNA, 27 nt, Homo sapiens
  source 1..27: mol_type = unassigned RNA
acagctcgtaagtccactggcggcaaa

SEQ ID NO: 6959 - DNA, 27 bp, Homo sapiens
  source 1..27: mol_type = unassigned DNA
acagctcgtaagtccactggcggcaaa

SEQ ID NO: 6960 - DNA, 27 bp, Homo sapiens
  source 1..27: mol_type = unassigned DNA
tttgccgccagtggacttacgagctgt

SEQ ID NO: 6961 - RNA, 44 nt, Homo sapiens
  source 1..44: mol_type = unassigned RNA
tcaaggcgagagggaccacctgagccagcagattgagttttctt

SEQ ID NO: 6962 - DNA, 44 bp, Homo sapiens
  source 1..44: mol_type = unassigned DNA
tcaaggcgagagggaccacctgagccagcagattgagttttctt

SEQ ID NO: 6963 - DNA, 44 bp, Homo sapiens
  source 1..44: mol_type = unassigned DNA
aagaaaactcaatctgctggctcaggtggtccctctcgccttga

SEQ ID NO: 6964 - RNA, 103 nt, Homo sapiens
  source 1..103: mol_type = unassigned RNA
aatgacggatcagtacatgagctcaagtaggtcttctagagagtccgagaaagtaagatgagaccagtttgtggacttggaaggtcggtatgaggaagttggc

SEQ ID NO: 6965 - DNA, 103 bp, Homo sapiens
  source 1..103: mol_type = unassigned DNA
aatgacggatcagtacatgagctcaagtaggtcttctagagagtccgagaaagtaagatgagaccagtttgtggacttggaaggtcggtatgaggaagttggc

SEQ ID NO: 6966 - DNA, 103 bp, Homo sapiens
  source 1..103: mol_type = unassigned DNA
gccaacttcctcataccgaccttccaagtccacaaactggtctcatcttactttctcggactctctagaagacctacttgagctcatgtactgatccgtcatt

SEQ ID NO: 6967 - RNA, 83 nt, Homo sapiens
  source 1..83: mol_type = unassigned RNA
ccagcttcattggtgccatcagagacaacagcaaggcactgcccccttctccaatgttagaactccagatcagtagtcctgct

SEQ ID NO: 6968 - DNA, 83 bp, Homo sapiens
  source 1..83: mol_type = unassigned DNA
ccagcttcattggtgccatcagagacaacagcaaggcactgcccccttctccaatgttagaactccagatcagtagtcctgct

SEQ ID NO: 6969 - DNA, 83 bp, Homo sapiens
  source 1..83: mol_type = unassigned DNA
agcaggactactgatctggagttctaacattggagaagggggcagtgccttgctgttgtctctgatggcaccaatgaagctgg

SEQ ID NO: 6970 - RNA, 23 nt, Homo sapiens
  source 1..23: mol_type = unassigned RNA
ttagttattactttgtatctttt

SEQ ID NO: 6971 - DNA, 23 bp, Homo sapiens
  source 1..23: mol_type = unassigned DNA
ttagttattactttgtatctttt

SEQ ID NO: 6972 - DNA, 23 bp, Homo sapiens
  source 1..23: mol_type = unassigned DNA
aaaagatacaaagtaataactaa

SEQ ID NO: 6973 - RNA, 30 nt, Homo sapiens
  source 1..30: mol_type = unassigned RNA
catgctgatgtcaatgctgtggatgagctt

SEQ ID NO: 6974 - DNA, 30 bp, Homo sapiens
  source 1..30: mol_type = unassigned DNA
catgctgatgtcaatgctgtggatgagctt

SEQ ID NO: 6975 - DNA, 30 bp, Homo sapiens
  source 1..30: mol_type = unassigned DNA
aagctcatccacagcattgacatcagcatg

SEQ ID NO: 6976 - RNA, 30 nt, Homo sapiens
  source 1..30: mol_type = unassigned RNA
cacagcgcgcccaggcgcagggccaggcac

SEQ ID NO: 6977 - DNA, 30 bp, Homo sapiens
  source 1..30: mol_type = unassigned DNA
gtgcctggccctgcgcctgggcgcgctgtg

SEQ ID NO: 6978 - RNA, 128 nt, Homo sapiens
  source 1..128: mol_type = unassigned RNA
ttgaacagtacatttcctccccacagtgtgctggaaaggatgtgaaagccttggttgacacaggctgcctatataatctcatctctttggcctgtgtggacagattggggtaagtaggcacttgtgct

SEQ ID NO: 6979 - DNA, 128 bp, Homo sapiens
  source 1..128: mol_type = unassigned DNA
ttgaacagtacatttcctccccacagtgtgctggaaaggatgtgaaagccttggttgacacaggctgcctatataatctcatctctttggcctgtgtggacagattggggtaagtaggcacttgtgct

SEQ ID NO: 6980 - DNA, 128 bp, Homo sapiens
  source 1..128: mol_type = unassigned DNA
agcacaagtgcctacttaccccaatctgtccacacaggccaaagagatgagattatataggcagcctgtgtcaaccaaggctttcacatcctttccagcacactgtggggaggaaatgtactgttcaa

SEQ ID NO: 6981 - RNA, 131 nt, Homo sapiens
  source 1..131: mol_type = unassigned RNA
catcagccaagcgtctggaacctgcaccaccagggccccaccactctggaggtctggggtggggctgtgctgtgacagtggctgcagggccaggaccccagctcctcggcactcactcccagcacctctcc

SEQ ID NO: 6982 - DNA, 131 bp, Homo sapiens
  source 1..131: mol_type = unassigned DNA
catcagccaagcgtctggaacctgcaccaccagggccccaccactctggaggtctggggtggggctgtgctgtgacagtggctgcagggccaggaccccagctcctcggcactcactcccagcacctctcc

SEQ ID NO: 6983 - DNA, 131 bp, Homo sapiens
  source 1..131: mol_type = unassigned DNA
ggagaggtgctgggagtgagtgccgaggagctggggtcctggccctgcagccactgtcacagcacagccccaccccagacctccagagtggtggggccctggtggtgcaggttccagacgcttggctgatg

SEQ ID NO: 6984 - RNA, 97 nt, Homo sapiens
  source 1..97: mol_type = unassigned RNA
ggttagtagcagtgaagatgggaaggaccagctgaatggaggagaaaaattgcacaggtagaattaaagggatgtgacgtcatgggataatggtagg

SEQ ID NO: 6985 - DNA, 97 bp, Homo sapiens
  source 1..97: mol_type = unassigned DNA
ggttagtagcagtgaagatgggaaggaccagctgaatggaggagaaaaattgcacaggtagaattaaagggatgtgacgtcatgggataatggtagg

SEQ ID NO: 6986 - DNA, 97 bp, Homo sapiens
  source 1..97: mol_type = unassigned DNA
cctaccattatcccatgacgtcacatccctttaattctacctgtgcaatttttctcctccattcagctggtccttcccatcttcactgctactaacc

SEQ ID NO: 6987 - RNA, 23 nt, Homo sapiens
  source 1..23: mol_type = unassigned RNA
cctatccacctactgctttcttc

SEQ ID NO: 6988 - DNA, 23 bp, Homo sapiens
  source 1..23: mol_type = unassigned DNA
cctatccacctactgctttcttc

SEQ ID NO: 6989 - DNA, 23 bp, Homo sapiens
  source 1..23: mol_type = unassigned DNA
gaagaaagcagtaggtggatagg

SEQ ID NO: 6990 - RNA, 28 nt, Homo sapiens
  source 1..28: mol_type = unassigned RNA
tttcttcctgctcaagcaccaaaaaaat

SEQ ID NO: 6991 - DNA, 28 bp, Homo sapiens
  source 1..28: mol_type = unassigned DNA
tttcttcctgctcaagcaccaaaaaaat

SEQ ID NO: 6992 - DNA, 28 bp, Homo sapiens
  source 1..28: mol_type = unassigned DNA
atttttttggtgcttgagcaggaagaaa

SEQ ID NO: 6993 - RNA, 29 nt, Homo sapiens
  source 1..29: mol_type = unassigned RNA
tttgaacatggtgcggactaaagcagaca

SEQ ID NO: 6994 - DNA, 29 bp, Homo sapiens
  source 1..29: mol_type = unassigned DNA
tttgaacatggtgcggactaaagcagaca

SEQ ID NO: 6995 - DNA, 29 bp, Homo sapiens
  source 1..29: mol_type = unassigned DNA
tgtctgctttagtccgcaccatgttcaaa

SEQ ID NO: 6996 - RNA, 30 nt, Homo sapiens
  source 1..30: mol_type = unassigned RNA
ccaagcccttgaacgacagcgcatggtgag

SEQ ID NO: 6997 - DNA, 30 bp, Homo sapiens
  source 1..30: mol_type = unassigned DNA
ccaagcccttgaacgacagcgcatggtgag

SEQ ID NO: 6998 - DNA, 30 bp, Homo sapiens
  source 1..30: mol_type = unassigned DNA
ctcaccatgcgctgtcgttcaagggcttgg

SEQ ID NO: 6999 - RNA, 47 nt, Homo sapiens
  source 1..47: mol_type = unassigned RNA
ttttttaatggtagatcttacagtattaagatcctccgttttttgtt

SEQ ID NO: 7000 - DNA, 47 bp, Homo sapiens
  source 1..47: mol_type = unassigned DNA
ttttttaatggtagatcttacagtattaagatcctccgttttttgtt

SEQ ID NO: 7001 - DNA, 47 bp, Homo sapiens
  source 1..47: mol_type = unassigned DNA
aacaaaaaacggaggatcttaatactgtaagatctaccattaaaaaa

SEQ ID NO: 7002 - RNA, 32 nt, Homo sapiens
  source 1..32: mol_type = unassigned RNA
agctcctgatgttaaggcctgagcgtcaatca

SEQ ID NO: 7003 - DNA, 32 bp, Homo sapiens
  source 1..32: mol_type = unassigned DNA
agctcctgatgttaaggcctgagcgtcaatca

SEQ ID NO: 7004 - DNA, 32 bp, Homo sapiens
  source 1..32: mol_type = unassigned DNA
tgattgacgctcaggccttaacatcaggagct

SEQ ID NO: 7005 - RNA, 24 nt, Homo sapiens
  source 1..24: mol_type = unassigned RNA
ttagtttatcaaattgatttgaga

SEQ ID NO: 7006 - DNA, 24 bp, Homo sapiens
  source 1..24: mol_type = unassigned DNA
ttagtttatcaaattgatttgaga

SEQ ID NO: 7007 - DNA, 24 bp, Homo sapiens
  source 1..24: mol_type = unassigned DNA
tctcaaatcaatttgataaactaa

SEQ ID NO: 7008 - RNA, 30 nt, Homo sapiens
  source 1..30: mol_type = unassigned RNA
tgactttgccagccagccgtcagacagccc

SEQ ID NO: 7009 - DNA, 30 bp, Homo sapiens
  source 1..30: mol_type = unassigned DNA
tgactttgccagccagccgtcagacagccc

SEQ ID NO: 7010 - DNA, 30 bp, Homo sapiens
  source 1..30: mol_type = unassigned DNA
gggctgtctgacggctggctggcaaagtca

SEQ ID NO: 7011 - RNA, 110 nt, Homo sapiens
  source 1..110: mol_type = unassigned RNA
attgcatgctcatctgctggttgtttgtggacctctgctttctgaagacaaagaccaatgatgaattctgattaaacagtttctagcactagtgttttcatagtccagcc

SEQ ID NO: 7012 - DNA, 110 bp, Homo sapiens
  source 1..110: mol_type = unassigned DNA
attgcatgctcatctgctggttgtttgtggacctctgctttctgaagacaaagaccaatgatgaattctgattaaacagtttctagcactagtgttttcatagtccagcc

SEQ ID NO: 7013 - DNA, 110 bp, Homo sapiens
  source 1..110: mol_type = unassigned DNA
ggctggactatgaaaacactagtgctagaaactgtttaatcagaattcatcattggtctttgtcttcagaaagcagaggtccacaaacaaccagcagatgagcatgcaat

SEQ ID NO: 7014 - RNA, 29 nt, Homo sapiens
  source 1..29: mol_type = unassigned RNA
ccaattccccagttgagcgaggctgctcg

SEQ ID NO: 7015 - DNA, 29 bp, Homo sapiens
  source 1..29: mol_type = unassigned DNA
ccaattccccagttgagcgaggctgctcg

SEQ ID NO: 7016 - DNA, 29 bp, Homo sapiens
  source 1..29: mol_type = unassigned DNA
cgagcagcctcgctcaactggggaattgg

SEQ ID NO: 7017 - RNA, 32 nt, Homo sapiens
  source 1..32: mol_type = unassigned RNA
attttacatgatcagcactgtcagatgagctc

SEQ ID NO: 7018 - DNA, 32 bp, Homo sapiens
  source 1..32: mol_type = unassigned DNA
attttacatgatcagcactgtcagatgagctc

SEQ ID NO: 7019 - DNA, 32 bp, Homo sapiens
  source 1..32: mol_type = unassigned DNA
gagctcatctgacagtgctgatcatgtaaaat

SEQ ID NO: 7020 - RNA, 35 nt, Homo sapiens
  source 1..35: mol_type = unassigned RNA
aactcttccagacaccaggtcacactgaggaatca

SEQ ID NO: 7021 - DNA, 35 bp, Homo sapiens
  source 1..35: mol_type = unassigned DNA
aactcttccagacaccaggtcacactgaggaatca

SEQ ID NO: 7022 - DNA, 35 bp, Homo sapiens
  source 1..35: mol_type = unassigned DNA
tgattcctcagtgtgacctggtgtctggaagagtt

SEQ ID NO: 7023 - RNA, 31 nt, Homo sapiens
  source 1..31: mol_type = unassigned RNA
gccattggctgtggtattgtagaaagcatac

SEQ ID NO: 7024 - DNA, 31 bp, Homo sapiens
  source 1..31: mol_type = unassigned DNA
gccattggctgtggtattgtagaaagcatac

SEQ ID NO: 7025 - DNA, 31 bp, Homo sapiens
  source 1..31: mol_type = unassigned DNA
gtatgctttctacaataccacagccaatggc

SEQ ID NO: 7026 - RNA, 51 nt, Homo sapiens
  source 1..51: mol_type = unassigned RNA
ttgtaatccactgaatatacaactgatagtgtaccaggctgaagatgttgc

SEQ ID NO: 7027 - DNA, 51 bp, Homo sapiens
  source 1..51: mol_type = unassigned DNA
ttgtaatccactgaatatacaactgatagtgtaccaggctgaagatgttgc

SEQ ID NO: 7028 - DNA, 51 bp, Homo sapiens
  source 1..51: mol_type = unassigned DNA
gcaacatcttcagcctggtacactatcagttgtatattcagtggattacaa

SEQ ID NO: 7029 - RNA, 29 nt, Homo sapiens
  source 1..29: mol_type = unassigned RNA
gagatcttcatccacagatagtgaatctc

SEQ ID NO: 7030 - DNA, 29 bp, Homo sapiens
  source 1..29: mol_type = unassigned DNA
gagatcttcatccacagatagtgaatctc

SEQ ID NO: 7031 - DNA, 29 bp, Homo sapiens
  source 1..29: mol_type = unassigned DNA
gagattcactatctgtggatgaagatctc

SEQ ID NO: 7032 - RNA, 32 nt, Homo sapiens
  source 1..32: mol_type = unassigned RNA
tgagaagcacccagagcacactgcaagcaggt

SEQ ID NO: 7033 - DNA, 32 bp, Homo sapiens
  source 1..32: mol_type = unassigned DNA
tgagaagcacccagagcacactgcaagcaggt

SEQ ID NO: 7034 - DNA, 32 bp, Homo sapiens
  source 1..32: mol_type = unassigned DNA
acctgcttgcagtgtgctctgggtgcttctca

SEQ ID NO: 7035 - RNA, 30 nt, Homo sapiens
  source 1..30: mol_type = unassigned RNA
agcccgctgctcactttccaccctctctcc

SEQ ID NO: 7036 - DNA, 30 bp, Homo sapiens
  source 1..30: mol_type = unassigned DNA
agcccgctgctcactttccaccctctctcc

SEQ ID NO: 7037 - DNA, 30 bp, Homo sapiens
  source 1..30: mol_type = unassigned DNA
ggagagagggtggaaagtgagcagcgggct

SEQ ID NO: 7038 - RNA, 198 nt, Homo sapiens
  source 1..198: mol_type = unassigned RNA
ttttaacaaaatgttcttcagtaacacatctcatgatctgaagattgtgttacaaaaaatattatcaggccaaaatttgttcggaatacactaatttttgctcctctatatgtgaggaaaatgagactagacagatttaagtaattgacaacttacttaaagtagcaaagtcatggattgtattgacttttaaaaata

SEQ ID NO: 7039 - DNA, 198 bp, Homo sapiens
  source 1..198: mol_type = unassigned DNA
ttttaacaaaatgttcttcagtaacacatctcatgatctgaagattgtgttacaaaaaatattatcaggccaaaatttgttcggaatacactaatttttgctcctctatatgtgaggaaaatgagactagacagatttaagtaattgacaacttacttaaagtagcaaagtcatggattgtattgacttttaaaaata

SEQ ID NO: 7040 - DNA, 198 bp, Homo sapiens
  source 1..198: mol_type = unassigned DNA
tatttttaaaagtcaatacaatccatgactttgctactttaagtaagttgtcaattacttaaatctgtctagtctcattttcctcacatatagaggagcaaaaattagtgtattccgaacaaattttggcctgataatattttttgtaacacaatcttcagatcatgagatgtgttactgaagaacattttgttaaaa

SEQ ID NO: 7041 - RNA, 68 nt, Homo sapiens
  source 1..68: mol_type = unassigned RNA
gggagtttggaagaagttgatgtcaacccccgtagatggctttatggggttcaagactttggcatagg

SEQ ID NO: 7042 - DNA, 68 bp, Homo sapiens
  source 1..68: mol_type = unassigned DNA
gggagtttggaagaagttgatgtcaacccccgtagatggctttatggggttcaagactttggcatagg

SEQ ID NO: 7043 - DNA, 68 bp, Homo sapiens
  source 1..68: mol_type = unassigned DNA
cctatgccaaagtcttgaaccccataaagccatctacgggggttgacatcaacttcttccaaactccc

SEQ ID NO: 7044 - RNA, 53 nt, Homo sapiens
  source 1..53: mol_type = unassigned RNA
caaatctgagggagctgagtaacaccatcgatcatgatgtagagtgtggttat

SEQ ID NO: 7045 - DNA, 53 bp, Homo sapiens
  source 1..53: mol_type = unassigned DNA
caaatctgagggagctgagtaacaccatcgatcatgatgtagagtgtggttat

SEQ ID NO: 7046 - DNA, 53 bp, Homo sapiens
  source 1..53: mol_type = unassigned DNA
ataaccacactctacatcatgatcgatggtgttactcagctccctcagatttg

SEQ ID NO: 7047 - RNA, 60 nt, Homo sapiens
  source 1..60: mol_type = unassigned RNA
atcccaattctgtcctaattttaccagatgctactggacttgaatggttaataaaattgc

SEQ ID NO: 7048 - DNA, 60 bp, Homo sapiens
  source 1..60: mol_type = unassigned DNA
atcccaattctgtcctaattttaccagatgctactggacttgaatggttaataaaattgc

SEQ ID NO: 7049 - DNA, 60 bp, Homo sapiens
  source 1..60: mol_type = unassigned DNA
gcaattttattaaccattcaagtccagtagcatctggtaaaattaggacagaattgggat

SEQ ID NO: 7050 - RNA, 29 nt, Homo sapiens
  source 1..29: mol_type = unassigned RNA
catccagtggactctggggcgcggccaca

SEQ ID NO: 7051 - DNA, 29 bp, Homo sapiens
  source 1..29: mol_type = unassigned DNA
catccagtggactctggggcgcggccaca

SEQ ID NO: 7052 - DNA, 29 bp, Homo sapiens
  source 1..29: mol_type = unassigned DNA
tgtggccgcgccccagagtccactggatg

SEQ ID NO: 7053 - RNA, 60 nt, Homo sapiens
  source 1..60: mol_type = unassigned RNA
ctgtacctagtgaactgtagcctaactggatgtgtgaacaggctgtaacctactcttgtg

SEQ ID NO: 7054 - DNA, 60 bp, Homo sapiens
  source 1..60: mol_type = unassigned DNA
ctgtacctagtgaactgtagcctaactggatgtgtgaacaggctgtaacctactcttgtg

SEQ ID NO: 7055 - DNA, 60 bp, Homo sapiens
  source 1..60: mol_type = unassigned DNA
cacaagagtaggttacagcctgttcacacatccagttaggctacagttcactaggtacag

SEQ ID NO: 7056 - RNA, 32 nt, Homo sapiens
  source 1..32: mol_type = unassigned RNA
cagaattccttgatcagaacagagggagcagg

SEQ ID NO: 7057 - DNA, 32 bp, Homo sapiens
  source 1..32: mol_type = unassigned DNA
cagaattccttgatcagaacagagggagcagg

SEQ ID NO: 7058 - DNA, 32 bp, Homo sapiens
  source 1..32: mol_type = unassigned DNA
cctgctccctctgttctgatcaaggaattctg

SEQ ID NO: 7059 - RNA, 27 nt, Homo sapiens
  source 1..27: mol_type = unassigned RNA
agtataaacaacacgtgaccagtcctg

SEQ ID NO: 7060 - DNA, 27 bp, Homo sapiens
  source 1..27: mol_type = unassigned DNA
agtataaacaacacgtgaccagtcctg

SEQ ID NO: 7061 - DNA, 27 bp, Homo sapiens
  source 1..27: mol_type = unassigned DNA
caggactggtcacgtgttgtttatact

SEQ ID NO: 7062 - RNA, 87 nt, Homo sapiens
  source 1..87: mol_type = unassigned RNA
taatatacatcgactttgtatggactggcttatgtaatgctgaggagaactgtatgagtaagtattgtcattatctccattttgcag

SEQ ID NO: 7063 - DNA, 87 bp, Homo sapiens
  source 1..87: mol_type = unassigned DNA
taatatacatcgactttgtatggactggcttatgtaatgctgaggagaactgtatgagtaagtattgtcattatctccattttgcag

SEQ ID NO: 7064 - DNA, 87 bp, Homo sapiens
  source 1..87: mol_type = unassigned DNA
ctgcaaaatggagataatgacaatacttactcatacagttctcctcagcattacataagccagtccatacaaagtcgatgtatatta

SEQ ID NO: 7065 - RNA, 57 nt, Homo sapiens
  source 1..57: mol_type = unassigned RNA
aagtgaaaatgtgattgtaaacagtggttattgaaagttccatctcgtatgaacgtt

SEQ ID NO: 7066 - DNA, 57 bp, Homo sapiens
  source 1..57: mol_type = unassigned DNA
aagtgaaaatgtgattgtaaacagtggttattgaaagttccatctcgtatgaacgtt

SEQ ID NO: 7067 - DNA, 57 bp, Homo sapiens
  source 1..57: mol_type = unassigned DNA
aacgttcatacgagatggaactttcaataaccactgtttacaatcacattttcactt

SEQ ID NO: 7068 - RNA, 29 nt, Homo sapiens
  source 1..29: mol_type = unassigned RNA
aaataaacaaccagttgagtcgacatctg

SEQ ID NO: 7069 - DNA, 29 bp, Homo sapiens
  source 1..29: mol_type = unassigned DNA
aaataaacaaccagttgagtcgacatctg

SEQ ID NO: 7070 - DNA, 29 bp, Homo sapiens
  source 1..29: mol_type = unassigned DNA
cagatgtcgactcaactggttgtttattt

SEQ ID NO: 7071 - RNA, 32 nt, Homo sapiens
  source 1..32: mol_type = unassigned RNA
gaaatagttgttggtctaaagatgcagaatat

SEQ ID NO: 7072 - DNA, 32 bp, Homo sapiens
  source 1..32: mol_type = unassigned DNA
gaaatagttgttggtctaaagatgcagaatat

SEQ ID NO: 7073 - DNA, 32 bp, Homo sapiens
  source 1..32: mol_type = unassigned DNA
atattctgcatctttagaccaacaactatttc

SEQ ID NO: 7074 - RNA, 159 nt, Homo sapiens
  source 1..159: mol_type = unassigned RNA
ttttaatgtgagatttataggacatttgtgtttctagtagtaccattaaatctctttccttatatctgcttatctttcacagatatgctatgactgtctggtactttgatgctgaagaaagggcagaagccaaaaagaaattcaggaatttaactagta

SEQ ID NO: 7075 - DNA, 159 bp, Homo sapiens
  source 1..159: mol_type = unassigned DNA
ttttaatgtgagatttataggacatttgtgtttctagtagtaccattaaatctctttccttatatctgcttatctttcacagatatgctatgactgtctggtactttgatgctgaagaaagggcagaagccaaaaagaaattcaggaatttaactagta

SEQ ID NO: 7076 - DNA, 159 bp, Homo sapiens
  source 1..159: mol_type = unassigned DNA
tactagttaaattcctgaatttctttttggcttctgccctttcttcagcatcaaagtaccagacagtcatagcatatctgtgaaagataagcagatataaggaaagagatttaatggtactactagaaacacaaatgtcctataaatctcacattaaaa

SEQ ID NO: 7077 - RNA, 27 nt, Homo sapiens
  source 1..27: mol_type = unassigned RNA
aaggtcagagtgttggctgcagaaaag

SEQ ID NO: 7078 - DNA, 27 bp, Homo sapiens
  source 1..27: mol_type = unassigned DNA
aaggtcagagtgttggctgcagaaaag

SEQ ID NO: 7079 - DNA, 27 bp, Homo sapiens
  source 1..27: mol_type = unassigned DNA
cttttctgcagccaacactctgacctt

SEQ ID NO: 7080 - RNA, 68 nt, Homo sapiens
  source 1..68: mol_type = unassigned RNA
agaataacgtttgtaatggtaaaactcattagtagtagtgtctgaaaaggaactgaggaactactgca

SEQ ID NO: 7081 - DNA, 68 bp, Homo sapiens
  source 1..68: mol_type = unassigned DNA
agaataacgtttgtaatggtaaaactcattagtagtagtgtctgaaaaggaactgaggaactactgca

SEQ ID NO: 7082 - DNA, 68 bp, Homo sapiens
  source 1..68: mol_type = unassigned DNA
tgcagtagttcctcagttccttttcagacactactactaatgagttttaccattacaaacgttattct

SEQ ID NO: 7083 - RNA, 105 nt, Homo sapiens
  source 1..105: mol_type = unassigned RNA
ggtgactacctcccctgcctcctaagaagtcatccctgaagcttcgtcatctggtacaccttttctgaatccaaagccacctttatcttgttttctgccttctgc

SEQ ID NO: 7084 - DNA, 105 bp, Homo sapiens
  source 1..105: mol_type = unassigned DNA
ggtgactacctcccctgcctcctaagaagtcatccctgaagcttcgtcatctggtacaccttttctgaatccaaagccacctttatcttgttttctgccttctgc

SEQ ID NO: 7085 - DNA, 105 bp, Homo sapiens
  source 1..105: mol_type = unassigned DNA
gcagaaggcagaaaacaagataaaggtggctttggattcagaaaaggtgtaccagatgacgaagcttcagggatgacttcttaggaggcaggggaggtagtcacc

SEQ ID NO: 7086 - RNA, 139 nt, Homo sapiens
  source 1..139: mol_type = unassigned RNA
acagtggcaaatggtatgtagtgcattttgtgaaagtctgtgcctgatgagaaagctgaaccccacaaatgctgttgattggaaagaccaataaatcaggctgtatttaggcataagtttggagggagaattttttgct

SEQ ID NO: 7087 - DNA, 139 bp, Homo sapiens
  source 1..139: mol_type = unassigned DNA
acagtggcaaatggtatgtagtgcattttgtgaaagtctgtgcctgatgagaaagctgaaccccacaaatgctgttgattggaaagaccaataaatcaggctgtatttaggcataagtttggagggagaattttttgct

SEQ ID NO: 7088 - DNA, 139 bp, Homo sapiens
  source 1..139: mol_type = unassigned DNA
agcaaaaaattctccctccaaacttatgcctaaatacagcctgatttattggtctttccaatcaacagcatttgtggggttcagctttctcatcaggcacagactttcacaaaatgcactacataccatttgccactgt

SEQ ID NO: 7089 - RNA, 41 nt, Homo sapiens
  source 1..41: mol_type = unassigned RNA
gtttgcaaagctagaactcaggcctctttatttcttggtct

SEQ ID NO: 7090 - DNA, 41 bp, Homo sapiens
  source 1..41: mol_type = unassigned DNA
gtttgcaaagctagaactcaggcctctttatttcttggtct

SEQ ID NO: 7091 - DNA, 41 bp, Homo sapiens
  source 1..41: mol_type = unassigned DNA
agaccaagaaataaagaggcctgagttctagctttgcaaac

SEQ ID NO: 7092 - RNA, 30 nt, Homo sapiens
  source 1..30: mol_type = unassigned RNA
gagcaagctttgacctttggaactgggcac

SEQ ID NO: 7093 - DNA, 30 bp, Homo sapiens
  source 1..30: mol_type = unassigned DNA
gagcaagctttgacctttggaactgggcac

SEQ ID NO: 7094 - DNA, 30 bp, Homo sapiens
  source 1..30: mol_type = unassigned DNA
gtgcccagttccaaaggtcaaagcttgctc

SEQ ID NO: 7095 - RNA, 59 nt, Homo sapiens
  source 1..59: mol_type = unassigned RNA
tctttctcctgctccaaggacaaatgtgaccctaagttatggacttgatgaatgacttt

SEQ ID NO: 7096 - DNA, 59 bp, Homo sapiens
  source 1..59: mol_type = unassigned DNA
tctttctcctgctccaaggacaaatgtgaccctaagttatggacttgatgaatgacttt

SEQ ID NO: 7097 - DNA, 59 bp, Homo sapiens
  source 1..59: mol_type = unassigned DNA
aaagtcattcatcaagtccataacttagggtcacatttgtccttggagcaggagaaaga

SEQ ID NO: 7098 - RNA, 61 nt, Homo sapiens
  source 1..61: mol_type = unassigned RNA
acactttcctctgaccatggcttggatgccctcaggggtgctgacccctgccaggccacga

SEQ ID NO: 7099 - DNA, 61 bp, Homo sapiens
  source 1..61: mol_type = unassigned DNA
acactttcctctgaccatggcttggatgccctcaggggtgctgacccctgccaggccacga

SEQ ID NO: 7100 - DNA, 61 bp, Homo sapiens
  source 1..61: mol_type = unassigned DNA
tcgtggcctggcaggggtcagcacccctgagggcatccaagccatggtcagaggaaagtgt

SEQ ID NO: 7101 - RNA, 29 nt, Homo sapiens
  source 1..29: mol_type = unassigned RNA
tttcctgggatcagcctgaccacgctcca

SEQ ID NO: 7102 - DNA, 29 bp, Homo sapiens
  source 1..29: mol_type = unassigned DNA
tttcctgggatcagcctgaccacgctcca

SEQ ID NO: 7103 - DNA, 29 bp, Homo sapiens
  source 1..29: mol_type = unassigned DNA
tggagcgtggtcaggctgatcccaggaaa

SEQ ID NO: 7104 - RNA, 40 nt, Homo sapiens
  source 1..40: mol_type = unassigned RNA
aagaatctgtgaaacactctgataaactcaatggcaacct

SEQ ID NO: 7105 - DNA, 40 bp, Homo sapiens
  source 1..40: mol_type = unassigned DNA
aagaatctgtgaaacactctgataaactcaatggcaacct

SEQ ID NO: 7106 - DNA, 40 bp, Homo sapiens
  source 1..40: mol_type = unassigned DNA
aggttgccattgagtttatcagagtgtttcacagattctt

SEQ ID NO: 7107 - RNA, 53 nt, Homo sapiens
  source 1..53: mol_type = unassigned RNA
aaaaatctgtcaagcctgaagtacaaatgggttgggactaaaaaaaaaaaata

SEQ ID NO: 7108 - DNA, 53 bp, Homo sapiens
  source 1..53: mol_type = unassigned DNA
aaaaatctgtcaagcctgaagtacaaatgggttgggactaaaaaaaaaaaata

SEQ ID NO: 7109 - DNA, 53 bp, Homo sapiens
  source 1..53: mol_type = unassigned DNA
tattttttttttttagtcccaacccatttgtacttcaggcttgacagattttt

SEQ ID NO: 7110 - RNA, 34 nt, Homo sapiens
  source 1..34: mol_type = unassigned RNA
ctggtcattcagactgatgttcagctcctacttt

SEQ ID NO: 7111 - DNA, 34 bp, Homo sapiens
  source 1..34: mol_type = unassigned DNA
ctggtcattcagactgatgttcagctcctacttt

SEQ ID NO: 7112 - DNA, 34 bp, Homo sapiens
  source 1..34: mol_type = unassigned DNA
aaagtaggagctgaacatcagtctgaatgaccag

SEQ ID NO: 7113 - RNA, 27 nt, Homo sapiens
  source 1..27: mol_type = unassigned RNA
cccgcctctgctgggagaccggacggt

SEQ ID NO: 7114 - DNA, 27 bp, Homo sapiens
  source 1..27: mol_type = unassigned DNA
cccgcctctgctgggagaccggacggt

SEQ ID NO: 7115 - DNA, 27 bp, Homo sapiens
  source 1..27: mol_type = unassigned DNA
accgtccggtctcccagcagaggcggg

SEQ ID NO: 7116 - RNA, 102 nt, Homo sapiens
  source 1..102: mol_type = unassigned RNA
aacaagttctttttacagtcccagtacacttacaataagcataaaataagactgtagcaactttttgtcctacctctgtgacttgatatatacactgggaac

SEQ ID NO: 7117 - DNA, 102 bp, Homo sapiens
  source 1..102: mol_type = unassigned DNA
aacaagttctttttacagtcccagtacacttacaataagcataaaataagactgtagcaactttttgtcctacctctgtgacttgatatatacactgggaac

SEQ ID NO: 7118 - DNA, 102 bp, Homo sapiens
  source 1..102: mol_type = unassigned DNA
gttcccagtgtatatatcaagtcacagaggtaggacaaaaagttgctacagtcttattttatgcttattgtaagtgtactgggactgtaaaaagaacttgtt

SEQ ID NO: 7119 - RNA, 32 nt, Homo sapiens
  source 1..32: mol_type = unassigned RNA
tgcatctcattgatctcggcagctgtgtgaaa

SEQ ID NO: 7120 - DNA, 32 bp, Homo sapiens
  source 1..32: mol_type = unassigned DNA
tgcatctcattgatctcggcagctgtgtgaaa

SEQ ID NO: 7121 - DNA, 32 bp, Homo sapiens
  source 1..32: mol_type = unassigned DNA
tttcacacagctgccgagatcaatgagatgca

SEQ ID NO: 7122 - RNA, 39 nt, Homo sapiens
  source 1..39: mol_type = unassigned RNA
aactcttccagcagagagaactgtgggtcagaaagaaat

SEQ ID NO: 7123 - DNA, 39 bp, Homo sapiens
  source 1..39: mol_type = unassigned DNA
aactcttccagcagagagaactgtgggtcagaaagaaat

SEQ ID NO: 7124 - DNA, 39 bp, Homo sapiens
  source 1..39: mol_type = unassigned DNA
atttctttctgacccacagttctctctgctggaagagtt

SEQ ID NO: 7125 - RNA, 35 nt, Homo sapiens
  source 1..35: mol_type = unassigned RNA
ttaatatcatgatggatcttaagaagtgctgcaac

SEQ ID NO: 7126 - DNA, 35 bp, Homo sapiens
  source 1..35: mol_type = unassigned DNA
ttaatatcatgatggatcttaagaagtgctgcaac

SEQ ID NO: 7127 - DNA, 35 bp, Homo sapiens
  source 1..35: mol_type = unassigned DNA
gttgcagcacttcttaagatccatcatgatattaa

SEQ ID NO: 7128 - RNA, 36 nt, Homo sapiens
  source 1..36: mol_type = unassigned RNA
gggcatttcttccactggtataactcaaaatgtctt

SEQ ID NO: 7129 - DNA, 36 bp, Homo sapiens
  source 1..36: mol_type = unassigned DNA
gggcatttcttccactggtataactcaaaatgtctt

SEQ ID NO: 7130 - DNA, 36 bp, Homo sapiens
  source 1..36: mol_type = unassigned DNA
aagacattttgagttataccagtggaagaaatgccc

SEQ ID NO: 7131 - RNA, 105 nt, Homo sapiens
  source 1..105: mol_type = unassigned RNA
ataattttttgtggtgaggaggctttctagaaaattctgaaactggatttagaattggcaaaaactggaaaattctgaaagagctgtaacactgataattttata

SEQ ID NO: 7132 - DNA, 105 bp, Homo sapiens
  source 1..105: mol_type = unassigned DNA
ataattttttgtggtgaggaggctttctagaaaattctgaaactggatttagaattggcaaaaactggaaaattctgaaagagctgtaacactgataattttata

SEQ ID NO: 7133 - DNA, 105 bp, Homo sapiens
  source 1..105: mol_type = unassigned DNA
tataaaattatcagtgttacagctctttcagaattttccagtttttgccaattctaaatccagtttcagaattttctagaaagcctcctcaccacaaaaaattat

SEQ ID NO: 7134 - RNA, 101 nt, Homo sapiens
  source 1..101: mol_type = unassigned RNA
tctaaaatgatccagttattggtacggtttgcaagctgccaggtggaggtcatgtagtccattttaaactgcttaccactgtatcgtccatccttataact

SEQ ID NO: 7135 - DNA, 101 bp, Homo sapiens
  source 1..101: mol_type = unassigned DNA
tctaaaatgatccagttattggtacggtttgcaagctgccaggtggaggtcatgtagtccattttaaactgcttaccactgtatcgtccatccttataact

SEQ ID NO: 7136 - DNA, 101 bp, Homo sapiens
  source 1..101: mol_type = unassigned DNA
agttataaggatggacgatacagtggtaagcagtttaaaatggactacatgacctccacctggcagcttgcaaaccgtaccaataactggatcattttaga

SEQ ID NO: 7137 - RNA, 29 nt, Homo sapiens
  source 1..29: mol_type = unassigned RNA
accccttctgtgaacactgaaagctattc

SEQ ID NO: 7138 - DNA, 29 bp, Homo sapiens
  source 1..29: mol_type = unassigned DNA
accccttctgtgaacactgaaagctattc

SEQ ID NO: 7139 - DNA, 29 bp, Homo sapiens
  source 1..29: mol_type = unassigned DNA
gaatagctttcagtgttcacagaaggggt

SEQ ID NO: 7140 - RNA, 29 nt, Homo sapiens
  source 1..29: mol_type = unassigned RNA
gagcaggtcgtctgcctgcggtgcttcca

SEQ ID NO: 7141 - DNA, 29 bp, Homo sapiens
  source 1..29: mol_type = unassigned DNA
gagcaggtcgtctgcctgcggtgcttcca

SEQ ID NO: 7142 - DNA, 29 bp, Homo sapiens
  source 1..29: mol_type = unassigned DNA
tggaagcaccgcaggcagacgacctgctc

SEQ ID NO: 7143 - RNA, 30 nt, Homo sapiens
  source 1..30: mol_type = unassigned RNA
gggccggttcccagccgccagcctgcagct

SEQ ID NO: 7144 - DNA, 30 bp, Homo sapiens
  source 1..30: mol_type = unassigned DNA
gggccggttcccagccgccagcctgcagct

SEQ ID NO: 7145 - DNA, 30 bp, Homo sapiens
  source 1..30: mol_type = unassigned DNA
agctgcaggctggcggctgggaaccggccc

SEQ ID NO: 7146 - RNA, 29 nt, Homo sapiens
  source 1..29: mol_type = unassigned RNA
cttggaataagtgtcgacctgagacagaa

SEQ ID NO: 7147 - DNA, 29 bp, Homo sapiens
  source 1..29: mol_type = unassigned DNA
cttggaataagtgtcgacctgagacagaa

SEQ ID NO: 7148 - DNA, 29 bp, Homo sapiens
  source 1..29: mol_type = unassigned DNA
ttctgtctcaggtcgacacttattccaag

SEQ ID NO: 7149 - RNA, 28 nt, Homo sapiens
  source 1..28: mol_type = unassigned RNA
cttttttctttatttctcctgacacttg

SEQ ID NO: 7150 - DNA, 28 bp, Homo sapiens
  source 1..28: mol_type = unassigned DNA
cttttttctttatttctcctgacacttg

SEQ ID NO: 7151 - DNA, 28 bp, Homo sapiens
  source 1..28: mol_type = unassigned DNA
caagtgtcaggagaaataaagaaaaaag

SEQ ID NO: 7152 - RNA, 27 nt, Homo sapiens
  source 1..27: mol_type = unassigned RNA
ttttttctttctgctcctctgataggg

SEQ ID NO: 7153 - DNA, 27 bp, Homo sapiens
  source 1..27: mol_type = unassigned DNA
ttttttctttctgctcctctgataggg

SEQ ID NO: 7154 - DNA, 27 bp, Homo sapiens
  source 1..27: mol_type = unassigned DNA
ccctatcagaggagcagaaagaaaaaa

SEQ ID NO: 7155 - RNA, 31 nt, Homo sapiens
  source 1..31: mol_type = unassigned RNA
gatgctggtgcccctggagctcccggtagcc

SEQ ID NO: 7156 - DNA, 31 bp, Homo sapiens
  source 1..31: mol_type = unassigned DNA
gatgctggtgcccctggagctcccggtagcc

SEQ ID NO: 7157 - DNA, 31 bp, Homo sapiens
  source 1..31: mol_type = unassigned DNA
ggctaccgggagctccaggggcaccagcatc

SEQ ID NO: 7158 - RNA, 30 nt, Homo sapiens
  source 1..30: mol_type = unassigned RNA
gccgaaaggactgcaggctctgcgaccccc

SEQ ID NO: 7159 - DNA, 30 bp, Homo sapiens
  source 1..30: mol_type = unassigned DNA
gccgaaaggactgcaggctctgcgaccccc

SEQ ID NO: 7160 - DNA, 30 bp, Homo sapiens
  source 1..30: mol_type = unassigned DNA
gggggtcgcagagcctgcagtcctttcggc

SEQ ID NO: 7161 - RNA, 32 nt, Homo sapiens
  source 1..32: mol_type = unassigned RNA
atgaaacttactgtggacctgccgcagagtct

SEQ ID NO: 7162 - DNA, 32 bp, Homo sapiens
  source 1..32: mol_type = unassigned DNA
atgaaacttactgtggacctgccgcagagtct

SEQ ID NO: 7163 - DNA, 32 bp, Homo sapiens
  source 1..32: mol_type = unassigned DNA
agactctgcggcaggtccacagtaagtttcat

SEQ ID NO: 7164 - RNA, 30 nt, Homo sapiens
  source 1..30: mol_type = unassigned RNA
agggcgcgtgtagccgccgggccagcgagc

SEQ ID NO: 7165 - DNA, 30 bp, Homo sapiens
  source 1..30: mol_type = unassigned DNA
agggcgcgtgtagccgccgggccagcgagc

SEQ ID NO: 7166 - DNA, 30 bp, Homo sapiens
  source 1..30: mol_type = unassigned DNA
gctcgctggcccggcggctacacgcgccct

SEQ ID NO: 7167 - RNA, 22 nt, Homo sapiens
  source 1..22: mol_type = unassigned RNA
tatatcaatggtgaattcacat

SEQ ID NO: 7168 - DNA, 22 bp, Homo sapiens
  source 1..22: mol_type = unassigned DNA
tatatcaatggtgaattcacat

SEQ ID NO: 7169 - DNA, 22 bp, Homo sapiens
  source 1..22: mol_type = unassigned DNA
atgtgaattcaccattgatata

SEQ ID NO: 7170 - RNA, 137 nt, Homo sapiens
  source 1..137: mol_type = unassigned RNA
aagcctgggcaatggcgggcgcccctcccccagcctcattgccgccttgcagattgatctcagactgctgtactagcaatcagcgagactccgtgggcgtaggaccctcagagccaggtgcgggatatagtctcgtg

SEQ ID NO: 7171 - DNA, 137 bp, Homo sapiens
  source 1..137: mol_type = unassigned DNA
aagcctgggcaatggcgggcgcccctcccccagcctcattgccgccttgcagattgatctcagactgctgtactagcaatcagcgagactccgtgggcgtaggaccctcagagccaggtgcgggatatagtctcgtg

SEQ ID NO: 7172 - DNA, 137 bp, Homo sapiens
  source 1..137: mol_type = unassigned DNA
cacgagactatatcccgcacctggctctgagggtcctacgcccacggagtctcgctgattgctagtacagcagtctgagatcaatctgcaaggcggcaatgaggctgggggaggggcgcccgccattgcccaggctt

SEQ ID NO: 7173 - RNA, 29 nt, Homo sapiens
  source 1..29: mol_type = unassigned RNA
gcgcactctgcaaattcatcacccgcatc

SEQ ID NO: 7174 - DNA, 29 bp, Homo sapiens
  source 1..29: mol_type = unassigned DNA
gcgcactctgcaaattcatcacccgcatc

SEQ ID NO: 7175 - DNA, 29 bp, Homo sapiens
  source 1..29: mol_type = unassigned DNA
gatgcgggtgatgaatttgcagagtgcgc

SEQ ID NO: 7176 - RNA, 44 nt, Homo sapiens
  source 1..44: mol_type = unassigned RNA
gatgtttgggctatagtggtgaacgaaactggtaaattccctgc

SEQ ID NO: 7177 - DNA, 44 bp, Homo sapiens
  source 1..44: mol_type = unassigned DNA
gatgtttgggctatagtggtgaacgaaactggtaaattccctgc

SEQ ID NO: 7178 - DNA, 44 bp, Homo sapiens
  source 1..44: mol_type = unassigned DNA
gcagggaatttaccagtttcgttcaccactatagcccaaacatc

SEQ ID NO: 7179 - RNA, 37 nt, Homo sapiens
  source 1..37: mol_type = unassigned RNA
gagataaaggagccagcatgttagggttctgatgagg

SEQ ID NO: 7180 - DNA, 37 bp, Homo sapiens
  source 1..37: mol_type = unassigned DNA
gagataaaggagccagcatgttagggttctgatgagg

SEQ ID NO: 7181 - DNA, 37 bp, Homo sapiens
  source 1..37: mol_type = unassigned DNA
cctcatcagaaccctaacatgctggctcctttatctc

SEQ ID NO: 7182 - RNA, 63 nt, Homo sapiens
  source 1..63: mol_type = unassigned RNA
atatagtacatagtgaactgtagcctaactgaatgtgtgaacaggctgtaacctactcttgtg

SEQ ID NO: 7183 - DNA, 63 bp, Homo sapiens
  source 1..63: mol_type = unassigned DNA
atatagtacatagtgaactgtagcctaactgaatgtgtgaacaggctgtaacctactcttgtg

SEQ ID NO: 7184 - DNA, 63 bp, Homo sapiens
  source 1..63: mol_type = unassigned DNA
cacaagagtaggttacagcctgttcacacattcagttaggctacagttcactatgtactatat

SEQ ID NO: 7185 - RNA, 40 nt, Homo sapiens
  source 1..40: mol_type = unassigned RNA
cttcttgtggatttaaatactactgcagtgtatgctgggt

SEQ ID NO: 7186 - DNA, 40 bp, Homo sapiens
  source 1..40: mol_type = unassigned DNA
cttcttgtggatttaaatactactgcagtgtatgctgggt

SEQ ID NO: 7187 - DNA, 40 bp, Homo sapiens
  source 1..40: mol_type = unassigned DNA
acccagcatacactgcagtagtatttaaatccacaagaag

SEQ ID NO: 7188 - RNA, 26 nt, Homo sapiens
  source 1..26: mol_type = unassigned RNA
cagagttttgattatgaccatgatgc

SEQ ID NO: 7189 - DNA, 26 bp, Homo sapiens
  source 1..26: mol_type = unassigned DNA
cagagttttgattatgaccatgatgc

SEQ ID NO: 7190 - DNA, 26 bp, Homo sapiens
  source 1..26: mol_type = unassigned DNA
gcatcatggtcataatcaaaactctg

SEQ ID NO: 7191 - RNA, 31 nt, Homo sapiens
  source 1..31: mol_type = unassigned RNA
gggtctcgctggatgaggacaatgaccggta

SEQ ID NO: 7192 - DNA, 31 bp, Homo sapiens
  source 1..31: mol_type = unassigned DNA
gggtctcgctggatgaggacaatgaccggta

SEQ ID NO: 7193 - DNA, 31 bp, Homo sapiens
  source 1..31: mol_type = unassigned DNA
taccggtcattgtcctcatccagcgagaccc

SEQ ID NO: 7194 - RNA, 31 nt, Homo sapiens
  source 1..31: mol_type = unassigned RNA
aggctggggagggcttgggactcggccccgg

SEQ ID NO: 7195 - DNA, 31 bp, Homo sapiens
  source 1..31: mol_type = unassigned DNA
aggctggggagggcttgggactcggccccgg

SEQ ID NO: 7196 - DNA, 31 bp, Homo sapiens
  source 1..31: mol_type = unassigned DNA
ccggggccgagtcccaagccctccccagcct

SEQ ID NO: 7197 - RNA, 29 nt, Homo sapiens
  source 1..29: mol_type = unassigned RNA
caggtctgcagagccggaggaccagcctg

SEQ ID NO: 7198 - DNA, 29 bp, Homo sapiens
  source 1..29: mol_type = unassigned DNA
caggtctgcagagccggaggaccagcctg

SEQ ID NO: 7199 - DNA, 29 bp, Homo sapiens
  source 1..29: mol_type = unassigned DNA
caggctggtcctccggctctgcagacctg

SEQ ID NO: 7200 - RNA, 27 nt, Homo sapiens
  source 1..27: mol_type = unassigned RNA
tttctcaaatggtagaactcttagcat

SEQ ID NO: 7201 - DNA, 27 bp, Homo sapiens
  source 1..27: mol_type = unassigned DNA
tttctcaaatggtagaactcttagcat

SEQ ID NO: 7202 - DNA, 27 bp, Homo sapiens
  source 1..27: mol_type = unassigned DNA
atgctaagagttctaccatttgagaaa

SEQ ID NO: 7203 - RNA, 30 nt, Homo sapiens
  source 1..30: mol_type = unassigned RNA
cagcagtgactgtgggcttcctaagtgcca

SEQ ID NO: 7204 - DNA, 30 bp, Homo sapiens
  source 1..30: mol_type = unassigned DNA
cagcagtgactgtgggcttcctaagtgcca

SEQ ID NO: 7205 - DNA, 30 bp, Homo sapiens
  source 1..30: mol_type = unassigned DNA
tggcacttaggaagcccacagtcactgctg

SEQ ID NO: 7206 - RNA, 41 nt, Homo sapiens
  source 1..41: mol_type = unassigned RNA
gtggcatgatcatgactcactgaagccttgaacacctgggc

SEQ ID NO: 7207 - DNA, 41 bp, Homo sapiens
  source 1..41: mol_type = unassigned DNA
gtggcatgatcatgactcactgaagccttgaacacctgggc

SEQ ID NO: 7208 - DNA, 41 bp, Homo sapiens
  source 1..41: mol_type = unassigned DNA
gcccaggtgttcaaggcttcagtgagtcatgatcatgccac

SEQ ID NO: 7209 - RNA, 23 nt, Homo sapiens
  source 1..23: mol_type = unassigned RNA
tcccccctacccccaccatttat

SEQ ID NO: 7210 - DNA, 23 bp, Homo sapiens
  source 1..23: mol_type = unassigned DNA
tcccccctacccccaccatttat

SEQ ID NO: 7211 - DNA, 23 bp, Homo sapiens
  source 1..23: mol_type = unassigned DNA
ataaatggtgggggtagggggga

SEQ ID NO: 7212 - RNA, 37 nt, Homo sapiens
  source 1..37: mol_type = unassigned RNA
gcaagaagaaatgatgaacatctgaccttcaactagt

SEQ ID NO: 7213 - DNA, 37 bp, Homo sapiens
  source 1..37: mol_type = unassigned DNA
gcaagaagaaatgatgaacatctgaccttcaactagt

SEQ ID NO: 7214 - DNA, 37 bp, Homo sapiens
  source 1..37: mol_type = unassigned DNA
actagttgaaggtcagatgttcatcatttcttcttgc

SEQ ID NO: 7215 - RNA, 29 nt, Homo sapiens
  source 1..29: mol_type = unassigned RNA
gctctcaaggctgagtttgaccggcctgt

SEQ ID NO: 7216 - DNA, 29 bp, Homo sapiens
  source 1..29: mol_type = unassigned DNA
gctctcaaggctgagtttgaccggcctgt

SEQ ID NO: 7217 - DNA, 29 bp, Homo sapiens
  source 1..29: mol_type = unassigned DNA
acaggccggtcaaactcagccttgagagc

SEQ ID NO: 7218 - RNA, 29 nt, Homo sapiens
  source 1..29: mol_type = unassigned RNA
gacactgattgttgtgcctgacgtctcca

SEQ ID NO: 7219 - DNA, 29 bp, Homo sapiens
  source 1..29: mol_type = unassigned DNA
gacactgattgttgtgcctgacgtctcca

SEQ ID NO: 7220 - DNA, 29 bp, Homo sapiens
  source 1..29: mol_type = unassigned DNA
tggagacgtcaggcacaacaatcagtgtc

SEQ ID NO: 7221 - RNA, 140 nt, Homo sapiens
  source 1..140: mol_type = unassigned RNA
ctctgtgtctagctaatctggtggggacttggagaacttttgtgtctagctaaaggattgtaaacagaccaagcagctctctgtaaaatgaacccatcagctctctatgaaatggaccgatcatcaggatgtgggtgggg

SEQ ID NO: 7222 - DNA, 140 bp, Homo sapiens
  source 1..140: mol_type = unassigned DNA
ctctgtgtctagctaatctggtggggacttggagaacttttgtgtctagctaaaggattgtaaacagaccaagcagctctctgtaaaatgaacccatcagctctctatgaaatggaccgatcatcaggatgtgggtgggg

SEQ ID NO: 7223 - DNA, 140 bp, Homo sapiens
  source 1..140: mol_type = unassigned DNA
ccccacccacatcctgatgatcggtccatttcatagagagctgatgggttcattttacagagagctgcttggtctgtttacaatcctttagctagacacaaaagttctccaagtccccaccagattagctagacacagag

SEQ ID NO: 7224 - RNA, 51 nt, Homo sapiens
  source 1..51: mol_type = unassigned RNA
taaactctgtgctgggagactcttctgcttctgagccaggcttgcaggcag

SEQ ID NO: 7225 - DNA, 51 bp, Homo sapiens
  source 1..51: mol_type = unassigned DNA
taaactctgtgctgggagactcttctgcttctgagccaggcttgcaggcag

SEQ ID NO: 7226 - DNA, 51 bp, Homo sapiens
  source 1..51: mol_type = unassigned DNA
ctgcctgcaagcctggctcagaagcagaagagtctcccagcacagagttta

SEQ ID NO: 7227 - RNA, 30 nt, Homo sapiens
  source 1..30: mol_type = unassigned RNA
cttcttctcagacaatgcctgtggaagaca

SEQ ID NO: 7228 - DNA, 30 bp, Homo sapiens
  source 1..30: mol_type = unassigned DNA
cttcttctcagacaatgcctgtggaagaca

SEQ ID NO: 7229 - DNA, 30 bp, Homo sapiens
  source 1..30: mol_type = unassigned DNA
tgtcttccacaggcattgtctgagaagaag

SEQ ID NO: 7230 - RNA, 29 nt, Homo sapiens
  source 1..29: mol_type = unassigned RNA
taatgtattaggttgttcttgttgtttta

SEQ ID NO: 7231 - DNA, 29 bp, Homo sapiens
  source 1..29: mol_type = unassigned DNA
taatgtattaggttgttcttgttgtttta

SEQ ID NO: 7232 - DNA, 29 bp, Homo sapiens
  source 1..29: mol_type = unassigned DNA
taaaacaacaagaacaacctaatacatta

SEQ ID NO: 7233 - RNA, 28 nt, Homo sapiens
  source 1..28: mol_type = unassigned RNA
tgttagacatcctctcgggctgccgtcg

SEQ ID NO: 7234 - DNA, 28 bp, Homo sapiens
  source 1..28: mol_type = unassigned DNA
tgttagacatcctctcgggctgccgtcg

SEQ ID NO: 7235 - DNA, 28 bp, Homo sapiens
  source 1..28: mol_type = unassigned DNA
cgacggcagcccgagaggatgtctaaca

SEQ ID NO: 7236 - RNA, 52 nt, Homo sapiens
  source 1..52: mol_type = unassigned RNA
cgctcacccacgggactccaggccccttccccacccgccctgccagccttgc

SEQ ID NO: 7237 - DNA, 52 bp, Homo sapiens
  source 1..52: mol_type = unassigned DNA
cgctcacccacgggactccaggccccttccccacccgccctgccagccttgc

SEQ ID NO: 7238 - DNA, 52 bp, Homo sapiens
  source 1..52: mol_type = unassigned DNA
gcaaggctggcagggcgggtggggaaggggcctggagtcccgtgggtgagcg

SEQ ID NO: 7239 - RNA, 31 nt, Homo sapiens
  source 1..31: mol_type = unassigned RNA
cgagttcagagctcccagaacttcgcgcccc

SEQ ID NO: 7240 - DNA, 31 bp, Homo sapiens
  source 1..31: mol_type = unassigned DNA
cgagttcagagctcccagaacttcgcgcccc

SEQ ID NO: 7241 - DNA, 31 bp, Homo sapiens
  source 1..31: mol_type = unassigned DNA
ggggcgcgaagttctgggagctctgaactcg

SEQ ID NO: 7242 - RNA, 30 nt, Homo sapiens
  source 1..30: mol_type = unassigned RNA
gagctgctgtctgatcacgggcctgggcgg

SEQ ID NO: 7243 - DNA, 30 bp, Homo sapiens
  source 1..30: mol_type = unassigned DNA
gagctgctgtctgatcacgggcctgggcgg

SEQ ID NO: 7244 - DNA, 30 bp, Homo sapiens
  source 1..30: mol_type = unassigned DNA
ccgcccaggcccgtgatcagacagcagctc

SEQ ID NO: 7245 - RNA, 126 nt, Homo sapiens
  source 1..126: mol_type = unassigned RNA
ttccctgtttttctgtacttcctagcatagttgtgaacttgatttttcaaaaaagaaggaaatgtaagtacttcctggactgagggatgactgagttaggactgattgtccagtgtcttgagtcag

SEQ ID NO: 7246 - DNA, 126 bp, Homo sapiens
  source 1..126: mol_type = unassigned DNA
ttccctgtttttctgtacttcctagcatagttgtgaacttgatttttcaaaaaagaaggaaatgtaagtacttcctggactgagggatgactgagttaggactgattgtccagtgtcttgagtcag

SEQ ID NO: 7247 - DNA, 126 bp, Homo sapiens
  source 1..126: mol_type = unassigned DNA
ctgactcaagacactggacaatcagtcctaactcagtcatccctcagtccaggaagtacttacatttccttcttttttgaaaaatcaagttcacaactatgctaggaagtacagaaaaacagggaa

SEQ ID NO: 7248 - RNA, 34 nt, Homo sapiens
  source 1..34: mol_type = unassigned RNA
gagaagatgaggatgatatgagctctgagagggg

SEQ ID NO: 7249 - DNA, 34 bp, Homo sapiens
  source 1..34: mol_type = unassigned DNA
gagaagatgaggatgatatgagctctgagagggg

SEQ ID NO: 7250 - DNA, 34 bp, Homo sapiens
  source 1..34: mol_type = unassigned DNA
cccctctcagagctcatatcatcctcatcttctc

SEQ ID NO: 7251 - RNA, 32 nt, Homo sapiens
  source 1..32: mol_type = unassigned RNA
tcattctctgggcctacggtgggcatggccat

SEQ ID NO: 7252 - DNA, 32 bp, Homo sapiens
  source 1..32: mol_type = unassigned DNA
tcattctctgggcctacggtgggcatggccat

SEQ ID NO: 7253 - DNA, 32 bp, Homo sapiens
  source 1..32: mol_type = unassigned DNA
atggccatgcccaccgtaggcccagagaatga

SEQ ID NO: 7254 - RNA, 34 nt, Homo sapiens
  source 1..34: mol_type = unassigned RNA
ctgccctgggacaactgtgggctggggctctggt

SEQ ID NO: 7255 - DNA, 34 bp, Homo sapiens
  source 1..34: mol_type = unassigned DNA
ctgccctgggacaactgtgggctggggctctggt

SEQ ID NO: 7256 - DNA, 34 bp, Homo sapiens
  source 1..34: mol_type = unassigned DNA
accagagccccagcccacagttgtcccagggcag

SEQ ID NO: 7257 - RNA, 31 nt, Homo sapiens
  source 1..31: mol_type = unassigned RNA
aatccagtttcaggaggattgccagaaggta

SEQ ID NO: 7258 - DNA, 31 bp, Homo sapiens
  source 1..31: mol_type = unassigned DNA
aatccagtttcaggaggattgccagaaggta

SEQ ID NO: 7259 - DNA, 31 bp, Homo sapiens
  source 1..31: mol_type = unassigned DNA
taccttctggcaatcctcctgaaactggatt

SEQ ID NO: 7260 - RNA, 57 nt, Homo sapiens
  source 1..57: mol_type = unassigned RNA
tctaaagttcttcaaatgaagcagcagccagaaggatcttgtctctagaatactaaa

SEQ ID NO: 7261 - DNA, 57 bp, Homo sapiens
  source 1..57: mol_type = unassigned DNA
tctaaagttcttcaaatgaagcagcagccagaaggatcttgtctctagaatactaaa

SEQ ID NO: 7262 - DNA, 57 bp, Homo sapiens
  source 1..57: mol_type = unassigned DNA
tttagtattctagagacaagatccttctggctgctgcttcatttgaagaactttaga

SEQ ID NO: 7263 - RNA, 31 nt, Homo sapiens
  source 1..31: mol_type = unassigned RNA
gaagccgcgtggggaccgcagggccaggacg

SEQ ID NO: 7264 - DNA, 31 bp, Homo sapiens
  source 1..31: mol_type = unassigned DNA
gaagccgcgtggggaccgcagggccaggacg

SEQ ID NO: 7265 - DNA, 31 bp, Homo sapiens
  source 1..31: mol_type = unassigned DNA
cgtcctggccctgcggtccccacgcggcttc

SEQ ID NO: 7266 - RNA, 57 nt, Homo sapiens
  source 1..57: mol_type = unassigned RNA
tttgtttataaattacctgtattagtttgtatctttatagctgtgtgaaaatggact

SEQ ID NO: 7267 - DNA, 57 bp, Homo sapiens
  source 1..57: mol_type = unassigned DNA
tttgtttataaattacctgtattagtttgtatctttatagctgtgtgaaaatggact

SEQ ID NO: 7268 - DNA, 57 bp, Homo sapiens
  source 1..57: mol_type = unassigned DNA
agtccattttcacacagctataaagatacaaactaatacaggtaatttataaacaaa

SEQ ID NO: 7269 - RNA, 97 nt, Homo sapiens
  source 1..97: mol_type = unassigned RNA
ccaacagaacagatcctcgctccatgaactcccatgtgttcactggaaatctcaacactcttgtggtcaagaagtgtgatgtggaggcaatcttttc

SEQ ID NO: 7270 - DNA, 97 bp, Homo sapiens
  source 1..97: mol_type = unassigned DNA
ccaacagaacagatcctcgctccatgaactcccatgtgttcactggaaatctcaacactcttgtggtcaagaagtgtgatgtggaggcaatcttttc

SEQ ID NO: 7271 - DNA, 97 bp, Homo sapiens
  source 1..97: mol_type = unassigned DNA
gaaaagattgcctccacatcacacttcttgaccacaagagtgttgagatttccagtgaacacatgggagttcatggagcgaggatctgttctgttgg

SEQ ID NO: 7272 - RNA, 34 nt, Homo sapiens
  source 1..34: mol_type = unassigned RNA
agttggtgcaaaagtaattgtggttttgaccatt

SEQ ID NO: 7273 - DNA, 34 bp, Homo sapiens
  source 1..34: mol_type = unassigned DNA
agttggtgcaaaagtaattgtggttttgaccatt

SEQ ID NO: 7274 - DNA, 34 bp, Homo sapiens
  source 1..34: mol_type = unassigned DNA
aatggtcaaaaccacaattacttttgcaccaact

SEQ ID NO: 7275 - RNA, 31 nt, Homo sapiens
  source 1..31: mol_type = unassigned RNA
tatctttcactgggagaattcaagttgtagc

SEQ ID NO: 7276 - DNA, 31 bp, Homo sapiens
  source 1..31: mol_type = unassigned DNA
tatctttcactgggagaattcaagttgtagc

SEQ ID NO: 7277 - DNA, 31 bp, Homo sapiens
  source 1..31: mol_type = unassigned DNA
gctacaacttgaattctcccagtgaaagata

SEQ ID NO: 7278 - RNA, 36 nt, Homo sapiens
  source 1..36: mol_type = unassigned RNA
tatctcagatagtctgacttacagctttgagcgggg

SEQ ID NO: 7279 - DNA, 36 bp, Homo sapiens
  source 1..36: mol_type = unassigned DNA
tatctcagatagtctgacttacagctttgagcgggg

SEQ ID NO: 7280 - DNA, 36 bp, Homo sapiens
  source 1..36: mol_type = unassigned DNA
ccccgctcaaagctgtaagtcagactatctgagata

SEQ ID NO: 7281 - RNA, 32 nt, Homo sapiens
  source 1..32: mol_type = unassigned RNA
ttcatgaaacagaattttggaaataggaaata

SEQ ID NO: 7282 - DNA, 32 bp, Homo sapiens
  source 1..32: mol_type = unassigned DNA
ttcatgaaacagaattttggaaataggaaata

SEQ ID NO: 7283 - DNA, 32 bp, Homo sapiens
  source 1..32: mol_type = unassigned DNA
tatttcctatttccaaaattctgtttcatgaa

SEQ ID NO: 7284 - RNA, 30 nt, Homo sapiens
  source 1..30: mol_type = unassigned RNA
tggacgtggtctcgggctgtgacgagcatg

SEQ ID NO: 7285 - DNA, 30 bp, Homo sapiens
  source 1..30: mol_type = unassigned DNA
tggacgtggtctcgggctgtgacgagcatg

SEQ ID NO: 7286 - DNA, 30 bp, Homo sapiens
  source 1..30: mol_type = unassigned DNA
catgctcgtcacagcccgagaccacgtcca

SEQ ID NO: 7287 - RNA, 29 nt, Homo sapiens
  source 1..29: mol_type = unassigned RNA
tcagaaatgggacttctgataatgaaaca

SEQ ID NO: 7288 - DNA, 29 bp, Homo sapiens
  source 1..29: mol_type = unassigned DNA
tcagaaatgggacttctgataatgaaaca

SEQ ID NO: 7289 - DNA, 29 bp, Homo sapiens
  source 1..29: mol_type = unassigned DNA
tgtttcattatcagaagtcccatttctga

SEQ ID NO: 7290 - RNA, 33 nt, Homo sapiens
  source 1..33: mol_type = unassigned RNA
cagcaggaaacgaaatcctttgacttgtatcag

SEQ ID NO: 7291 - DNA, 33 bp, Homo sapiens
  source 1..33: mol_type = unassigned DNA
cagcaggaaacgaaatcctttgacttgtatcag

SEQ ID NO: 7292 - DNA, 33 bp, Homo sapiens
  source 1..33: mol_type = unassigned DNA
ctgatacaagtcaaaggatttcgtttcctgctg

SEQ ID NO: 7293 - RNA, 23 nt, Homo sapiens
  source 1..23: mol_type = unassigned RNA
ttctttagtatgttgtatctctt

SEQ ID NO: 7294 - DNA, 23 bp, Homo sapiens
  source 1..23: mol_type = unassigned DNA
ttctttagtatgttgtatctctt

SEQ ID NO: 7295 - DNA, 23 bp, Homo sapiens
  source 1..23: mol_type = unassigned DNA
aagagatacaacatactaaagaa

SEQ ID NO: 7296 - RNA, 48 nt, Homo sapiens
  source 1..48: mol_type = unassigned RNA
ttaaatcagcactttggatactacgtgatgaatggactgaaggggtta

SEQ ID NO: 7297 - DNA, 48 bp, Homo sapiens
  source 1..48: mol_type = unassigned DNA
ttaaatcagcactttggatactacgtgatgaatggactgaaggggtta

SEQ ID NO: 7298 - DNA, 48 bp, Homo sapiens
  source 1..48: mol_type = unassigned DNA
taaccccttcagtccattcatcacgtagtatccaaagtgctgatttaa

SEQ ID NO: 7299 - RNA, 30 nt, Homo sapiens
  source 1..30: mol_type = unassigned RNA
ctggcccgttatgccagtatctgccagcag

SEQ ID NO: 7300 - DNA, 30 bp, Homo sapiens
  source 1..30: mol_type = unassigned DNA
ctggcccgttatgccagtatctgccagcag

SEQ ID NO: 7301 - DNA, 30 bp, Homo sapiens
  source 1..30: mol_type = unassigned DNA
ctgctggcagatactggcataacgggccag

SEQ ID NO: 7302 - RNA, 31 nt, Homo sapiens
  source 1..31: mol_type = unassigned RNA
tctgttcttgcaatggtatgacgcacaaaag

SEQ ID NO: 7303 - DNA, 31 bp, Homo sapiens
  source 1..31: mol_type = unassigned DNA
tctgttcttgcaatggtatgacgcacaaaag

SEQ ID NO: 7304 - DNA, 31 bp, Homo sapiens
  source 1..31: mol_type = unassigned DNA
cttttgtgcgtcataccattgcaagaacaga

SEQ ID NO: 7305 - RNA, 30 nt, Homo sapiens
  source 1..30: mol_type = unassigned RNA
tccatgactcggcctgaactcacagacagg

SEQ ID NO: 7306 - DNA, 30 bp, Homo sapiens
  source 1..30: mol_type = unassigned DNA
tccatgactcggcctgaactcacagacagg

SEQ ID NO: 7307 - DNA, 30 bp, Homo sapiens
  source 1..30: mol_type = unassigned DNA
cctgtctgtgagttcaggccgagtcatgga

SEQ ID NO: 7308 - RNA, 59 nt, Homo sapiens
  source 1..59: mol_type = unassigned RNA
aaataccataagaactgaaaatataggttggtgcaaaagtaattgtggttttgaccatt

SEQ ID NO: 7309 - DNA, 59 bp, Homo sapiens
  source 1..59: mol_type = unassigned DNA
aaataccataagaactgaaaatataggttggtgcaaaagtaattgtggttttgaccatt

SEQ ID NO: 7310 - DNA, 59 bp, Homo sapiens
  source 1..59: mol_type = unassigned DNA
aatggtcaaaaccacaattacttttgcaccaacctatattttcagttcttatggtattt

SEQ ID NO: 7311 - RNA, 27 nt, Homo sapiens
  source 1..27: mol_type = unassigned RNA
ctagcaaatttctgtcttgcatgtagt

SEQ ID NO: 7312 - DNA, 27 bp, Homo sapiens
  source 1..27: mol_type = unassigned DNA
ctagcaaatttctgtcttgcatgtagt

SEQ ID NO: 7313 - DNA, 27 bp, Homo sapiens
  source 1..27: mol_type = unassigned DNA
actacatgcaagacagaaatttgctag

SEQ ID NO: 7314 - RNA, 27 nt, Homo sapiens
  source 1..27: mol_type = unassigned RNA
gtttcgccatgttcgaactcccaggct

SEQ ID NO: 7315 - DNA, 27 bp, Homo sapiens
  source 1..27: mol_type = unassigned DNA
gtttcgccatgttcgaactcccaggct

SEQ ID NO: 7316 - DNA, 27 bp, Homo sapiens
  source 1..27: mol_type = unassigned DNA
agcctgggagttcgaacatggcgaaac

SEQ ID NO: 7317 - RNA, 39 nt, Homo sapiens
  source 1..39: mol_type = unassigned RNA
gcaactgccagtctcagggaagaggattgccatgccagg

SEQ ID NO: 7318 - DNA, 39 bp, Homo sapiens
  source 1..39: mol_type = unassigned DNA
gcaactgccagtctcagggaagaggattgccatgccagg

SEQ ID NO: 7319 - DNA, 39 bp, Homo sapiens
  source 1..39: mol_type = unassigned DNA
cctggcatggcaatcctcttccctgagactggcagttgc

SEQ ID NO: 7320 - RNA, 31 nt, Homo sapiens
  source 1..31: mol_type = unassigned RNA
gagatttggaggatctgaaggatcagattgc

SEQ ID NO: 7321 - DNA, 31 bp, Homo sapiens
  source 1..31: mol_type = unassigned DNA
gagatttggaggatctgaaggatcagattgc

SEQ ID NO: 7322 - DNA, 31 bp, Homo sapiens
  source 1..31: mol_type = unassigned DNA
gcaatctgatccttcagatcctccaaatctc

SEQ ID NO: 7323 - RNA, 38 nt, Homo sapiens
  source 1..38: mol_type = unassigned RNA
cactttggtttcctataaatatgtatgtatcgtatgtg

SEQ ID NO: 7324 - DNA, 38 bp, Homo sapiens
  source 1..38: mol_type = unassigned DNA
cactttggtttcctataaatatgtatgtatcgtatgtg

SEQ ID NO: 7325 - DNA, 38 bp, Homo sapiens
  source 1..38: mol_type = unassigned DNA
cacatacgatacatacatatttataggaaaccaaagtg

SEQ ID NO: 7326 - RNA, 32 nt, Homo sapiens
  source 1..32: mol_type = unassigned RNA
cacacagagcacagtcctgtagttacccagcc

SEQ ID NO: 7327 - DNA, 32 bp, Homo sapiens
  source 1..32: mol_type = unassigned DNA
cacacagagcacagtcctgtagttacccagcc

SEQ ID NO: 7328 - DNA, 32 bp, Homo sapiens
  source 1..32: mol_type = unassigned DNA
ggctgggtaactacaggactgtgctctgtgtg

SEQ ID NO: 7329 - RNA, 32 nt, Homo sapiens
  source 1..32: mol_type = unassigned RNA
ctacaagttccagtgggactgactgtacatac

SEQ ID NO: 7330 - DNA, 32 bp, Homo sapiens
  source 1..32: mol_type = unassigned DNA
ctacaagttccagtgggactgactgtacatac

SEQ ID NO: 7331 - DNA, 32 bp, Homo sapiens
  source 1..32: mol_type = unassigned DNA
gtatgtacagtcagtcccactggaacttgtag

SEQ ID NO: 7332 - RNA, 31 nt, Homo sapiens
  source 1..31: mol_type = unassigned RNA
ctagagccttcatcgtctggctggccaacgg

SEQ ID NO: 7333 - DNA, 31 bp, Homo sapiens
  source 1..31: mol_type = unassigned DNA
ctagagccttcatcgtctggctggccaacgg

SEQ ID NO: 7334 - DNA, 31 bp, Homo sapiens
  source 1..31: mol_type = unassigned DNA
ccgttggccagccagacgatgaaggctctag

SEQ ID NO: 7335 - RNA, 29 nt, Homo sapiens
  source 1..29: mol_type = unassigned RNA
cttcaacgtccaggccgggtgtggccagg

SEQ ID NO: 7336 - DNA, 29 bp, Homo sapiens
  source 1..29: mol_type = unassigned DNA
cttcaacgtccaggccgggtgtggccagg

SEQ ID NO: 7337 - DNA, 29 bp, Homo sapiens
  source 1..29: mol_type = unassigned DNA
cctggccacacccggcctggacgttgaag

SEQ ID NO: 7338 - RNA, 38 nt, Homo sapiens
  source 1..38: mol_type = unassigned RNA
ggggccgtctgcccgtggacctggctgaggagctgggc

SEQ ID NO: 7339 - DNA, 38 bp, Homo sapiens
  source 1..38: mol_type = unassigned DNA
ggggccgtctgcccgtggacctggctgaggagctgggc

SEQ ID NO: 7340 - DNA, 38 bp, Homo sapiens
  source 1..38: mol_type = unassigned DNA
gcccagctcctcagccaggtccacgggcagacggcccc

SEQ ID NO: 7341 - RNA, 61 nt, Homo sapiens
  source 1..61: mol_type = unassigned RNA
aaccttaggcggtagctggagactctgggccaggagaagctgaagctggaggcagagcttg

SEQ ID NO: 7342 - DNA, 61 bp, Homo sapiens
  source 1..61: mol_type = unassigned DNA
aaccttaggcggtagctggagactctgggccaggagaagctgaagctggaggcagagcttg

SEQ ID NO: 7343 - DNA, 61 bp, Homo sapiens
  source 1..61: mol_type = unassigned DNA
caagctctgcctccagcttcagcttctcctggcccagagtctccagctaccgcctaaggtt

SEQ ID NO: 7344 - RNA, 102 nt, Homo sapiens
  source 1..102: mol_type = unassigned RNA
atagacacacctgttggaaatgatcaactgctggaaatacttaataaattaatcaaatacatccaaattaaggtactaaaagttacttgatttatttctttt

SEQ ID NO: 7345 - DNA, 102 bp, Homo sapiens
  source 1..102: mol_type = unassigned DNA
atagacacacctgttggaaatgatcaactgctggaaatacttaataaattaatcaaatacatccaaattaaggtactaaaagttacttgatttatttctttt

SEQ ID NO: 7346 - DNA, 102 bp, Homo sapiens
  source 1..102: mol_type = unassigned DNA
aaaagaaataaatcaagtaacttttagtaccttaatttggatgtatttgattaatttattaagtatttccagcagttgatcatttccaacaggtgtgtctat

SEQ ID NO: 7347 - RNA, 23 nt, Homo sapiens
  source 1..23: mol_type = unassigned RNA
tactacagtggtagatttcactt

SEQ ID NO: 7348 - DNA, 23 bp, Homo sapiens
  source 1..23: mol_type = unassigned DNA
tactacagtggtagatttcactt

SEQ ID NO: 7349 - DNA, 23 bp, Homo sapiens
  source 1..23: mol_type = unassigned DNA
aagtgaaatctaccactgtagta

SEQ ID NO: 7350 - RNA, 60 nt, Homo sapiens
  source 1..60: mol_type = unassigned RNA
aaattacagacgtggaaagtgcttagagtgcagaagaaaatggatatgacaggggcaata

SEQ ID NO: 7351 - DNA, 60 bp, Homo sapiens
  source 1..60: mol_type = unassigned DNA
aaattacagacgtggaaagtgcttagagtgcagaagaaaatggatatgacaggggcaata

SEQ ID NO: 7352 - DNA, 60 bp, Homo sapiens
  source 1..60: mol_type = unassigned DNA
tattgcccctgtcatatccattttcttctgcactctaagcactttccacgtctgtaattt

SEQ ID NO: 7353 - RNA, 56 nt, Homo sapiens
  source 1..56: mol_type = unassigned RNA
ataggaaagagcatggaagaagaacctgcattctctgatcgtctctgcttgttcac

SEQ ID NO: 7354 - DNA, 56 bp, Homo sapiens
  source 1..56: mol_type = unassigned DNA
ataggaaagagcatggaagaagaacctgcattctctgatcgtctctgcttgttcac

SEQ ID NO: 7355 - DNA, 56 bp, Homo sapiens
  source 1..56: mol_type = unassigned DNA
gtgaacaagcagagacgatcagagaatgcaggttcttcttccatgctctttcctat

SEQ ID NO: 7356 - RNA, 30 nt, Homo sapiens
  source 1..30: mol_type = unassigned RNA
tggtgcattgacctagaggtggaggaggtg

SEQ ID NO: 7357 - DNA, 30 bp, Homo sapiens
  source 1..30: mol_type = unassigned DNA
tggtgcattgacctagaggtggaggaggtg

SEQ ID NO: 7358 - DNA, 30 bp, Homo sapiens
  source 1..30: mol_type = unassigned DNA
cacctcctccacctctaggtcaatgcacca

SEQ ID NO: 7359 - RNA, 177 nt, Homo sapiens
  source 1..177: mol_type = unassigned RNA
agataggctggtcaaggaagccctgcctctcagaggcggtgacatgtgatcagtgccagacagccacgtagctatctgagggggaaatggtcaaggctgagagaacttcaagaacagaaagcaagccagtgtggttcaagtgtgatgagcaggaaaaggtgggggtgacaagaccta

SEQ ID NO: 7360 - DNA, 177 bp, Homo sapiens
  source 1..177: mol_type = unassigned DNA
agataggctggtcaaggaagccctgcctctcagaggcggtgacatgtgatcagtgccagacagccacgtagctatctgagggggaaatggtcaaggctgagagaacttcaagaacagaaagcaagccagtgtggttcaagtgtgatgagcaggaaaaggtgggggtgacaagaccta

SEQ ID NO: 7361 - DNA, 177 bp, Homo sapiens
  source 1..177: mol_type = unassigned DNA
taggtcttgtcacccccaccttttcctgctcatcacacttgaaccacactggcttgctttctgttcttgaagttctctcagccttgaccatttccccctcagatagctacgtggctgtctggcactgatcacatgtcaccgcctctgagaggcagggcttccttgaccagcctatct

SEQ ID NO: 7362 - RNA, 32 nt, Homo sapiens
  source 1..32: mol_type = unassigned RNA
aactacatcattctgaacatgacagagaacat

SEQ ID NO: 7363 - DNA, 32 bp, Homo sapiens
  source 1..32: mol_type = unassigned DNA
aactacatcattctgaacatgacagagaacat

SEQ ID NO: 7364 - DNA, 32 bp, Homo sapiens
  source 1..32: mol_type = unassigned DNA
atgttctctgtcatgttcagaatgatgtagtt

SEQ ID NO: 7365 - RNA, 32 nt, Homo sapiens
  source 1..32: mol_type = unassigned RNA
cccccttctgctccgagtcctcactccccaaa

SEQ ID NO: 7366 - DNA, 32 bp, Homo sapiens
  source 1..32: mol_type = unassigned DNA
cccccttctgctccgagtcctcactccccaaa

SEQ ID NO: 7367 - DNA, 32 bp, Homo sapiens
  source 1..32: mol_type = unassigned DNA
tttggggagtgaggactcggagcagaaggggg

SEQ ID NO: 7368 - RNA, 27 nt, Homo sapiens
  source 1..27: mol_type = unassigned RNA
atgtgacaaaggtagaattcaaactca

SEQ ID NO: 7369 - DNA, 27 bp, Homo sapiens
  source 1..27: mol_type = unassigned DNA
atgtgacaaaggtagaattcaaactca

SEQ ID NO: 7370 - DNA, 27 bp, Homo sapiens
  source 1..27: mol_type = unassigned DNA
tgagtttgaattctacctttgtcacat

SEQ ID NO: 7371 - RNA, 30 nt, Homo sapiens
  source 1..30: mol_type = unassigned RNA
actccactgagcgtctggactaccattccc

SEQ ID NO: 7372 - DNA, 30 bp, Homo sapiens
  source 1..30: mol_type = unassigned DNA
actccactgagcgtctggactaccattccc

SEQ ID NO: 7373 - DNA, 30 bp, Homo sapiens
  source 1..30: mol_type = unassigned DNA
gggaatggtagtccagacgctcagtggagt

SEQ ID NO: 7374 - RNA, 42 nt, Homo sapiens
  source 1..42: mol_type = unassigned RNA
tttaaccctcctcttctgggaggcaagctctgtcctcattgc

SEQ ID NO: 7375 - DNA, 42 bp, Homo sapiens
  source 1..42: mol_type = unassigned DNA
tttaaccctcctcttctgggaggcaagctctgtcctcattgc

SEQ ID NO: 7376 - DNA, 42 bp, Homo sapiens
  source 1..42: mol_type = unassigned DNA
gcaatgaggacagagcttgcctcccagaagaggagggttaaa

SEQ ID NO: 7377 - RNA, 30 nt, Homo sapiens
  source 1..30: mol_type = unassigned RNA
taggctggaggcagggacttgtaggcctca

SEQ ID NO: 7378 - DNA, 30 bp, Homo sapiens
  source 1..30: mol_type = unassigned DNA
taggctggaggcagggacttgtaggcctca

SEQ ID NO: 7379 - DNA, 30 bp, Homo sapiens
  source 1..30: mol_type = unassigned DNA
tgaggcctacaagtccctgcctccagccta

SEQ ID NO: 7380 - RNA, 33 nt, Homo sapiens
  source 1..33: mol_type = unassigned RNA
ttataaaggtttttggagctgcaccgaagcatc

SEQ ID NO: 7381 - DNA, 33 bp, Homo sapiens
  source 1..33: mol_type = unassigned DNA
ttataaaggtttttggagctgcaccgaagcatc

SEQ ID NO: 7382 - DNA, 33 bp, Homo sapiens
  source 1..33: mol_type = unassigned DNA
gatgcttcggtgcagctccaaaaacctttataa

SEQ ID NO: 7383 - RNA, 88 nt, Homo sapiens
  source 1..88: mol_type = unassigned RNA
cagtgacttctttccattcatctgtagggaagctccaagagacagtttccttttgggactttttgtctgtgtatctgcttaaaaattg

SEQ ID NO: 7384 - DNA, 88 bp, Homo sapiens
  source 1..88: mol_type = unassigned DNA
cagtgacttctttccattcatctgtagggaagctccaagagacagtttccttttgggactttttgtctgtgtatctgcttaaaaattg

SEQ ID NO: 7385 - DNA, 88 bp, Homo sapiens
  source 1..88: mol_type = unassigned DNA
caatttttaagcagatacacagacaaaaagtcccaaaaggaaactgtctcttggagcttccctacagatgaatggaaagaagtcactg

SEQ ID NO: 7386 - RNA, 29 nt, Homo sapiens
  source 1..29: mol_type = unassigned RNA
gaaaagaaaaacccagtttcttaggaaac

SEQ ID NO: 7387 - DNA, 29 bp, Homo sapiens
  source 1..29: mol_type = unassigned DNA
gaaaagaaaaacccagtttcttaggaaac

SEQ ID NO: 7388 - DNA, 29 bp, Homo sapiens
  source 1..29: mol_type = unassigned DNA
gtttcctaagaaactgggtttttcttttc

SEQ ID NO: 7389 - RNA, 30 nt, Homo sapiens
  source 1..30: mol_type = unassigned RNA
aagaaagtaacccagggagtccggtccagt

SEQ ID NO: 7390 - DNA, 30 bp, Homo sapiens
  source 1..30: mol_type = unassigned DNA
aagaaagtaacccagggagtccggtccagt

SEQ ID NO: 7391 - DNA, 30 bp, Homo sapiens
  source 1..30: mol_type = unassigned DNA
actggaccggactccctgggttactttctt

SEQ ID NO: 7392 - RNA, 29 nt, Homo sapiens
  source 1..29: mol_type = unassigned RNA
cttcaacaacaggttgttaggatgtagtc

SEQ ID NO: 7393 - DNA, 29 bp, Homo sapiens
  source 1..29: mol_type = unassigned DNA
cttcaacaacaggttgttaggatgtagtc

SEQ ID NO: 7394 - DNA, 29 bp, Homo sapiens
  source 1..29: mol_type = unassigned DNA
gactacatcctaacaacctgttgttgaag

SEQ ID NO: 7395 - RNA, 30 nt, Homo sapiens
  source 1..30: mol_type = unassigned RNA
ttgcctgttgttgctcttcggaggcggcga

SEQ ID NO: 7396 - DNA, 30 bp, Homo sapiens
  source 1..30: mol_type = unassigned DNA
ttgcctgttgttgctcttcggaggcggcga

SEQ ID NO: 7397 - DNA, 30 bp, Homo sapiens
  source 1..30: mol_type = unassigned DNA
tcgccgcctccgaagagcaacaacaggcaa

SEQ ID NO: 7398 - RNA, 115 nt, Homo sapiens
  source 1..115: mol_type = unassigned RNA
catggcactggcagattttcctgaagcaggctggagctcactctgtgtttgccctcgcaataagtcctgcctgtttctatagtttctgaatgaccaagtttttctgaatttaagg

SEQ ID NO: 7399 - DNA, 115 bp, Homo sapiens
  source 1..115: mol_type = unassigned DNA
catggcactggcagattttcctgaagcaggctggagctcactctgtgtttgccctcgcaataagtcctgcctgtttctatagtttctgaatgaccaagtttttctgaatttaagg

SEQ ID NO: 7400 - DNA, 115 bp, Homo sapiens
  source 1..115: mol_type = unassigned DNA
ccttaaattcagaaaaacttggtcattcagaaactatagaaacaggcaggacttattgcgagggcaaacacagagtgagctccagcctgcttcaggaaaatctgccagtgccatg

SEQ ID NO: 7401 - RNA, 27 nt, Homo sapiens
  source 1..27: mol_type = unassigned RNA
atgctcatcgtcactggccatcagaga

SEQ ID NO: 7402 - DNA, 27 bp, Homo sapiens
  source 1..27: mol_type = unassigned DNA
atgctcatcgtcactggccatcagaga

SEQ ID NO: 7403 - DNA, 27 bp, Homo sapiens
  source 1..27: mol_type = unassigned DNA
tctctgatggccagtgacgatgagcat

SEQ ID NO: 7404 - RNA, 29 nt, Homo sapiens
  source 1..29: mol_type = unassigned RNA
atgagccttgaactctgttctttgcattt

SEQ ID NO: 7405 - DNA, 29 bp, Homo sapiens
  source 1..29: mol_type = unassigned DNA
atgagccttgaactctgttctttgcattt

SEQ ID NO: 7406 - DNA, 29 bp, Homo sapiens
  source 1..29: mol_type = unassigned DNA
aaatgcaaagaacagagttcaaggctcat

SEQ ID NO: 7407 - RNA, 168 nt, Homo sapiens
  source 1..168: mol_type = unassigned RNA
tattcctaatttttctttaggaccagtttggacaacatataaaatcagatgtacacttgaatttttatgtttattatggtcctgatcgtattagagaaccggccttactttcaaaacaggatattgttttgactacgtataatattttaactcatgactatggagtaa

SEQ ID NO: 7408 - DNA, 168 bp, Homo sapiens
  source 1..168: mol_type = unassigned DNA
tattcctaatttttctttaggaccagtttggacaacatataaaatcagatgtacacttgaatttttatgtttattatggtcctgatcgtattagagaaccggccttactttcaaaacaggatattgttttgactacgtataatattttaactcatgactatggagtaa

SEQ ID NO: 7409 - DNA, 168 bp, Homo sapiens
  source 1..168: mol_type = unassigned DNA
ttactccatagtcatgagttaaaatattatacgtagtcaaaacaatatcctgttttgaaagtaaggccggttctctaatacgatcaggaccataataaacataaaaattcaagtgtacatctgattttatatgttgtccaaactggtcctaaagaaaaattaggaata

SEQ ID NO: 7410 - RNA, 30 nt, Homo sapiens
  source 1..30: mol_type = unassigned RNA
gcgtctcggccggacgcagggacttcagaa

SEQ ID NO: 7411 - DNA, 30 bp, Homo sapiens
  source 1..30: mol_type = unassigned DNA
gcgtctcggccggacgcagggacttcagaa

SEQ ID NO: 7412 - DNA, 30 bp, Homo sapiens
  source 1..30: mol_type = unassigned DNA
ttctgaagtccctgcgtccggccgagacgc

SEQ ID NO: 7413 - RNA, 43 nt, Homo sapiens
  source 1..43: mol_type = unassigned RNA
tccatctgtgacactggtagaatttagagaattacagagtaga

SEQ ID NO: 7414 - DNA, 43 bp, Homo sapiens
  source 1..43: mol_type = unassigned DNA
tccatctgtgacactggtagaatttagagaattacagagtaga

SEQ ID NO: 7415 - DNA, 43 bp, Homo sapiens
  source 1..43: mol_type = unassigned DNA
tctactctgtaattctctaaattctaccagtgtcacagatgga

SEQ ID NO: 7416 - RNA, 50 nt, Homo sapiens
  source 1..50: mol_type = unassigned RNA
atgaaaggagttgggttagcaggctgagatgatttttctgcttctttttg

SEQ ID NO: 7417 - DNA, 50 bp, Homo sapiens
  source 1..50: mol_type = unassigned DNA
atgaaaggagttgggttagcaggctgagatgatttttctgcttctttttg

SEQ ID NO: 7418 - DNA, 50 bp, Homo sapiens
  source 1..50: mol_type = unassigned DNA
caaaaagaagcagaaaaatcatctcagcctgctaacccaactcctttcat

SEQ ID NO: 7419 - RNA, 58 nt, Homo sapiens
  source 1..58: mol_type = unassigned RNA
ctctgttgcccaggctggagtgtagtggcatgatcatgactcactgaagccttgactt

SEQ ID NO: 7420 - DNA, 58 bp, Homo sapiens
  source 1..58: mol_type = unassigned DNA
ctctgttgcccaggctggagtgtagtggcatgatcatgactcactgaagccttgactt

SEQ ID NO: 7421 - DNA, 58 bp, Homo sapiens
  source 1..58: mol_type = unassigned DNA
aagtcaaggcttcagtgagtcatgatcatgccactacactccagcctgggcaacagag

SEQ ID NO: 7422 - RNA, 30 nt, Homo sapiens
  source 1..30: mol_type = unassigned RNA
caagccagggttgggtagggactgggaaca

SEQ ID NO: 7423 - DNA, 30 bp, Homo sapiens
  source 1..30: mol_type = unassigned DNA
caagccagggttgggtagggactgggaaca

SEQ ID NO: 7424 - DNA, 30 bp, Homo sapiens
  source 1..30: mol_type = unassigned DNA
tgttcccagtccctacccaaccctggcttg

SEQ ID NO: 7425 - RNA, 29 nt, Homo sapiens
  source 1..29: mol_type = unassigned RNA
cgcctcgcgactcaaacactctgcaggga

SEQ ID NO: 7426 - DNA, 29 bp, Homo sapiens
  source 1..29: mol_type = unassigned DNA
cgcctcgcgactcaaacactctgcaggga

SEQ ID NO: 7427 - DNA, 29 bp, Homo sapiens
  source 1..29: mol_type = unassigned DNA
tccctgcagagtgtttgagtcgcgaggcg

SEQ ID NO: 7428 - RNA, 29 nt, Homo sapiens
  source 1..29: mol_type = unassigned RNA
aatcatcaaataattctgaacacaaattt

SEQ ID NO: 7429 - DNA, 29 bp, Homo sapiens
  source 1..29: mol_type = unassigned DNA
aatcatcaaataattctgaacacaaattt

SEQ ID NO: 7430 - DNA, 29 bp, Homo sapiens
  source 1..29: mol_type = unassigned DNA
aaatttgtgttcagaattatttgatgatt

SEQ ID NO: 7431 - RNA, 31 nt, Homo sapiens
  source 1..31: mol_type = unassigned RNA
ggtcctgattctgggctggacacggttgtgg

SEQ ID NO: 7432 - DNA, 31 bp, Homo sapiens
  source 1..31: mol_type = unassigned DNA
ggtcctgattctgggctggacacggttgtgg

SEQ ID NO: 7433 - DNA, 31 bp, Homo sapiens
  source 1..31: mol_type = unassigned DNA
ccacaaccgtgtccagcccagaatcaggacc

SEQ ID NO: 7434 - RNA, 27 nt, Homo sapiens
  source 1..27: mol_type = unassigned RNA
attcattgtattgaccgatggctctca

SEQ ID NO: 7435 - DNA, 27 bp, Homo sapiens
  source 1..27: mol_type = unassigned DNA
attcattgtattgaccgatggctctca

SEQ ID NO: 7436 - DNA, 27 bp, Homo sapiens
  source 1..27: mol_type = unassigned DNA
tgagagccatcggtcaatacaatgaat

SEQ ID NO: 7437 - RNA, 37 nt, Homo sapiens
  source 1..37: mol_type = unassigned RNA
acggctgggtcatgatgaaaactttgatctcctgata

SEQ ID NO: 7438 - DNA, 37 bp, Homo sapiens
  source 1..37: mol_type = unassigned DNA
acggctgggtcatgatgaaaactttgatctcctgata

SEQ ID NO: 7439 - DNA, 37 bp, Homo sapiens
  source 1..37: mol_type = unassigned DNA
tatcaggagatcaaagttttcatcatgacccagccgt

SEQ ID NO: 7440 - RNA, 102 nt, Homo sapiens
  source 1..102: mol_type = unassigned RNA
tttttagcatgtaaatttagatcaattacaaccactgcataccctcaggaatctaatgtacctggtcagtccaagctctgaacacctaggcaggtaagaaga

SEQ ID NO: 7441 - DNA, 102 bp, Homo sapiens
  source 1..102: mol_type = unassigned DNA
tttttagcatgtaaatttagatcaattacaaccactgcataccctcaggaatctaatgtacctggtcagtccaagctctgaacacctaggcaggtaagaaga

SEQ ID NO: 7442 - DNA, 102 bp, Homo sapiens
  source 1..102: mol_type = unassigned DNA
tcttcttacctgcctaggtgttcagagcttggactgaccaggtacattagattcctgagggtatgcagtggttgtaattgatctaaatttacatgctaaaaa

SEQ ID NO: 7443 - RNA, 23 nt, Homo sapiens
  source 1..23: mol_type = unassigned RNA
acaggctgtaacctactcttgtg

SEQ ID NO: 7444 - DNA, 23 bp, Homo sapiens
  source 1..23: mol_type = unassigned DNA
acaggctgtaacctactcttgtg

SEQ ID NO: 7445 - DNA, 23 bp, Homo sapiens
  source 1..23: mol_type = unassigned DNA
cacaagagtaggttacagcctgt

SEQ ID NO: 7446 - RNA, 94 nt, Homo sapiens
  source 1..94: mol_type = unassigned RNA
atagattactgtcctagatgagacatggactgtattcaggcgttacagtcgttttcgagaaatgcataaaacattgaagttaaagtatgcagag

SEQ ID NO: 7447 - DNA, 94 bp, Homo sapiens
  source 1..94: mol_type = unassigned DNA
atagattactgtcctagatgagacatggactgtattcaggcgttacagtcgttttcgagaaatgcataaaacattgaagttaaagtatgcagag

SEQ ID NO: 7448 - DNA, 94 bp, Homo sapiens
  source 1..94: mol_type = unassigned DNA
ctctgcatactttaacttcaatgttttatgcatttctcgaaaacgactgtaacgcctgaatacagtccatgtctcatctaggacagtaatctat

SEQ ID NO: 7449 - RNA, 25 nt, Homo sapiens
  source 1..25: mol_type = unassigned RNA
actctatgcattacatatctttgca

SEQ ID NO: 7450 - DNA, 25 bp, Homo sapiens
  source 1..25: mol_type = unassigned DNA
actctatgcattacatatctttgca

SEQ ID NO: 7451 - DNA, 25 bp, Homo sapiens
  source 1..25: mol_type = unassigned DNA
tgcaaagatatgtaatgcatagagt

SEQ ID NO: 7452 - RNA, 22 nt, Homo sapiens
  source 1..22: mol_type = unassigned RNA
aatggatgatgataagcatctt

SEQ ID NO: 7453 - DNA, 22 bp, Homo sapiens
  source 1..22: mol_type = unassigned DNA
aatggatgatgataagcatctt

SEQ ID NO: 7454 - DNA, 22 bp, Homo sapiens
  source 1..22: mol_type = unassigned DNA
aagatgcttatcatcatccatt

SEQ ID NO: 7455 - RNA, 31 nt, Homo sapiens
  source 1..31: mol_type = unassigned RNA
taaatacgaagggctgtggaagatcagagcc

SEQ ID NO: 7456 - DNA, 31 bp, Homo sapiens
  source 1..31: mol_type = unassigned DNA
taaatacgaagggctgtggaagatcagagcc

SEQ ID NO: 7457 - DNA, 31 bp, Homo sapiens
  source 1..31: mol_type = unassigned DNA
ggctctgatcttccacagcccttcgtattta

SEQ ID NO: 7458 - RNA, 173 nt, Homo sapiens
  source 1..173: mol_type = unassigned RNA
tttccttttgttttgatgatacacttacatccatgtgtatccttttgttgcagcatgtagaagacccgggtattaacatcccagatcaaactgtaattaagaaaggtaagccatttccttctgcattccaagcatgtccttacaggcagagtgctatttaaaagaacttgcag

SEQ ID NO: 7459 - DNA, 173 bp, Homo sapiens
  source 1..173: mol_type = unassigned DNA
tttccttttgttttgatgatacacttacatccatgtgtatccttttgttgcagcatgtagaagacccgggtattaacatcccagatcaaactgtaattaagaaaggtaagccatttccttctgcattccaagcatgtccttacaggcagagtgctatttaaaagaacttgcag

SEQ ID NO: 7460 - DNA, 173 bp, Homo sapiens
  source 1..173: mol_type = unassigned DNA
ctgcaagttcttttaaatagcactctgcctgtaaggacatgcttggaatgcagaaggaaatggcttacctttcttaattacagtttgatctgggatgttaatacccgggtcttctacatgctgcaacaaaaggatacacatggatgtaagtgtatcatcaaaacaaaaggaaa

SEQ ID NO: 7461 - RNA, 61 nt, Homo sapiens
  source 1..61: mol_type = unassigned RNA
ctgtcatctggtccaccttttctgaatccaaagccacctttatcttgttttctgccttctg

SEQ ID NO: 7462 - DNA, 61 bp, Homo sapiens
  source 1..61: mol_type = unassigned DNA
ctgtcatctggtccaccttttctgaatccaaagccacctttatcttgttttctgccttctg

SEQ ID NO: 7463 - DNA, 61 bp, Homo sapiens
  source 1..61: mol_type = unassigned DNA
cagaaggcagaaaacaagataaaggtggctttggattcagaaaaggtggaccagatgacag

SEQ ID NO: 7464 - RNA, 108 nt, Homo sapiens
  source 1..108: mol_type = unassigned RNA
aacgttttagactttgaacacaattcagatttcaggggcagtactgaaatctgaaccgtgtcgctaactgccctgcctttcaactcaagacacaataactttgaacta

SEQ ID NO: 7465 - DNA, 108 bp, Homo sapiens
  source 1..108: mol_type = unassigned DNA
aacgttttagactttgaacacaattcagatttcaggggcagtactgaaatctgaaccgtgtcgctaactgccctgcctttcaactcaagacacaataactttgaacta

SEQ ID NO: 7466 - DNA, 108 bp, Homo sapiens
  source 1..108: mol_type = unassigned DNA
tagttcaaagttattgtgtcttgagttgaaaggcagggcagttagcgacacggttcagatttcagtactgcccctgaaatctgaattgtgttcaaagtctaaaacgtt

SEQ ID NO: 7467 - RNA, 32 nt, Homo sapiens
  source 1..32: mol_type = unassigned RNA
ttgtacacctgagacagacacaaaagggatca

SEQ ID NO: 7468 - DNA, 32 bp, Homo sapiens
  source 1..32: mol_type = unassigned DNA
ttgtacacctgagacagacacaaaagggatca

SEQ ID NO: 7469 - DNA, 32 bp, Homo sapiens
  source 1..32: mol_type = unassigned DNA
tgatcccttttgtgtctgtctcaggtgtacaa

SEQ ID NO: 7470 - RNA, 31 nt, Homo sapiens
  source 1..31: mol_type = unassigned RNA
ctgggtcacgcttcttgcccaggtggtctct

SEQ ID NO: 7471 - DNA, 31 bp, Homo sapiens
  source 1..31: mol_type = unassigned DNA
ctgggtcacgcttcttgcccaggtggtctct

SEQ ID NO: 7472 - DNA, 31 bp, Homo sapiens
  source 1..31: mol_type = unassigned DNA
agagaccacctgggcaagaagcgtgacccag

SEQ ID NO: 7473 - RNA, 28 nt, Homo sapiens
  source 1..28: mol_type = unassigned RNA
ctgagtgtacgatattgacctgtagccc

SEQ ID NO: 7474 - DNA, 28 bp, Homo sapiens
  source 1..28: mol_type = unassigned DNA
ctgagtgtacgatattgacctgtagccc

SEQ ID NO: 7475 - DNA, 28 bp, Homo sapiens
  source 1..28: mol_type = unassigned DNA
gggctacaggtcaatatcgtacactcag

SEQ ID NO: 7476 - RNA, 56 nt, Homo sapiens
  source 1..56: mol_type = unassigned RNA
cgttcttcaatcgggttggcggagacctcagtccgcgaaacactgggccggggcag

SEQ ID NO: 7477 - DNA, 56 bp, Homo sapiens
  source 1..56: mol_type = unassigned DNA
cgttcttcaatcgggttggcggagacctcagtccgcgaaacactgggccggggcag

SEQ ID NO: 7478 - DNA, 56 bp, Homo sapiens
  source 1..56: mol_type = unassigned DNA
ctgccccggcccagtgtttcgcggactgaggtctccgccaacccgattgaagaacg

SEQ ID NO: 7479 - RNA, 32 nt, Homo sapiens
  source 1..32: mol_type = unassigned RNA
tcacctagaggagctctggctaaggcacagtt

SEQ ID NO: 7480 - DNA, 32 bp, Homo sapiens
  source 1..32: mol_type = unassigned DNA
tcacctagaggagctctggctaaggcacagtt

SEQ ID NO: 7481 - DNA, 32 bp, Homo sapiens
  source 1..32: mol_type = unassigned DNA
aactgtgccttagccagagctcctctaggtga

SEQ ID NO: 7482 - RNA, 32 nt, Homo sapiens
  source 1..32: mol_type = unassigned RNA
ggcattctaccagggagaaggacaggggaccc

SEQ ID NO: 7483 - DNA, 32 bp, Homo sapiens
  source 1..32: mol_type = unassigned DNA
ggcattctaccagggagaaggacaggggaccc

SEQ ID NO: 7484 - DNA, 32 bp, Homo sapiens
  source 1..32: mol_type = unassigned DNA
gggtcccctgtccttctccctggtagaatgcc

SEQ ID NO: 7485 - RNA, 32 nt, Homo sapiens
  source 1..32: mol_type = unassigned RNA
cggcccatccagagagccaggctagagccacg

SEQ ID NO: 7486 - DNA, 32 bp, Homo sapiens
  source 1..32: mol_type = unassigned DNA
cggcccatccagagagccaggctagagccacg

SEQ ID NO: 7487 - DNA, 32 bp, Homo sapiens
  source 1..32: mol_type = unassigned DNA
cgtggctctagcctggctctctggatgggccg

SEQ ID NO: 7488 - RNA, 79 nt, Homo sapiens
  source 1..79: mol_type = unassigned RNA
cggttccagtgaagattgacaaagtgcgcattttcttattaggactggctgataacgaagcagctattgtccaggtgag

SEQ ID NO: 7489 - DNA, 79 bp, Homo sapiens
  source 1..79: mol_type = unassigned DNA
cggttccagtgaagattgacaaagtgcgcattttcttattaggactggctgataacgaagcagctattgtccaggtgag

SEQ ID NO: 7490 - DNA, 79 bp, Homo sapiens
  source 1..79: mol_type = unassigned DNA
ctcacctggacaatagctgcttcgttatcagccagtcctaataagaaaatgcgcactttgtcaatcttcactggaaccg

SEQ ID NO: 7491 - RNA, 61 nt, Homo sapiens
  source 1..61: mol_type = unassigned RNA
tctttgccactggtagaatacaaagagagagggaccaaacgtctagctgttcctgctacag

SEQ ID NO: 7492 - DNA, 61 bp, Homo sapiens
  source 1..61: mol_type = unassigned DNA
tctttgccactggtagaatacaaagagagagggaccaaacgtctagctgttcctgctacag

SEQ ID NO: 7493 - DNA, 61 bp, Homo sapiens
  source 1..61: mol_type = unassigned DNA
ctgtagcaggaacagctagacgtttggtccctctctctttgtattctaccagtggcaaaga

SEQ ID NO: 7494 - RNA, 28 nt, Homo sapiens
  source 1..28: mol_type = unassigned RNA
agaatattagaacatatgggccaggggc

SEQ ID NO: 7495 - DNA, 28 bp, Homo sapiens
  source 1..28: mol_type = unassigned DNA
agaatattagaacatatgggccaggggc

SEQ ID NO: 7496 - DNA, 28 bp, Homo sapiens
  source 1..28: mol_type = unassigned DNA
gcccctggcccatatgttctaatattct

SEQ ID NO: 7497 - RNA, 28 nt, Homo sapiens
  source 1..28: mol_type = unassigned RNA
ttaaggagagcctgttctgtaaaagtgt

SEQ ID NO: 7498 - DNA, 28 bp, Homo sapiens
  source 1..28: mol_type = unassigned DNA
ttaaggagagcctgttctgtaaaagtgt

SEQ ID NO: 7499 - DNA, 28 bp, Homo sapiens
  source 1..28: mol_type = unassigned DNA
acacttttacagaacaggctctccttaa

SEQ ID NO: 7500 - RNA, 30 nt, Homo sapiens
  source 1..30: mol_type = unassigned RNA
ttgcctagtagcctcagccgctgtgggctc

SEQ ID NO: 7501 - DNA, 30 bp, Homo sapiens
  source 1..30: mol_type = unassigned DNA
ttgcctagtagcctcagccgctgtgggctc

SEQ ID NO: 7502 - DNA, 30 bp, Homo sapiens
  source 1..30: mol_type = unassigned DNA
gagcccacagcggctgaggctactaggcaa

SEQ ID NO: 7503 - RNA, 29 nt, Homo sapiens
  source 1..29: mol_type = unassigned RNA
gaggcggctgcgggctctggaggccgggc

SEQ ID NO: 7504 - DNA, 29 bp, Homo sapiens
  source 1..29: mol_type = unassigned DNA
gaggcggctgcgggctctggaggccgggc

SEQ ID NO: 7505 - DNA, 29 bp, Homo sapiens
  source 1..29: mol_type = unassigned DNA
gcccggcctccagagcccgcagccgcctc

SEQ ID NO: 7506 - RNA, 49 nt, Homo sapiens
  source 1..49: mol_type = unassigned RNA
ggtccttggagctcagagagcgtctggctttggtctgggctatgtttgg

SEQ ID NO: 7507 - DNA, 49 bp, Homo sapiens
  source 1..49: mol_type = unassigned DNA
ggtccttggagctcagagagcgtctggctttggtctgggctatgtttgg

SEQ ID NO: 7508 - DNA, 49 bp, Homo sapiens
  source 1..49: mol_type = unassigned DNA
ccaaacatagcccagaccaaagccagacgctctctgagctccaaggacc

SEQ ID NO: 7509 - RNA, 29 nt, Homo sapiens
  source 1..29: mol_type = unassigned RNA
cagcgtctttgccagctcccgggcctgct

SEQ ID NO: 7510 - DNA, 29 bp, Homo sapiens
  source 1..29: mol_type = unassigned DNA
cagcgtctttgccagctcccgggcctgct

SEQ ID NO: 7511 - DNA, 29 bp, Homo sapiens
  source 1..29: mol_type = unassigned DNA
agcaggcccgggagctggcaaagacgctg

SEQ ID NO: 7512 - RNA, 89 nt, Homo sapiens
  source 1..89: mol_type = unassigned RNA
tgagtcatcagtttgtatggtaaatgccaattgctgagtaacaggtctgaggaaccttctaattgtgccaggtgaaatgatttttctgc

SEQ ID NO: 7513 - DNA, 89 bp, Homo sapiens
  source 1..89: mol_type = unassigned DNA
tgagtcatcagtttgtatggtaaatgccaattgctgagtaacaggtctgaggaaccttctaattgtgccaggtgaaatgatttttctgc

SEQ ID NO: 7514 - DNA, 89 bp, Homo sapiens
  source 1..89: mol_type = unassigned DNA
gcagaaaaatcatttcacctggcacaattagaaggttcctcagacctgttactcagcaattggcatttaccatacaaactgatgactca

SEQ ID NO: 7515 - RNA, 24 nt, Homo sapiens
  source 1..24: mol_type = unassigned RNA
tatttcactgatagtatttactgc

SEQ ID NO: 7516 - DNA, 24 bp, Homo sapiens
  source 1..24: mol_type = unassigned DNA
tatttcactgatagtatttactgc

SEQ ID NO: 7517 - DNA, 24 bp, Homo sapiens
  source 1..24: mol_type = unassigned DNA
gcagtaaatactatcagtgaaata

SEQ ID NO: 7518 - RNA, 31 nt, Homo sapiens
  source 1..31: mol_type = unassigned RNA
aagagtgagctggaagactttgaactggtaa

SEQ ID NO: 7519 - DNA, 31 bp, Homo sapiens
  source 1..31: mol_type = unassigned DNA
aagagtgagctggaagactttgaactggtaa

SEQ ID NO: 7520 - DNA, 31 bp, Homo sapiens
  source 1..31: mol_type = unassigned DNA
ttaccagttcaaagtcttccagctcactctt

SEQ ID NO: 7521 - RNA, 34 nt, Homo sapiens
  source 1..34: mol_type = unassigned RNA
tccctctggtcctcgtggtctccctggcccccct

SEQ ID NO: 7522 - DNA, 34 bp, Homo sapiens
  source 1..34: mol_type = unassigned DNA
tccctctggtcctcgtggtctccctggcccccct

SEQ ID NO: 7523 - DNA, 34 bp, Homo sapiens
  source 1..34: mol_type = unassigned DNA
aggggggccagggagaccacgaggaccagaggga

SEQ ID NO: 7524 - RNA, 26 nt, Homo sapiens
  source 1..26: mol_type = unassigned RNA
ttttggtattagtttgtcacagtttt

SEQ ID NO: 7525 - DNA, 26 bp, Homo sapiens
  source 1..26: mol_type = unassigned DNA
ttttggtattagtttgtcacagtttt

SEQ ID NO: 7526 - DNA, 26 bp, Homo sapiens
  source 1..26: mol_type = unassigned DNA
aaaactgtgacaaactaataccaaaa

SEQ ID NO: 7527 - RNA, 30 nt, Homo sapiens
  source 1..30: mol_type = unassigned RNA
ggcgctcaggtgctcgccgggtcagcgtct

SEQ ID NO: 7528 - DNA, 30 bp, Homo sapiens
  source 1..30: mol_type = unassigned DNA
ggcgctcaggtgctcgccgggtcagcgtct

SEQ ID NO: 7529 - DNA, 30 bp, Homo sapiens
  source 1..30: mol_type = unassigned DNA
agacgctgacccggcgagcacctgagcgcc

SEQ ID NO: 7530 - RNA, 92 nt, Homo sapiens
  source 1..92: mol_type = unassigned RNA
ttccattactgcagtatacagctacagctcttagattaactgatacattttgcaatgaaagagctcacggagagagtttaagacaaatcatg

SEQ ID NO: 7531 - DNA, 92 bp, Homo sapiens
  source 1..92: mol_type = unassigned DNA
ttccattactgcagtatacagctacagctcttagattaactgatacattttgcaatgaaagagctcacggagagagtttaagacaaatcatg

SEQ ID NO: 7532 - DNA, 92 bp, Homo sapiens
  source 1..92: mol_type = unassigned DNA
catgatttgtcttaaactctctccgtgagctctttcattgcaaaatgtatcagttaatctaagagctgtagctgtatactgcagtaatggaa

SEQ ID NO: 7533 - RNA, 26 nt, Homo sapiens
  source 1..26: mol_type = unassigned RNA
tatgtggcacaggtagaattttctgt

SEQ ID NO: 7534 - DNA, 26 bp, Homo sapiens
  source 1..26: mol_type = unassigned DNA
tatgtggcacaggtagaattttctgt

SEQ ID NO: 7535 - DNA, 26 bp, Homo sapiens
  source 1..26: mol_type = unassigned DNA
acagaaaattctacctgtgccacata

SEQ ID NO: 7536 - RNA, 29 nt, Homo sapiens
  source 1..29: mol_type = unassigned RNA
tcgcctacagccaggggaactgtgctgcc

SEQ ID NO: 7537 - DNA, 29 bp, Homo sapiens
  source 1..29: mol_type = unassigned DNA
tcgcctacagccaggggaactgtgctgcc

SEQ ID NO: 7538 - DNA, 29 bp, Homo sapiens
  source 1..29: mol_type = unassigned DNA
ggcagcacagttcccctggctgtaggcga

SEQ ID NO: 7539 - RNA, 28 nt, Homo sapiens
  source 1..28: mol_type = unassigned RNA
gtaggaattaccagcacgccgggtgaaa

SEQ ID NO: 7540 - DNA, 28 bp, Homo sapiens
  source 1..28: mol_type = unassigned DNA
gtaggaattaccagcacgccgggtgaaa

SEQ ID NO: 7541 - DNA, 28 bp, Homo sapiens
  source 1..28: mol_type = unassigned DNA
tttcacccggcgtgctggtaattcctac

SEQ ID NO: 7542 - RNA, 63 nt, Homo sapiens
  source 1..63: mol_type = unassigned RNA
ctctttgttgaaactgaccatgggacacacgcggggctggtagaattccctgcatcccagaga

SEQ ID NO: 7543 - DNA, 63 bp, Homo sapiens
  source 1..63: mol_type = unassigned DNA
ctctttgttgaaactgaccatgggacacacgcggggctggtagaattccctgcatcccagaga

SEQ ID NO: 7544 - DNA, 63 bp, Homo sapiens
  source 1..63: mol_type = unassigned DNA
tctctgggatgcagggaattctaccagccccgcgtgtgtcccatggtcagtttcaacaaagag

SEQ ID NO: 7545 - RNA, 31 nt, Homo sapiens
  source 1..31: mol_type = unassigned RNA
gcccattctggaccagatggtgatggagcag

SEQ ID NO: 7546 - DNA, 31 bp, Homo sapiens
  source 1..31: mol_type = unassigned DNA
gcccattctggaccagatggtgatggagcag

SEQ ID NO: 7547 - DNA, 31 bp, Homo sapiens
  source 1..31: mol_type = unassigned DNA
ctgctccatcaccatctggtccagaatgggc

SEQ ID NO: 7548 - RNA, 38 nt, Homo sapiens
  source 1..38: mol_type = unassigned RNA
tgggagcttggaaggagggtagaagggagaaagaagct

SEQ ID NO: 7549 - DNA, 38 bp, Homo sapiens
  source 1..38: mol_type = unassigned DNA
tgggagcttggaaggagggtagaagggagaaagaagct

SEQ ID NO: 7550 - DNA, 38 bp, Homo sapiens
  source 1..38: mol_type = unassigned DNA
agcttctttctcccttctaccctccttccaagctccca

SEQ ID NO: 7551 - RNA, 26 nt, Homo sapiens
  source 1..26: mol_type = unassigned RNA
agagatcccacacagagtccccattg

SEQ ID NO: 7552 - DNA, 26 bp, Homo sapiens
  source 1..26: mol_type = unassigned DNA
agagatcccacacagagtccccattg

SEQ ID NO: 7553 - DNA, 26 bp, Homo sapiens
  source 1..26: mol_type = unassigned DNA
caatggggactctgtgtgggatctct

SEQ ID NO: 7554 - RNA, 32 nt, Homo sapiens
  source 1..32: mol_type = unassigned RNA
attctggccttggttgtggtaagttgtgtact

SEQ ID NO: 7555 - DNA, 32 bp, Homo sapiens
  source 1..32: mol_type = unassigned DNA
attctggccttggttgtggtaagttgtgtact

SEQ ID NO: 7556 - DNA, 32 bp, Homo sapiens
  source 1..32: mol_type = unassigned DNA
agtacacaacttaccacaaccaaggccagaat

SEQ ID NO: 7557 - RNA, 26 nt, Homo sapiens
  source 1..26: mol_type = unassigned RNA
agcatgatcatgactcactgaagcct

SEQ ID NO: 7558 - DNA, 26 bp, Homo sapiens
  source 1..26: mol_type = unassigned DNA
agcatgatcatgactcactgaagcct

SEQ ID NO: 7559 - DNA, 26 bp, Homo sapiens
  source 1..26: mol_type = unassigned DNA
aggcttcagtgagtcatgatcatgct

SEQ ID NO: 7560 - RNA, 32 nt, Homo sapiens
  source 1..32: mol_type = unassigned RNA
cgaaaaacagaaaggaagactgaaagagaatg

SEQ ID NO: 7561 - DNA, 32 bp, Homo sapiens
  source 1..32: mol_type = unassigned DNA
cgaaaaacagaaaggaagactgaaagagaatg

SEQ ID NO: 7562 - DNA, 32 bp, Homo sapiens
  source 1..32: mol_type = unassigned DNA
cattctctttcagtcttcctttctgtttttcg

SEQ ID NO: 7563 - RNA, 29 nt, Homo sapiens
  source 1..29: mol_type = unassigned RNA
cttcgaaatatgaccagtcactctgcccg

SEQ ID NO: 7564 - DNA, 29 bp, Homo sapiens
  source 1..29: mol_type = unassigned DNA
cttcgaaatatgaccagtcactctgcccg

SEQ ID NO: 7565 - DNA, 29 bp, Homo sapiens
  source 1..29: mol_type = unassigned DNA
cgggcagagtgactggtcatatttcgaag

SEQ ID NO: 7566 - RNA, 30 nt, Homo sapiens
  source 1..30: mol_type = unassigned RNA
tccttttgcagtttcgtgtactagggttct

SEQ ID NO: 7567 - DNA, 30 bp, Homo sapiens
  source 1..30: mol_type = unassigned DNA
tccttttgcagtttcgtgtactagggttct

SEQ ID NO: 7568 - DNA, 30 bp, Homo sapiens
  source 1..30: mol_type = unassigned DNA
agaaccctagtacacgaaactgcaaaagga

SEQ ID NO: 7569 - RNA, 38 nt, Homo sapiens
  source 1..38: mol_type = unassigned RNA
tcagaagaagactttttcttctttcagcttgcttgata

SEQ ID NO: 7570 - DNA, 38 bp, Homo sapiens
  source 1..38: mol_type = unassigned DNA
tcagaagaagactttttcttctttcagcttgcttgata

SEQ ID NO: 7571 - DNA, 38 bp, Homo sapiens
  source 1..38: mol_type = unassigned DNA
tatcaagcaagctgaaagaagaaaaagtcttcttctga

SEQ ID NO: 7572 - RNA, 32 nt, Homo sapiens
  source 1..32: mol_type = unassigned RNA
ctatgactcagatgtaaaggactttctctgta

SEQ ID NO: 7573 - DNA, 32 bp, Homo sapiens
  source 1..32: mol_type = unassigned DNA
ctatgactcagatgtaaaggactttctctgta

SEQ ID NO: 7574 - DNA, 32 bp, Homo sapiens
  source 1..32: mol_type = unassigned DNA
tacagagaaagtcctttacatctgagtcatag

SEQ ID NO: 7575 - RNA, 31 nt, Homo sapiens
  source 1..31: mol_type = unassigned RNA
gtttctggtctgcgcagactgtgaaattgga

SEQ ID NO: 7576 - DNA, 31 bp, Homo sapiens
  source 1..31: mol_type = unassigned DNA
gtttctggtctgcgcagactgtgaaattgga

SEQ ID NO: 7577 - DNA, 31 bp, Homo sapiens
  source 1..31: mol_type = unassigned DNA
tccaatttcacagtctgcgcagaccagaaac

SEQ ID NO: 7578 - RNA, 66 nt, Homo sapiens
  source 1..66: mol_type = unassigned RNA
aaacggtggtttgagatattagtttgttttggattgggggaaaaaaaacttagttgacatgggaat

SEQ ID NO: 7579 - DNA, 66 bp, Homo sapiens
  source 1..66: mol_type = unassigned DNA
aaacggtggtttgagatattagtttgttttggattgggggaaaaaaaacttagttgacatgggaat

SEQ ID NO: 7580 - DNA, 66 bp, Homo sapiens
  source 1..66: mol_type = unassigned DNA
attcccatgtcaactaagttttttttcccccaatccaaaacaaactaatatctcaaaccaccgttt

SEQ ID NO: 7581 - RNA, 28 nt, Homo sapiens
  source 1..28: mol_type = unassigned RNA
tctatcaaaggtagaactcagtgatgta

SEQ ID NO: 7582 - DNA, 28 bp, Homo sapiens
  source 1..28: mol_type = unassigned DNA
tctatcaaaggtagaactcagtgatgta

SEQ ID NO: 7583 - DNA, 28 bp, Homo sapiens
  source 1..28: mol_type = unassigned DNA
tacatcactgagttctacctttgataga

SEQ ID NO: 7584 - RNA, 32 nt, Homo sapiens
  source 1..32: mol_type = unassigned RNA
tgggaacattgtagtgctgatggccagacgcc

SEQ ID NO: 7585 - DNA, 32 bp, Homo sapiens
  source 1..32: mol_type = unassigned DNA
tgggaacattgtagtgctgatggccagacgcc

SEQ ID NO: 7586 - DNA, 32 bp, Homo sapiens
  source 1..32: mol_type = unassigned DNA
ggcgtctggccatcagcactacaatgttccca

SEQ ID NO: 7587 - RNA, 25 nt, Homo sapiens
  source 1..25: mol_type = unassigned RNA
tactgtattagatttgtattgttgt

SEQ ID NO: 7588 - DNA, 25 bp, Homo sapiens
  source 1..25: mol_type = unassigned DNA
tactgtattagatttgtattgttgt

SEQ ID NO: 7589 - DNA, 25 bp, Homo sapiens
  source 1..25: mol_type = unassigned DNA
acaacaatacaaatctaatacagta

SEQ ID NO: 7590 - RNA, 31 nt, Homo sapiens
  source 1..31: mol_type = unassigned RNA
gaggagatgaaccgtgtcctggccgacccca

SEQ ID NO: 7591 - DNA, 31 bp, Homo sapiens
  source 1..31: mol_type = unassigned DNA
gaggagatgaaccgtgtcctggccgacccca

SEQ ID NO: 7592 - DNA, 31 bp, Homo sapiens
  source 1..31: mol_type = unassigned DNA
tggggtcggccaggacacggttcatctcctc

SEQ ID NO: 7593 - RNA, 25 nt, Homo sapiens
  source 1..25: mol_type = unassigned RNA
aaaagcactcgcagaattcactgca

SEQ ID NO: 7594 - DNA, 25 bp, Homo sapiens
  source 1..25: mol_type = unassigned DNA
aaaagcactcgcagaattcactgca

SEQ ID NO: 7595 - DNA, 25 bp, Homo sapiens
  source 1..25: mol_type = unassigned DNA
tgcagtgaattctgcgagtgctttt

SEQ ID NO: 7596 - RNA, 190 nt, Homo sapiens
  source 1..190: mol_type = unassigned RNA
agatttttttgggttgatgacatatagaaaggcaaagaaagtgattgcatgtttttgaaaatcattttcaggactttccttatcccagttgattgtgcagaatacactgcctgtcgcttgtcttctattcaccatggcttcttctggtaggtaatctatttggaaaatctgaaattgtaatgggcttatg

SEQ ID NO: 7597 - DNA, 190 bp, Homo sapiens
  source 1..190: mol_type = unassigned DNA
agatttttttgggttgatgacatatagaaaggcaaagaaagtgattgcatgtttttgaaaatcattttcaggactttccttatcccagttgattgtgcagaatacactgcctgtcgcttgtcttctattcaccatggcttcttctggtaggtaatctatttggaaaatctgaaattgtaatgggcttatg

SEQ ID NO: 7598 - DNA, 190 bp, Homo sapiens
  source 1..190: mol_type = unassigned DNA
cataagcccattacaatttcagattttccaaatagattacctaccagaagaagccatggtgaatagaagacaagcgacaggcagtgtattctgcacaatcaactgggataaggaaagtcctgaaaatgattttcaaaaacatgcaatcactttctttgcctttctatatgtcatcaacccaaaaaaatct

SEQ ID NO: 7599 - RNA, 32 nt, Homo sapiens
  source 1..32: mol_type = unassigned RNA
aaaaataaggaaccatgacattgtagatattt

SEQ ID NO: 7600 - DNA, 32 bp, Homo sapiens
  source 1..32: mol_type = unassigned DNA
aaaaataaggaaccatgacattgtagatattt

SEQ ID NO: 7601 - DNA, 32 bp, Homo sapiens
  source 1..32: mol_type = unassigned DNA
aaatatctacaatgtcatggttccttattttt

SEQ ID NO: 7602 - RNA, 81 nt, Homo sapiens
  source 1..81: mol_type = unassigned RNA
atgtgtggaagcctgagaagcttgggacattcgaagccacaggcagaattctctgaactgaggtcaaagtttaggaaaaaa

SEQ ID NO: 7603 - DNA, 81 bp, Homo sapiens
  source 1..81: mol_type = unassigned DNA
atgtgtggaagcctgagaagcttgggacattcgaagccacaggcagaattctctgaactgaggtcaaagtttaggaaaaaa

SEQ ID NO: 7604 - DNA, 81 bp, Homo sapiens
  source 1..81: mol_type = unassigned DNA
ttttttcctaaactttgacctcagttcagagaattctgcctgtggcttcgaatgtcccaagcttctcaggcttccacacat

SEQ ID NO: 7605 - RNA, 30 nt, Homo sapiens
  source 1..30: mol_type = unassigned RNA
cagaccatctgtaagctttggtctgcttgt

SEQ ID NO: 7606 - DNA, 30 bp, Homo sapiens
  source 1..30: mol_type = unassigned DNA
cagaccatctgtaagctttggtctgcttgt

SEQ ID NO: 7607 - DNA, 30 bp, Homo sapiens
  source 1..30: mol_type = unassigned DNA
acaagcagaccaaagcttacagatggtctg

SEQ ID NO: 7608 - RNA, 23 nt, Homo sapiens
  source 1..23: mol_type = unassigned RNA
agattatacttcttctgcttgta

SEQ ID NO: 7609 - DNA, 23 bp, Homo sapiens
  source 1..23: mol_type = unassigned DNA
agattatacttcttctgcttgta

SEQ ID NO: 7610 - DNA, 23 bp, Homo sapiens
  source 1..23: mol_type = unassigned DNA
tacaagcagaagaagtataatct

SEQ ID NO: 7611 - RNA, 32 nt, Homo sapiens
  source 1..32: mol_type = unassigned RNA
taattccccatgatgtcgtctctgaggatact

SEQ ID NO: 7612 - DNA, 32 bp, Homo sapiens
  source 1..32: mol_type = unassigned DNA
taattccccatgatgtcgtctctgaggatact

SEQ ID NO: 7613 - DNA, 32 bp, Homo sapiens
  source 1..32: mol_type = unassigned DNA
agtatcctcagagacgacatcatggggaatta

SEQ ID NO: 7614 - RNA, 36 nt, Homo sapiens
  source 1..36: mol_type = unassigned RNA
tggtaacttgtcagattgtctatgaacaaatccact

SEQ ID NO: 7615 - DNA, 36 bp, Homo sapiens
  source 1..36: mol_type = unassigned DNA
tggtaacttgtcagattgtctatgaacaaatccact

SEQ ID NO: 7616 - DNA, 36 bp, Homo sapiens
  source 1..36: mol_type = unassigned DNA
agtggatttgttcatagacaatctgacaagttacca

SEQ ID NO: 7617 - RNA, 29 nt, Homo sapiens
  source 1..29: mol_type = unassigned RNA
cttcctgtgtgactgccagctgaagtggc

SEQ ID NO: 7618 - DNA, 29 bp, Homo sapiens
  source 1..29: mol_type = unassigned DNA
cttcctgtgtgactgccagctgaagtggc

SEQ ID NO: 7619 - DNA, 29 bp, Homo sapiens
  source 1..29: mol_type = unassigned DNA
gccacttcagctggcagtcacacaggaag

SEQ ID NO: 7620 - RNA, 29 nt, Homo sapiens
  source 1..29: mol_type = unassigned RNA
agagcctacttgccctacatagctttgaa

SEQ ID NO: 7621 - DNA, 29 bp, Homo sapiens
  source 1..29: mol_type = unassigned DNA
agagcctacttgccctacatagctttgaa

SEQ ID NO: 7622 - DNA, 29 bp, Homo sapiens
  source 1..29: mol_type = unassigned DNA
ttcaaagctatgtagggcaagtaggctct

SEQ ID NO: 7623 - RNA, 30 nt, Homo sapiens
  source 1..30: mol_type = unassigned RNA
tctcactgcaatgaaccaaaagcggctgag

SEQ ID NO: 7624 - DNA, 30 bp, Homo sapiens
  source 1..30: mol_type = unassigned DNA
tctcactgcaatgaaccaaaagcggctgag

SEQ ID NO: 7625 - DNA, 30 bp, Homo sapiens
  source 1..30: mol_type = unassigned DNA
ctcagccgcttttggttcattgcagtgaga

SEQ ID NO: 7626 - RNA, 25 nt, Homo sapiens
  source 1..25: mol_type = unassigned RNA
ccagctctccttcttctgcttgtag

SEQ ID NO: 7627 - DNA, 25 bp, Homo sapiens
  source 1..25: mol_type = unassigned DNA
ccagctctccttcttctgcttgtag

SEQ ID NO: 7628 - DNA, 25 bp, Homo sapiens
  source 1..25: mol_type = unassigned DNA
ctacaagcagaagaaggagagctgg

SEQ ID NO: 7629 - RNA, 34 nt, Homo sapiens
  source 1..34: mol_type = unassigned RNA
ggggcagggctgaggtctgggctgggtggtcatg

SEQ ID NO: 7630 - DNA, 34 bp, Homo sapiens
  source 1..34: mol_type = unassigned DNA
ggggcagggctgaggtctgggctgggtggtcatg

SEQ ID NO: 7631 - DNA, 34 bp, Homo sapiens
  source 1..34: mol_type = unassigned DNA
catgaccacccagcccagacctcagccctgcccc

SEQ ID NO: 7632 - RNA, 27 nt, Homo sapiens
  source 1..27: mol_type = unassigned RNA
acattgtatcctcattgtaccaggtac

SEQ ID NO: 7633 - DNA, 27 bp, Homo sapiens
  source 1..27: mol_type = unassigned DNA
acattgtatcctcattgtaccaggtac

SEQ ID NO: 7634 - DNA, 27 bp, Homo sapiens
  source 1..27: mol_type = unassigned DNA
gtacctggtacaatgaggatacaatgt

SEQ ID NO: 7635 - RNA, 66 nt, Homo sapiens
  source 1..66: mol_type = unassigned RNA
tcagtaagaagcgaattgctttgacagataacactttgattgctcgatctcttggtaaatatggca

SEQ ID NO: 7636 - DNA, 66 bp, Homo sapiens
  source 1..66: mol_type = unassigned DNA
tcagtaagaagcgaattgctttgacagataacactttgattgctcgatctcttggtaaatatggca

SEQ ID NO: 7637 - DNA, 66 bp, Homo sapiens
  source 1..66: mol_type = unassigned DNA
tgccatatttaccaagagatcgagcaatcaaagtgttatctgtcaaagcaattcgcttcttactga

SEQ ID NO: 7638 - RNA, 56 nt, Homo sapiens
  source 1..56: mol_type = unassigned RNA
ttttgcaatgggggtctcacactgtctcccagggtggattgtagctcactgtaacc

SEQ ID NO: 7639 - DNA, 56 bp, Homo sapiens
  source 1..56: mol_type = unassigned DNA
ttttgcaatgggggtctcacactgtctcccagggtggattgtagctcactgtaacc

SEQ ID NO: 7640 - DNA, 56 bp, Homo sapiens
  source 1..56: mol_type = unassigned DNA
ggttacagtgagctacaatccaccctgggagacagtgtgagacccccattgcaaaa

SEQ ID NO: 7641 - RNA, 32 nt, Homo sapiens
  source 1..32: mol_type = unassigned RNA
ctgacctgcttcctgaggactttgtcaggttg

SEQ ID NO: 7642 - DNA, 32 bp, Homo sapiens
  source 1..32: mol_type = unassigned DNA
ctgacctgcttcctgaggactttgtcaggttg

SEQ ID NO: 7643 - DNA, 32 bp, Homo sapiens
  source 1..32: mol_type = unassigned DNA
caacctgacaaagtcctcaggaagcaggtcag

SEQ ID NO: 7644 - RNA, 31 nt, Homo sapiens
  source 1..31: mol_type = unassigned RNA
tccttgggctgctggtgaacttctgtggcca

SEQ ID NO: 7645 - DNA, 31 bp, Homo sapiens
  source 1..31: mol_type = unassigned DNA
tccttgggctgctggtgaacttctgtggcca

SEQ ID NO: 7646 - DNA, 31 bp, Homo sapiens
  source 1..31: mol_type = unassigned DNA
tggccacagaagttcaccagcagcccaagga

SEQ ID NO: 7647 - RNA, 90 nt, Homo sapiens
  source 1..90: mol_type = unassigned RNA
tatgtcactgctataaatcactagtttgctagattgaaccagcaagctattaaagaacatgacagaatttactgtagataaatgcaaatt

SEQ ID NO: 7648 - DNA, 90 bp, Homo sapiens
  source 1..90: mol_type = unassigned DNA
tatgtcactgctataaatcactagtttgctagattgaaccagcaagctattaaagaacatgacagaatttactgtagataaatgcaaatt

SEQ ID NO: 7649 - DNA, 90 bp, Homo sapiens
  source 1..90: mol_type = unassigned DNA
aatttgcatttatctacagtaaattctgtcatgttctttaatagcttgctggttcaatctagcaaactagtgatttatagcagtgacata

SEQ ID NO: 7650 - RNA, 29 nt, Homo sapiens
  source 1..29: mol_type = unassigned RNA
accttttgtctatctctggcctgccacga

SEQ ID NO: 7651 - DNA, 29 bp, Homo sapiens
  source 1..29: mol_type = unassigned DNA
accttttgtctatctctggcctgccacga

SEQ ID NO: 7652 - DNA, 29 bp, Homo sapiens
  source 1..29: mol_type = unassigned DNA
tcgtggcaggccagagatagacaaaaggt

SEQ ID NO: 7653 - RNA, 62 nt, Homo sapiens
  source 1..62: mol_type = unassigned RNA
aagttcacatgtctctctttctctgggactggtccctgttgccttattagtttgtttggtga

SEQ ID NO: 7654 - DNA, 62 bp, Homo sapiens
  source 1..62: mol_type = unassigned DNA
aagttcacatgtctctctttctctgggactggtccctgttgccttattagtttgtttggtga

SEQ ID NO: 7655 - DNA, 62 bp, Homo sapiens
  source 1..62: mol_type = unassigned DNA
tcaccaaacaaactaataaggcaacagggaccagtcccagagaaagagagacatgtgaactt

SEQ ID NO: 7656 - RNA, 56 nt, Homo sapiens
  source 1..56: mol_type = unassigned RNA
ggctaaaagatggtgaattgtggaataaattctttgtgcggattctgaatgccaat

SEQ ID NO: 7657 - DNA, 56 bp, Homo sapiens
  source 1..56: mol_type = unassigned DNA
ggctaaaagatggtgaattgtggaataaattctttgtgcggattctgaatgccaat

SEQ ID NO: 7658 - DNA, 56 bp, Homo sapiens
  source 1..56: mol_type = unassigned DNA
attggcattcagaatccgcacaaagaatttattccacaattcaccatcttttagcc

SEQ ID NO: 7659 - RNA, 32 nt, Homo sapiens
  source 1..32: mol_type = unassigned RNA
gtccctgctagtctcagccaggagcctggatt

SEQ ID NO: 7660 - DNA, 32 bp, Homo sapiens
  source 1..32: mol_type = unassigned DNA
gtccctgctagtctcagccaggagcctggatt

SEQ ID NO: 7661 - DNA, 32 bp, Homo sapiens
  source 1..32: mol_type = unassigned DNA
aatccaggctcctggctgagactagcagggac

SEQ ID NO: 7662 - RNA, 80 nt, Homo sapiens
  source 1..80: mol_type = unassigned RNA
tcatccagaagtgtctgcactgcctggggaggaggacgaagaggcactgcattatttgaccagagttgaaatgacagact

SEQ ID NO: 7663 - DNA, 80 bp, Homo sapiens
  source 1..80: mol_type = unassigned DNA
tcatccagaagtgtctgcactgcctggggaggaggacgaagaggcactgcattatttgaccagagttgaaatgacagact

SEQ ID NO: 7664 - DNA, 80 bp, Homo sapiens
  source 1..80: mol_type = unassigned DNA
agtctgtcatttcaactctggtcaaataatgcagtgcctcttcgtcctcctccccaggcagtgcagacacttctggatga

SEQ ID NO: 7665 - RNA, 151 nt, Homo sapiens
  source 1..151: mol_type = unassigned RNA
gtggcactaagcccctccccccacatcctgtccatcccgtgtgagccagagaagaacccgagggcaccttctgcctgcctgccctccttcccagaactgctgtgacttccctctgacataggaggagactgagggtcagagaggtaaaggg

SEQ ID NO: 7666 - DNA, 151 bp, Homo sapiens
  source 1..151: mol_type = unassigned DNA
gtggcactaagcccctccccccacatcctgtccatcccgtgtgagccagagaagaacccgagggcaccttctgcctgcctgccctccttcccagaactgctgtgacttccctctgacataggaggagactgagggtcagagaggtaaaggg

SEQ ID NO: 7667 - DNA, 151 bp, Homo sapiens
  source 1..151: mol_type = unassigned DNA
ccctttacctctctgaccctcagtctcctcctatgtcagagggaagtcacagcagttctgggaaggagggcaggcaggcagaaggtgccctcgggttcttctctggctcacacgggatggacaggatgtggggggaggggcttagtgccac

SEQ ID NO: 7668 - RNA, 31 nt, Homo sapiens
  source 1..31: mol_type = unassigned RNA
tctcctccccagttcgcagatttccgcccac

SEQ ID NO: 7669 - DNA, 31 bp, Homo sapiens
  source 1..31: mol_type = unassigned DNA
tctcctccccagttcgcagatttccgcccac

SEQ ID NO: 7670 - DNA, 31 bp, Homo sapiens
  source 1..31: mol_type = unassigned DNA
gtgggcggaaatctgcgaactggggaggaga

SEQ ID NO: 7671 - RNA, 29 nt, Homo sapiens
  source 1..29: mol_type = unassigned RNA
accagcgtgttgagcctgaatggtacatt

SEQ ID NO: 7672 - DNA, 29 bp, Homo sapiens
  source 1..29: mol_type = unassigned DNA
accagcgtgttgagcctgaatggtacatt

SEQ ID NO: 7673 - DNA, 29 bp, Homo sapiens
  source 1..29: mol_type = unassigned DNA
aatgtaccattcaggctcaacacgctggt

SEQ ID NO: 7674 - RNA, 45 nt, Homo sapiens
  source 1..45: mol_type = unassigned RNA
agcaatgtgggttgggaaaataatttgcaatggtagaaataatta

SEQ ID NO: 7675 - DNA, 45 bp, Homo sapiens
  source 1..45: mol_type = unassigned DNA
agcaatgtgggttgggaaaataatttgcaatggtagaaataatta

SEQ ID NO: 7676 - DNA, 45 bp, Homo sapiens
  source 1..45: mol_type = unassigned DNA
taattatttctaccattgcaaattattttcccaacccacattgct

SEQ ID NO: 7677 - RNA, 64 nt, Homo sapiens
  source 1..64: mol_type = unassigned RNA
ctgttttttattctgtgtagggtgtccaattgtcttctgcttgtgacagtggtatgctggtaca

SEQ ID NO: 7678 - DNA, 64 bp, Homo sapiens
  source 1..64: mol_type = unassigned DNA
ctgttttttattctgtgtagggtgtccaattgtcttctgcttgtgacagtggtatgctggtaca

SEQ ID NO: 7679 - DNA, 64 bp, Homo sapiens
  source 1..64: mol_type = unassigned DNA
tgtaccagcataccactgtcacaagcagaagacaattggacaccctacacagaataaaaaacag

SEQ ID NO: 7680 - RNA, 31 nt, Homo sapiens
  source 1..31: mol_type = unassigned RNA
ctgcgcataaaggaccagatgaaactctgag

SEQ ID NO: 7681 - DNA, 31 bp, Homo sapiens
  source 1..31: mol_type = unassigned DNA
ctgcgcataaaggaccagatgaaactctgag

SEQ ID NO: 7682 - DNA, 31 bp, Homo sapiens
  source 1..31: mol_type = unassigned DNA
ctcagagtttcatctggtcctttatgcgcag

SEQ ID NO: 7683 - RNA, 40 nt, Homo sapiens
  source 1..40: mol_type = unassigned RNA
tccatcaaggcatatctgacaatccactcgtactcccaaa

SEQ ID NO: 7684 - DNA, 40 bp, Homo sapiens
  source 1..40: mol_type = unassigned DNA
tccatcaaggcatatctgacaatccactcgtactcccaaa

SEQ ID NO: 7685 - DNA, 40 bp, Homo sapiens
  source 1..40: mol_type = unassigned DNA
tttgggagtacgagtggattgtcagatatgccttgatgga

SEQ ID NO: 7686 - RNA, 32 nt, Homo sapiens
  source 1..32: mol_type = unassigned RNA
agcgtagtcttaggtgtctggagaagtcgccc

SEQ ID NO: 7687 - DNA, 32 bp, Homo sapiens
  source 1..32: mol_type = unassigned DNA
agcgtagtcttaggtgtctggagaagtcgccc

SEQ ID NO: 7688 - DNA, 32 bp, Homo sapiens
  source 1..32: mol_type = unassigned DNA
gggcgacttctccagacacctaagactacgct

SEQ ID NO: 7689 - RNA, 62 nt, Homo sapiens
  source 1..62: mol_type = unassigned RNA
tttgtttgttttctagcgtgaatgctgggggaaggatggggatggtggcttaggagggggtg

SEQ ID NO: 7690 - DNA, 62 bp, Homo sapiens
  source 1..62: mol_type = unassigned DNA
tttgtttgttttctagcgtgaatgctgggggaaggatggggatggtggcttaggagggggtg

SEQ ID NO: 7691 - DNA, 62 bp, Homo sapiens
  source 1..62: mol_type = unassigned DNA
caccccctcctaagccaccatccccatccttcccccagcattcacgctagaaaacaaacaaa

SEQ ID NO: 7692 - RNA, 54 nt, Homo sapiens
  source 1..54: mol_type = unassigned RNA
attcacttccgagattcagacatagccatgctggtggccttctgaatcactgca

SEQ ID NO: 7693 - DNA, 54 bp, Homo sapiens
  source 1..54: mol_type = unassigned DNA
attcacttccgagattcagacatagccatgctggtggccttctgaatcactgca

SEQ ID NO: 7694 - DNA, 54 bp, Homo sapiens
  source 1..54: mol_type = unassigned DNA
tgcagtgattcagaaggccaccagcatggctatgtctgaatctcggaagtgaat

SEQ ID NO: 7695 - RNA, 131 nt, Homo sapiens
  source 1..131: mol_type = unassigned RNA
attctgattgagccaacattggtgacatgcccactgctggaccagtaacggttgcaatgctactgccagcaatgggcatgcgactgatgttggctcaatcagactgaaaggagagactgagtcactgcctg

SEQ ID NO: 7696 - DNA, 131 bp, Homo sapiens
  source 1..131: mol_type = unassigned DNA
attctgattgagccaacattggtgacatgcccactgctggaccagtaacggttgcaatgctactgccagcaatgggcatgcgactgatgttggctcaatcagactgaaaggagagactgagtcactgcctg

SEQ ID NO: 7697 - DNA, 131 bp, Homo sapiens
  source 1..131: mol_type = unassigned DNA
caggcagtgactcagtctctcctttcagtctgattgagccaacatcagtcgcatgcccattgctggcagtagcattgcaaccgttactggtccagcagtgggcatgtcaccaatgttggctcaatcagaat

SEQ ID NO: 7698 - RNA, 31 nt, Homo sapiens
  source 1..31: mol_type = unassigned RNA
atgctgaatctcaccctgtaggactcacaca

SEQ ID NO: 7699 - DNA, 31 bp, Homo sapiens
  source 1..31: mol_type = unassigned DNA
atgctgaatctcaccctgtaggactcacaca

SEQ ID NO: 7700 - DNA, 31 bp, Homo sapiens
  source 1..31: mol_type = unassigned DNA
tgtgtgagtcctacagggtgagattcagcat

SEQ ID NO: 7701 - RNA, 27 nt, Homo sapiens
  source 1..27: mol_type = unassigned RNA
gataagaactggtagaattctctggat

SEQ ID NO: 7702 - DNA, 27 bp, Homo sapiens
  source 1..27: mol_type = unassigned DNA
gataagaactggtagaattctctggat

SEQ ID NO: 7703 - DNA, 27 bp, Homo sapiens
  source 1..27: mol_type = unassigned DNA
atccagagaattctaccagttcttatc

SEQ ID NO: 7704 - RNA, 34 nt, Homo sapiens
  source 1..34: mol_type = unassigned RNA
cacgtctacccagatcaccgcctggttgaccctc

SEQ ID NO: 7705 - DNA, 34 bp, Homo sapiens
  source 1..34: mol_type = unassigned DNA
cacgtctacccagatcaccgcctggttgaccctc

SEQ ID NO: 7706 - DNA, 34 bp, Homo sapiens
  source 1..34: mol_type = unassigned DNA
gagggtcaaccaggcggtgatctgggtagacgtg

SEQ ID NO: 7707 - RNA, 61 nt, Homo sapiens
  source 1..61: mol_type = unassigned RNA
caacaatgatgaaattatgactgttgactctcctgcttgtccctacatgaaaaccccagtc

SEQ ID NO: 7708 - DNA, 61 bp, Homo sapiens
  source 1..61: mol_type = unassigned DNA
caacaatgatgaaattatgactgttgactctcctgcttgtccctacatgaaaaccccagtc

SEQ ID NO: 7709 - DNA, 61 bp, Homo sapiens
  source 1..61: mol_type = unassigned DNA
gactggggttttcatgtagggacaagcaggagagtcaacagtcataatttcatcattgttg

SEQ ID NO: 7710 - RNA, 73 nt, Homo sapiens
  source 1..73: mol_type = unassigned RNA
atggccctggtctgagggaggcctggccctggtcttaggaggaaaacctgaagcaagtctgaggaccgaggca

SEQ ID NO: 7711 - DNA, 73 bp, Homo sapiens
  source 1..73: mol_type = unassigned DNA
atggccctggtctgagggaggcctggccctggtcttaggaggaaaacctgaagcaagtctgaggaccgaggca

SEQ ID NO: 7712 - DNA, 73 bp, Homo sapiens
  source 1..73: mol_type = unassigned DNA
tgcctcggtcctcagacttgcttcaggttttcctcctaagaccagggccaggcctccctcagaccagggccat

SEQ ID NO: 7713 - RNA, 114 nt, Homo sapiens
  source 1..114: mol_type = unassigned RNA
aaataagcctaagaaagaattaattaaagttctgattcagaggggatatgattcggatcctgtgaaggcctggaaagaagcccagcaaaaggtaatcttgggtggcacttttct

SEQ ID NO: 7714 - DNA, 114 bp, Homo sapiens
  source 1..114: mol_type = unassigned DNA
aaataagcctaagaaagaattaattaaagttctgattcagaggggatatgattcggatcctgtgaaggcctggaaagaagcccagcaaaaggtaatcttgggtggcacttttct

SEQ ID NO: 7715 - DNA, 114 bp, Homo sapiens
  source 1..114: mol_type = unassigned DNA
agaaaagtgccacccaagattaccttttgctgggcttctttccaggccttcacaggatccgaatcatatcccctctgaatcagaactttaattaattctttcttaggcttattt

SEQ ID NO: 7716 - RNA, 27 nt, Homo sapiens
  source 1..27: mol_type = unassigned RNA
gggcattgggacgaggaccggagcaga

SEQ ID NO: 7717 - DNA, 27 bp, Homo sapiens
  source 1..27: mol_type = unassigned DNA
gggcattgggacgaggaccggagcaga

SEQ ID NO: 7718 - DNA, 27 bp, Homo sapiens
  source 1..27: mol_type = unassigned DNA
tctgctccggtcctcgtcccaatgccc

SEQ ID NO: 7719 - RNA, 30 nt, Homo sapiens
  source 1..30: mol_type = unassigned RNA
tccagagagtagaaacttctgaaggcctca

SEQ ID NO: 7720 - DNA, 30 bp, Homo sapiens
  source 1..30: mol_type = unassigned DNA
tccagagagtagaaacttctgaaggcctca

SEQ ID NO: 7721 - DNA, 30 bp, Homo sapiens
  source 1..30: mol_type = unassigned DNA
tgaggccttcagaagtttctactctctgga

SEQ ID NO: 7722 - RNA, 148 nt, Homo sapiens
  source 1..148: mol_type = unassigned RNA
atgcattgattcttctagccctcacatcgtcacgacagagccaatgactgggagataactcagtgtgctgggagctctcagaaaactgctcaccctttacttgcttatatttggaaagtaaggcgagctacccactgtatttaagagg

SEQ ID NO: 7723 - DNA, 148 bp, Homo sapiens
  source 1..148: mol_type = unassigned DNA
atgcattgattcttctagccctcacatcgtcacgacagagccaatgactgggagataactcagtgtgctgggagctctcagaaaactgctcaccctttacttgcttatatttggaaagtaaggcgagctacccactgtatttaagagg

SEQ ID NO: 7724 - DNA, 148 bp, Homo sapiens
  source 1..148: mol_type = unassigned DNA
cctcttaaatacagtgggtagctcgccttactttccaaatataagcaagtaaagggtgagcagttttctgagagctcccagcacactgagttatctcccagtcattggctctgtcgtgacgatgtgagggctagaagaatcaatgcat

SEQ ID NO: 7725 - RNA, 26 nt, Homo sapiens
  source 1..26: mol_type = unassigned RNA
acttggcaattttagaactgacatta

SEQ ID NO: 7726 - DNA, 26 bp, Homo sapiens
  source 1..26: mol_type = unassigned DNA
acttggcaattttagaactgacatta

SEQ ID NO: 7727 - DNA, 26 bp, Homo sapiens
  source 1..26: mol_type = unassigned DNA
taatgtcagttctaaaattgccaagt

SEQ ID NO: 7728 - RNA, 60 nt, Homo sapiens
  source 1..60: mol_type = unassigned RNA
cacatatcaaaagggacgggactgggaaccgggaaacggtaaaaatgccaacgagaaagt

SEQ ID NO: 7729 - DNA, 60 bp, Homo sapiens
  source 1..60: mol_type = unassigned DNA
cacatatcaaaagggacgggactgggaaccgggaaacggtaaaaatgccaacgagaaagt

SEQ ID NO: 7730 - DNA, 60 bp, Homo sapiens
  source 1..60: mol_type = unassigned DNA
actttctcgttggcatttttaccgtttcccggttcccagtcccgtcccttttgatatgtg

SEQ ID NO: 7731 - RNA, 30 nt, Homo sapiens
  source 1..30: mol_type = unassigned RNA
tatatatctgactcagacaagcgaaagcac

SEQ ID NO: 7732 - DNA, 30 bp, Homo sapiens
  source 1..30: mol_type = unassigned DNA
tatatatctgactcagacaagcgaaagcac

SEQ ID NO: 7733 - DNA, 30 bp, Homo sapiens
  source 1..30: mol_type = unassigned DNA
gtgctttcgcttgtctgagtcagatatata

SEQ ID NO: 7734 - RNA, 31 nt, Homo sapiens
  source 1..31: mol_type = unassigned RNA
gggcagagtgagtggactaggactgctccag

SEQ ID NO: 7735 - DNA, 31 bp, Homo sapiens
  source 1..31: mol_type = unassigned DNA
gggcagagtgagtggactaggactgctccag

SEQ ID NO: 7736 - DNA, 31 bp, Homo sapiens
  source 1..31: mol_type = unassigned DNA
ctggagcagtcctagtccactcactctgccc

SEQ ID NO: 7737 - RNA, 34 nt, Homo sapiens
  source 1..34: mol_type = unassigned RNA
aaagttagactgagatattaatttttatggtttt

SEQ ID NO: 7738 - DNA, 34 bp, Homo sapiens
  source 1..34: mol_type = unassigned DNA
aaagttagactgagatattaatttttatggtttt

SEQ ID NO: 7739 - DNA, 34 bp, Homo sapiens
  source 1..34: mol_type = unassigned DNA
aaaaccataaaaattaatatctcagtctaacttt

SEQ ID NO: 7740 - RNA, 29 nt, Homo sapiens
  source 1..29: mol_type = unassigned RNA
cgagttctgtgcggtggacttatgctccc

SEQ ID NO: 7741 - DNA, 29 bp, Homo sapiens
  source 1..29: mol_type = unassigned DNA
cgagttctgtgcggtggacttatgctccc

SEQ ID NO: 7742 - DNA, 29 bp, Homo sapiens
  source 1..29: mol_type = unassigned DNA
gggagcataagtccaccgcacagaactcg

SEQ ID NO: 7743 - RNA, 32 nt, Homo sapiens
  source 1..32: mol_type = unassigned RNA
cgggacaggtagactaggaccagtacgcgccg

SEQ ID NO: 7744 - DNA, 32 bp, Homo sapiens
  source 1..32: mol_type = unassigned DNA
cgggacaggtagactaggaccagtacgcgccg

SEQ ID NO: 7745 - DNA, 32 bp, Homo sapiens
  source 1..32: mol_type = unassigned DNA
cggcgcgtactggtcctagtctacctgtcccg

SEQ ID NO: 7746 - RNA, 27 nt, Homo sapiens
  source 1..27: mol_type = unassigned RNA
cggatctcagcgcgggagcagtgcttc

SEQ ID NO: 7747 - DNA, 27 bp, Homo sapiens
  source 1..27: mol_type = unassigned DNA
cggatctcagcgcgggagcagtgcttc

SEQ ID NO: 7748 - DNA, 27 bp, Homo sapiens
  source 1..27: mol_type = unassigned DNA
gaagcactgctcccgcgctgagatccg

SEQ ID NO: 7749 - RNA, 28 nt, Homo sapiens
  source 1..28: mol_type = unassigned RNA
atgctcatcgtcactggccatcagagaa

SEQ ID NO: 7750 - DNA, 28 bp, Homo sapiens
  source 1..28: mol_type = unassigned DNA
atgctcatcgtcactggccatcagagaa

SEQ ID NO: 7751 - DNA, 28 bp, Homo sapiens
  source 1..28: mol_type = unassigned DNA
ttctctgatggccagtgacgatgagcat

SEQ ID NO: 7752 - RNA, 24 nt, Homo sapiens
  source 1..24: mol_type = unassigned RNA
ttttggaatgggataattcacaca

SEQ ID NO: 7753 - DNA, 24 bp, Homo sapiens
  source 1..24: mol_type = unassigned DNA
ttttggaatgggataattcacaca

SEQ ID NO: 7754 - DNA, 24 bp, Homo sapiens
  source 1..24: mol_type = unassigned DNA
tgtgtgaattatcccattccaaaa

SEQ ID NO: 7755 - RNA, 27 nt, Homo sapiens
  source 1..27: mol_type = unassigned RNA
ttcctggcactggtacaatttaatgaa

SEQ ID NO: 7756 - DNA, 27 bp, Homo sapiens
  source 1..27: mol_type = unassigned DNA
ttcctggcactggtacaatttaatgaa

SEQ ID NO: 7757 - DNA, 27 bp, Homo sapiens
  source 1..27: mol_type = unassigned DNA
ttcattaaattgtaccagtgccaggaa

SEQ ID NO: 7758 - RNA, 27 nt, Homo sapiens
  source 1..27: mol_type = unassigned RNA
acaggaaggttgagagagaggtgctgg

SEQ ID NO: 7759 - DNA, 27 bp, Homo sapiens
  source 1..27: mol_type = unassigned DNA
acaggaaggttgagagagaggtgctgg

SEQ ID NO: 7760 - DNA, 27 bp, Homo sapiens
  source 1..27: mol_type = unassigned DNA
ccagcacctctctctcaaccttcctgt

SEQ ID NO: 7761 - RNA, 51 nt, Homo sapiens
  source 1..51: mol_type = unassigned RNA
tctattttcagtttgctgttttggatattagtttgtttagtttatagtatt

SEQ ID NO: 7762 - DNA, 51 bp, Homo sapiens
  source 1..51: mol_type = unassigned DNA
tctattttcagtttgctgttttggatattagtttgtttagtttatagtatt

SEQ ID NO: 7763 - DNA, 51 bp, Homo sapiens
  source 1..51: mol_type = unassigned DNA
aatactataaactaaacaaactaatatccaaaacagcaaactgaaaataga

SEQ ID NO: 7764 - RNA, 30 nt, Homo sapiens
  source 1..30: mol_type = unassigned RNA
ctcacagcttcccagcgactctagaaacac

SEQ ID NO: 7765 - DNA, 30 bp, Homo sapiens
  source 1..30: mol_type = unassigned DNA
ctcacagcttcccagcgactctagaaacac

SEQ ID NO: 7766 - DNA, 30 bp, Homo sapiens
  source 1..30: mol_type = unassigned DNA
gtgtttctagagtcgctgggaagctgtgag

SEQ ID NO: 7767 - RNA, 24 nt, Homo sapiens
  source 1..24: mol_type = unassigned RNA
atcacccatcaacctaccttgcaa

SEQ ID NO: 7768 - DNA, 24 bp, Homo sapiens
  source 1..24: mol_type = unassigned DNA
atcacccatcaacctaccttgcaa

SEQ ID NO: 7769 - DNA, 24 bp, Homo sapiens
  source 1..24: mol_type = unassigned DNA
ttgcaaggtaggttgatgggtgat

SEQ ID NO: 7770 - RNA, 65 nt, Homo sapiens
  source 1..65: mol_type = unassigned RNA
gctttgggtccaggaatgtcaagaccagcaagaatatcaccattgctgactgtggacaattccag

SEQ ID NO: 7771 - DNA, 65 bp, Homo sapiens
  source 1..65: mol_type = unassigned DNA
gctttgggtccaggaatgtcaagaccagcaagaatatcaccattgctgactgtggacaattccag

SEQ ID NO: 7772 - DNA, 65 bp, Homo sapiens
  source 1..65: mol_type = unassigned DNA
ctggaattgtccacagtcagcaatggtgatattcttgctggtcttgacattcctggacccaaagc

SEQ ID NO: 7773 - RNA, 27 nt, Homo sapiens
  source 1..27: mol_type = unassigned RNA
cgcccggccgagctgcagggaccgcac

SEQ ID NO: 7774 - DNA, 27 bp, Homo sapiens
  source 1..27: mol_type = unassigned DNA
cgcccggccgagctgcagggaccgcac

SEQ ID NO: 7775 - DNA, 27 bp, Homo sapiens
  source 1..27: mol_type = unassigned DNA
gtgcggtccctgcagctcggccgggcg

SEQ ID NO: 7776 - RNA, 29 nt, Homo sapiens
  source 1..29: mol_type = unassigned RNA
tatctgcactagtgaattcactggaaaga

SEQ ID NO: 7777 - DNA, 29 bp, Homo sapiens
  source 1..29: mol_type = unassigned DNA
tatctgcactagtgaattcactggaaaga

SEQ ID NO: 7778 - DNA, 29 bp, Homo sapiens
  source 1..29: mol_type = unassigned DNA
tctttccagtgaattcactagtgcagata

SEQ ID NO: 7779 - RNA, 32 nt, Homo sapiens
  source 1..32: mol_type = unassigned RNA
ctgagaaagctctggaagctctggaaccaatg

SEQ ID NO: 7780 - DNA, 32 bp, Homo sapiens
  source 1..32: mol_type = unassigned DNA
ctgagaaagctctggaagctctggaaccaatg

SEQ ID NO: 7781 - DNA, 32 bp, Homo sapiens
  source 1..32: mol_type = unassigned DNA
cattggttccagagcttccagagctttctcag

SEQ ID NO: 7782 - RNA, 87 nt, Homo sapiens
  source 1..87: mol_type = unassigned RNA
cagcactttgggaactcaggcaggaggattgcttaaggccaggagttcaagaccagcctggctaacgtaatgagactctgtctctat

SEQ ID NO: 7783 - DNA, 87 bp, Homo sapiens
  source 1..87: mol_type = unassigned DNA
cagcactttgggaactcaggcaggaggattgcttaaggccaggagttcaagaccagcctggctaacgtaatgagactctgtctctat

SEQ ID NO: 7784 - DNA, 87 bp, Homo sapiens
  source 1..87: mol_type = unassigned DNA
atagagacagagtctcattacgttagccaggctggtcttgaactcctggccttaagcaatcctcctgcctgagttcccaaagtgctg

SEQ ID NO: 7785 - RNA, 32 nt, Homo sapiens
  source 1..32: mol_type = unassigned RNA
ttatctgaaatgcaggggtaggactcacactc

SEQ ID NO: 7786 - DNA, 32 bp, Homo sapiens
  source 1..32: mol_type = unassigned DNA
ttatctgaaatgcaggggtaggactcacactc

SEQ ID NO: 7787 - DNA, 32 bp, Homo sapiens
  source 1..32: mol_type = unassigned DNA
gagtgtgagtcctacccctgcatttcagataa

SEQ ID NO: 7788 - RNA, 23 nt, Homo sapiens
  source 1..23: mol_type = unassigned RNA
taatatattagtttgtatcattt

SEQ ID NO: 7789 - DNA, 23 bp, Homo sapiens
  source 1..23: mol_type = unassigned DNA
taatatattagtttgtatcattt

SEQ ID NO: 7790 - DNA, 23 bp, Homo sapiens
  source 1..23: mol_type = unassigned DNA
aaatgatacaaactaatatatta

SEQ ID NO: 7791 - RNA, 33 nt, Homo sapiens
  source 1..33: mol_type = unassigned RNA
aatacaaaatttgtcgggcgtggtggcgcatgc

SEQ ID NO: 7792 - DNA, 33 bp, Homo sapiens
  source 1..33: mol_type = unassigned DNA
aatacaaaatttgtcgggcgtggtggcgcatgc

SEQ ID NO: 7793 - DNA, 33 bp, Homo sapiens
  source 1..33: mol_type = unassigned DNA
gcatgcgccaccacgcccgacaaattttgtatt

SEQ ID NO: 7794 - RNA, 80 nt, Homo sapiens
  source 1..80: mol_type = unassigned RNA
cctttcctcccttccttcccttcttctttcttccactctctctgtttctcccattctgtctctgtgtcttcactttccat

SEQ ID NO: 7795 - DNA, 80 bp, Homo sapiens
  source 1..80: mol_type = unassigned DNA
cctttcctcccttccttcccttcttctttcttccactctctctgtttctcccattctgtctctgtgtcttcactttccat

SEQ ID NO: 7796 - DNA, 80 bp, Homo sapiens
  source 1..80: mol_type = unassigned DNA
atggaaagtgaagacacagagacagaatgggagaaacagagagagtggaagaaagaagaagggaaggaagggaggaaagg

SEQ ID NO: 7797 - RNA, 63 nt, Homo sapiens
  source 1..63: mol_type = unassigned RNA
tggcttagtaagcacagtggttttggtgagcacattgatgttgactgcctccaaagcaggaac

SEQ ID NO: 7798 - DNA, 63 bp, Homo sapiens
  source 1..63: mol_type = unassigned DNA
tggcttagtaagcacagtggttttggtgagcacattgatgttgactgcctccaaagcaggaac

SEQ ID NO: 7799 - DNA, 63 bp, Homo sapiens
  source 1..63: mol_type = unassigned DNA
gttcctgctttggaggcagtcaacatcaatgtgctcaccaaaaccactgtgcttactaagcca

SEQ ID NO: 7800 - RNA, 27 nt, Homo sapiens
  source 1..27: mol_type = unassigned RNA
tcccttggactgagccatgctattagc

SEQ ID NO: 7801 - DNA, 27 bp, Homo sapiens
  source 1..27: mol_type = unassigned DNA
tcccttggactgagccatgctattagc

SEQ ID NO: 7802 - DNA, 27 bp, Homo sapiens
  source 1..27: mol_type = unassigned DNA
gctaatagcatggctcagtccaaggga

SEQ ID NO: 7803 - RNA, 29 nt, Homo sapiens
  source 1..29: mol_type = unassigned RNA
ttacgcggcgttaagacttcgtagggtta

SEQ ID NO: 7804 - DNA, 29 bp, Homo sapiens
  source 1..29: mol_type = unassigned DNA
ttacgcggcgttaagacttcgtagggtta

SEQ ID NO: 7805 - DNA, 29 bp, Homo sapiens
  source 1..29: mol_type = unassigned DNA
taaccctacgaagtcttaacgccgcgtaa

SEQ ID NO: 7806 - RNA, 28 nt, Homo sapiens
  source 1..28: mol_type = unassigned RNA
gcaatcacttgtagagctcacactgtgt

SEQ ID NO: 7807 - DNA, 28 bp, Homo sapiens
  source 1..28: mol_type = unassigned DNA
gcaatcacttgtagagctcacactgtgt

SEQ ID NO: 7808 - DNA, 28 bp, Homo sapiens
  source 1..28: mol_type = unassigned DNA
acacagtgtgagctctacaagtgattgc

SEQ ID NO: 7809 - RNA, 31 nt, Homo sapiens
  source 1..31: mol_type = unassigned RNA
gggaagcagggcagaactctgaacgacaata

SEQ ID NO: 7810 - DNA, 31 bp, Homo sapiens
  source 1..31: mol_type = unassigned DNA
gggaagcagggcagaactctgaacgacaata

SEQ ID NO: 7811 - DNA, 31 bp, Homo sapiens
  source 1..31: mol_type = unassigned DNA
tattgtcgttcagagttctgccctgcttccc

SEQ ID NO: 7812 - RNA, 53 nt, Homo sapiens
  source 1..53: mol_type = unassigned RNA
gtttggtgtgctctcgcagcggccagaagtgtgaccagcacccttctgcagaa

SEQ ID NO: 7813 - DNA, 53 bp, Homo sapiens
  source 1..53: mol_type = unassigned DNA
gtttggtgtgctctcgcagcggccagaagtgtgaccagcacccttctgcagaa

SEQ ID NO: 7814 - DNA, 53 bp, Homo sapiens
  source 1..53: mol_type = unassigned DNA
ttctgcagaagggtgctggtcacacttctggccgctgcgagagcacaccaaac

SEQ ID NO: 7815 - RNA, 27 nt, Homo sapiens
  source 1..27: mol_type = unassigned RNA
aaatcagacaattgtagaactcaaaat

SEQ ID NO: 7816 - DNA, 27 bp, Homo sapiens
  source 1..27: mol_type = unassigned DNA
aaatcagacaattgtagaactcaaaat

SEQ ID NO: 7817 - DNA, 27 bp, Homo sapiens
  source 1..27: mol_type = unassigned DNA
attttgagttctacaattgtctgattt

SEQ ID NO: 7818 - RNA, 28 nt, Homo sapiens
  source 1..28: mol_type = unassigned RNA
cgggaggctgtgagctgagcggtggggt

SEQ ID NO: 7819 - DNA, 28 bp, Homo sapiens
  source 1..28: mol_type = unassigned DNA
cgggaggctgtgagctgagcggtggggt

SEQ ID NO: 7820 - DNA, 28 bp, Homo sapiens
  source 1..28: mol_type = unassigned DNA
accccaccgctcagctcacagcctcccg

SEQ ID NO: 7821 - RNA, 82 nt, Homo sapiens
  source 1..82: mol_type = unassigned RNA
ctctcctgcagaaacactgaaagccttggcaagttagaactcacagagcagcacattcctgagttctgggaatactgtgctc

SEQ ID NO: 7822 - DNA, 82 bp, Homo sapiens
  source 1..82: mol_type = unassigned DNA
ctctcctgcagaaacactgaaagccttggcaagttagaactcacagagcagcacattcctgagttctgggaatactgtgctc

SEQ ID NO: 7823 - DNA, 82 bp, Homo sapiens
  source 1..82: mol_type = unassigned DNA
gagcacagtattcccagaactcaggaatgtgctgctctgtgagttctaacttgccaaggctttcagtgtttctgcaggagag

SEQ ID NO: 7824 - RNA, 109 nt, Homo sapiens
  source 1..109: mol_type = unassigned RNA
aacactatgtgtcaaagactgttgggttgaaatgatgctcacttttcttcaatgtagaaagccaggactgatcaacctaacacagttaagcttattaggatgatgcagg

SEQ ID NO: 7825 - DNA, 109 bp, Homo sapiens
  source 1..109: mol_type = unassigned DNA
aacactatgtgtcaaagactgttgggttgaaatgatgctcacttttcttcaatgtagaaagccaggactgatcaacctaacacagttaagcttattaggatgatgcagg

SEQ ID NO: 7826 - DNA, 109 bp, Homo sapiens
  source 1..109: mol_type = unassigned DNA
cctgcatcatcctaataagcttaactgtgttaggttgatcagtcctggctttctacattgaagaaaagtgagcatcatttcaacccaacagtctttgacacatagtgtt

SEQ ID NO: 7827 - RNA, 31 nt, Homo sapiens
  source 1..31: mol_type = unassigned RNA
ttgccttgctcggctctggggccatgctgac

SEQ ID NO: 7828 - DNA, 31 bp, Homo sapiens
  source 1..31: mol_type = unassigned DNA
ttgccttgctcggctctggggccatgctgac

SEQ ID NO: 7829 - DNA, 31 bp, Homo sapiens
  source 1..31: mol_type = unassigned DNA
gtcagcatggccccagagccgagcaaggcaa

SEQ ID NO: 7830 - RNA, 32 nt, Homo sapiens
  source 1..32: mol_type = unassigned RNA
ttacatcttggaacctgagccatggaggtggc

SEQ ID NO: 7831 - DNA, 32 bp, Homo sapiens
  source 1..32: mol_type = unassigned DNA
ttacatcttggaacctgagccatggaggtggc

SEQ ID NO: 7832 - DNA, 32 bp, Homo sapiens
  source 1..32: mol_type = unassigned DNA
gccacctccatggctcaggttccaagatgtaa

SEQ ID NO: 7833 - RNA, 29 nt, Homo sapiens
  source 1..29: mol_type = unassigned RNA
aacagctctgaagcgaggtcatgaacgtt

SEQ ID NO: 7834 - DNA, 29 bp, Homo sapiens
  source 1..29: mol_type = unassigned DNA
aacagctctgaagcgaggtcatgaacgtt

SEQ ID NO: 7835 - DNA, 29 bp, Homo sapiens
  source 1..29: mol_type = unassigned DNA
aacgttcatgacctcgcttcagagctgtt

SEQ ID NO: 7836 - RNA, 32 nt, Homo sapiens
  source 1..32: mol_type = unassigned RNA
gatctactggactctgcatcggctggactgta

SEQ ID NO: 7837 - DNA, 32 bp, Homo sapiens
  source 1..32: mol_type = unassigned DNA
gatctactggactctgcatcggctggactgta

SEQ ID NO: 7838 - DNA, 32 bp, Homo sapiens
  source 1..32: mol_type = unassigned DNA
tacagtccagccgatgcagagtccagtagatc

SEQ ID NO: 7839 - RNA, 30 nt, Homo sapiens
  source 1..30: mol_type = unassigned RNA
ccagtagactcacctctactgttcagtctc

SEQ ID NO: 7840 - DNA, 30 bp, Homo sapiens
  source 1..30: mol_type = unassigned DNA
ccagtagactcacctctactgttcagtctc

SEQ ID NO: 7841 - DNA, 30 bp, Homo sapiens
  source 1..30: mol_type = unassigned DNA
gagactgaacagtagaggtgagtctactgg

SEQ ID NO: 7842 - RNA, 59 nt, Homo sapiens
  source 1..59: mol_type = unassigned RNA
ttctcttgaatgacaccttctttccccagagccttccctggactctgaggtgacttcca

SEQ ID NO: 7843 - DNA, 59 bp, Homo sapiens
  source 1..59: mol_type = unassigned DNA
ttctcttgaatgacaccttctttccccagagccttccctggactctgaggtgacttcca

SEQ ID NO: 7844 - DNA, 59 bp, Homo sapiens
  source 1..59: mol_type = unassigned DNA
tggaagtcacctcagagtccagggaaggctctggggaaagaaggtgtcattcaagagaa

SEQ ID NO: 7845 - RNA, 141 nt, Homo sapiens
  source 1..141: mol_type = unassigned RNA
agttaaccctcctatatctttgcagacctggagtggaagatcatttatgttggctcggctgagagtgaggaatttgatcagatcctagactcggtgctggtgggccctgtgccagcagggagacacatgtttgtctttcag

SEQ ID NO: 7846 - DNA, 141 bp, Homo sapiens
  source 1..141: mol_type = unassigned DNA
agttaaccctcctatatctttgcagacctggagtggaagatcatttatgttggctcggctgagagtgaggaatttgatcagatcctagactcggtgctggtgggccctgtgccagcagggagacacatgtttgtctttcag

SEQ ID NO: 7847 - DNA, 141 bp, Homo sapiens
  source 1..141: mol_type = unassigned DNA
ctgaaagacaaacatgtgtctccctgctggcacagggcccaccagcaccgagtctaggatctgatcaaattcctcactctcagccgagccaacataaatgatcttccactccaggtctgcaaagatataggagggttaact

SEQ ID NO: 7848 - RNA, 31 nt, Homo sapiens
  source 1..31: mol_type = unassigned RNA
ttggagcagattgttaaaatgtatgaagcat

SEQ ID NO: 7849 - DNA, 31 bp, Homo sapiens
  source 1..31: mol_type = unassigned DNA
ttggagcagattgttaaaatgtatgaagcat

SEQ ID NO: 7850 - DNA, 31 bp, Homo sapiens
  source 1..31: mol_type = unassigned DNA
atgcttcatacattttaacaatctgctccaa

SEQ ID NO: 7851 - RNA, 32 nt, Homo sapiens
  source 1..32: mol_type = unassigned RNA
tgttagtcagtgaccaggttccagggaaaatg

SEQ ID NO: 7852 - DNA, 32 bp, Homo sapiens
  source 1..32: mol_type = unassigned DNA
tgttagtcagtgaccaggttccagggaaaatg

SEQ ID NO: 7853 - DNA, 32 bp, Homo sapiens
  source 1..32: mol_type = unassigned DNA
cattttccctggaacctggtcactgactaaca

SEQ ID NO: 7854 - RNA, 30 nt, Homo sapiens
  source 1..30: mol_type = unassigned RNA
aaactgctcatcgtcactggccatcagaga

SEQ ID NO: 7855 - DNA, 30 bp, Homo sapiens
  source 1..30: mol_type = unassigned DNA
aaactgctcatcgtcactggccatcagaga

SEQ ID NO: 7856 - DNA, 30 bp, Homo sapiens
  source 1..30: mol_type = unassigned DNA
tctctgatggccagtgacgatgagcagttt

SEQ ID NO: 7857 - RNA, 59 nt, Homo sapiens
  source 1..59: mol_type = unassigned RNA
ttctcctgcctcagcctcccgagtagctgggactaacaggcgggactataggcgcgtgt

SEQ ID NO: 7858 - DNA, 59 bp, Homo sapiens
  source 1..59: mol_type = unassigned DNA
ttctcctgcctcagcctcccgagtagctgggactaacaggcgggactataggcgcgtgt

SEQ ID NO: 7859 - DNA, 59 bp, Homo sapiens
  source 1..59: mol_type = unassigned DNA
acacgcgcctatagtcccgcctgttagtcccagctactcgggaggctgaggcaggagaa

SEQ ID NO: 7860 - RNA, 28 nt, Homo sapiens
  source 1..28: mol_type = unassigned RNA
aaaggagtcgcgtctggaaccagcttcc

SEQ ID NO: 7861 - DNA, 28 bp, Homo sapiens
  source 1..28: mol_type = unassigned DNA
aaaggagtcgcgtctggaaccagcttcc

SEQ ID NO: 7862 - DNA, 28 bp, Homo sapiens
  source 1..28: mol_type = unassigned DNA
ggaagctggttccagacgcgactccttt

SEQ ID NO: 7863 - RNA, 31 nt, Homo sapiens
  source 1..31: mol_type = unassigned RNA
acagactcaggttgtgattgatgcaggagca

SEQ ID NO: 7864 - DNA, 31 bp, Homo sapiens
  source 1..31: mol_type = unassigned DNA
acagactcaggttgtgattgatgcaggagca

SEQ ID NO: 7865 - DNA, 31 bp, Homo sapiens
  source 1..31: mol_type = unassigned DNA
tgctcctgcatcaatcacaacctgagtctgt

SEQ ID NO: 7866 - RNA, 25 nt, Homo sapiens
  source 1..25: mol_type = unassigned RNA
attcccaatggcagaactcaaaaaa

SEQ ID NO: 7867 - DNA, 25 bp, Homo sapiens
  source 1..25: mol_type = unassigned DNA
attcccaatggcagaactcaaaaaa

SEQ ID NO: 7868 - DNA, 25 bp, Homo sapiens
  source 1..25: mol_type = unassigned DNA
ttttttgagttctgccattgggaat

SEQ ID NO: 7869 - RNA, 150 nt, Homo sapiens
  source 1..150: mol_type = unassigned RNA
agaataatctggattatacatagtatactttccagatgcagtgatgaaataggaaactttgaagcacaagaccataaaattgtagcatatcagactttgacaataaagccccagtcacacccttccattttcccccattgtatgccctgc

SEQ ID NO: 7870 - DNA, 150 bp, Homo sapiens
  source 1..150: mol_type = unassigned DNA
agaataatctggattatacatagtatactttccagatgcagtgatgaaataggaaactttgaagcacaagaccataaaattgtagcatatcagactttgacaataaagccccagtcacacccttccattttcccccattgtatgccctgc

SEQ ID NO: 7871 - DNA, 150 bp, Homo sapiens
  source 1..150: mol_type = unassigned DNA
gcagggcatacaatgggggaaaatggaagggtgtgactggggctttattgtcaaagtctgatatgctacaattttatggtcttgtgcttcaaagtttcctatttcatcactgcatctggaaagtatactatgtataatccagattattct

SEQ ID NO: 7872 - RNA, 30 nt, Homo sapiens
  source 1..30: mol_type = unassigned RNA
tcatgaatagaaatttatgtagaagcaaac

SEQ ID NO: 7873 - DNA, 30 bp, Homo sapiens
  source 1..30: mol_type = unassigned DNA
tcatgaatagaaatttatgtagaagcaaac

SEQ ID NO: 7874 - DNA, 30 bp, Homo sapiens
  source 1..30: mol_type = unassigned DNA
gtttgcttctacataaatttctattcatga

SEQ ID NO: 7875 - RNA, 53 nt, Homo sapiens
  source 1..53: mol_type = unassigned RNA
gagcctaatttacagattggaaaactgaggctatggtagaattcagactagaa

SEQ ID NO: 7876 - DNA, 53 bp, Homo sapiens
  source 1..53: mol_type = unassigned DNA
gagcctaatttacagattggaaaactgaggctatggtagaattcagactagaa

SEQ ID NO: 7877 - DNA, 53 bp, Homo sapiens
  source 1..53: mol_type = unassigned DNA
ttctagtctgaattctaccatagcctcagttttccaatctgtaaattaggctc

SEQ ID NO: 7878 - RNA, 31 nt, Homo sapiens
  source 1..31: mol_type = unassigned RNA
cccagaacctcttcttccttcttggcctaac

SEQ ID NO: 7879 - DNA, 31 bp, Homo sapiens
  source 1..31: mol_type = unassigned DNA
cccagaacctcttcttccttcttggcctaac

SEQ ID NO: 7880 - DNA, 31 bp, Homo sapiens
  source 1..31: mol_type = unassigned DNA
gttaggccaagaaggaagaagaggttctggg

SEQ ID NO: 7881 - RNA, 30 nt, Homo sapiens
  source 1..30: mol_type = unassigned RNA
aaagaatctcaaagtgaaaggaccagttgg

SEQ ID NO: 7882 - DNA, 30 bp, Homo sapiens
  source 1..30: mol_type = unassigned DNA
aaagaatctcaaagtgaaaggaccagttgg

SEQ ID NO: 7883 - DNA, 30 bp, Homo sapiens
  source 1..30: mol_type = unassigned DNA
ccaactggtcctttcactttgagattcttt

SEQ ID NO: 7884 - RNA, 104 nt, Homo sapiens
  source 1..104: mol_type = unassigned RNA
cttttgaaggctccactcctagtcctgcccaggcctccctccttgcagtcctgtcctccctggactctcaagcagcagctcctttgcttttcctgtgccttctg

SEQ ID NO: 7885 - DNA, 104 bp, Homo sapiens
  source 1..104: mol_type = unassigned DNA
cttttgaaggctccactcctagtcctgcccaggcctccctccttgcagtcctgtcctccctggactctcaagcagcagctcctttgcttttcctgtgccttctg

SEQ ID NO: 7886 - DNA, 104 bp, Homo sapiens
  source 1..104: mol_type = unassigned DNA
cagaaggcacaggaaaagcaaaggagctgctgcttgagagtccagggaggacaggactgcaaggagggaggcctgggcaggactaggagtggagccttcaaaag

SEQ ID NO: 7887 - RNA, 31 nt, Homo sapiens
  source 1..31: mol_type = unassigned RNA
tgcagctgtaactgaagaaatgccacccctc

SEQ ID NO: 7888 - DNA, 31 bp, Homo sapiens
  source 1..31: mol_type = unassigned DNA
tgcagctgtaactgaagaaatgccacccctc

SEQ ID NO: 7889 - DNA, 31 bp, Homo sapiens
  source 1..31: mol_type = unassigned DNA
gaggggtggcatttcttcagttacagctgca

SEQ ID NO: 7890 - RNA, 31 nt, Homo sapiens
  source 1..31: mol_type = unassigned RNA
cttctgttgtagactggactctggctgtgcc

SEQ ID NO: 7891 - DNA, 31 bp, Homo sapiens
  source 1..31: mol_type = unassigned DNA
cttctgttgtagactggactctggctgtgcc

SEQ ID NO: 7892 - DNA, 31 bp, Homo sapiens
  source 1..31: mol_type = unassigned DNA
ggcacagccagagtccagtctacaacagaag

SEQ ID NO: 7893 - RNA, 64 nt, Homo sapiens
  source 1..64: mol_type = unassigned RNA
ctatatgtttggttctatattgatcactaggttaggtttctcatactgggtgcttagtcttcca

SEQ ID NO: 7894 - DNA, 64 bp, Homo sapiens
  source 1..64: mol_type = unassigned DNA
ctatatgtttggttctatattgatcactaggttaggtttctcatactgggtgcttagtcttcca

SEQ ID NO: 7895 - DNA, 64 bp, Homo sapiens
  source 1..64: mol_type = unassigned DNA
tggaagactaagcacccagtatgagaaacctaacctagtgatcaatatagaaccaaacatatag

SEQ ID NO: 7896 - RNA, 32 nt, Homo sapiens
  source 1..32: mol_type = unassigned RNA
tcaggtgcgcccatggccctcgcggtgcccct

SEQ ID NO: 7897 - DNA, 32 bp, Homo sapiens
  source 1..32: mol_type = unassigned DNA
tcaggtgcgcccatggccctcgcggtgcccct

SEQ ID NO: 7898 - DNA, 32 bp, Homo sapiens
  source 1..32: mol_type = unassigned DNA
aggggcaccgcgagggccatgggcgcacctga

SEQ ID NO: 7899 - RNA, 43 nt, Homo sapiens
  source 1..43: mol_type = unassigned RNA
ggaactcgggtatgggacagagaggccggctggtggtgggctc

SEQ ID NO: 7900 - DNA, 43 bp, Homo sapiens
  source 1..43: mol_type = unassigned DNA
ggaactcgggtatgggacagagaggccggctggtggtgggctc

SEQ ID NO: 7901 - DNA, 43 bp, Homo sapiens
  source 1..43: mol_type = unassigned DNA
gagcccaccaccagccggcctctctgtcccatacccgagttcc

SEQ ID NO: 7902 - RNA, 30 nt, Homo sapiens
  source 1..30: mol_type = unassigned RNA
ttacctgtgtcgggccttgaaaacattcgt

SEQ ID NO: 7903 - DNA, 30 bp, Homo sapiens
  source 1..30: mol_type = unassigned DNA
ttacctgtgtcgggccttgaaaacattcgt

SEQ ID NO: 7904 - DNA, 30 bp, Homo sapiens
  source 1..30: mol_type = unassigned DNA
acgaatgttttcaaggcccgacacaggtaa

SEQ ID NO: 7905 - RNA, 29 nt, Homo sapiens
  source 1..29: mol_type = unassigned RNA
tcccagtggttagggactgtgcgtgctgg

SEQ ID NO: 7906 - DNA, 29 bp, Homo sapiens
  source 1..29: mol_type = unassigned DNA
tcccagtggttagggactgtgcgtgctgg

SEQ ID NO: 7907 - DNA, 29 bp, Homo sapiens
  source 1..29: mol_type = unassigned DNA
ccagcacgcacagtccctaaccactggga

SEQ ID NO: 7908 - RNA, 61 nt, Homo sapiens
  source 1..61: mol_type = unassigned RNA
cctatgtacatatgctatatggatatggatgtgtatgctctgcatgtacatacattatagt

SEQ ID NO: 7909 - DNA, 61 bp, Homo sapiens
  source 1..61: mol_type = unassigned DNA
cctatgtacatatgctatatggatatggatgtgtatgctctgcatgtacatacattatagt

SEQ ID NO: 7910 - DNA, 61 bp, Homo sapiens
  source 1..61: mol_type = unassigned DNA
actataatgtatgtacatgcagagcatacacatccatatccatatagcatatgtacatagg

SEQ ID NO: 7911 - RNA, 35 nt, Homo sapiens
  source 1..35: mol_type = unassigned RNA
taaaccagttgggagagaccaggttgtttggtctg

SEQ ID NO: 7912 - DNA, 35 bp, Homo sapiens
  source 1..35: mol_type = unassigned DNA
taaaccagttgggagagaccaggttgtttggtctg

SEQ ID NO: 7913 - DNA, 35 bp, Homo sapiens
  source 1..35: mol_type = unassigned DNA
cagaccaaacaacctggtctctcccaactggttta

SEQ ID NO: 7914 - RNA, 29 nt, Homo sapiens
  source 1..29: mol_type = unassigned RNA
gcgccctcacgtggtcggctggggcaacg

SEQ ID NO: 7915 - DNA, 29 bp, Homo sapiens
  source 1..29: mol_type = unassigned DNA
gcgccctcacgtggtcggctggggcaacg

SEQ ID NO: 7916 - DNA, 29 bp, Homo sapiens
  source 1..29: mol_type = unassigned DNA
cgttgccccagccgaccacgtgagggcgc

SEQ ID NO: 7917 - RNA, 32 nt, Homo sapiens
  source 1..32: mol_type = unassigned RNA
cattcacaaggatgattgtagaaaaaaaagta

SEQ ID NO: 7918 - DNA, 32 bp, Homo sapiens
  source 1..32: mol_type = unassigned DNA
cattcacaaggatgattgtagaaaaaaaagta

SEQ ID NO: 7919 - DNA, 32 bp, Homo sapiens
  source 1..32: mol_type = unassigned DNA
tacttttttttctacaatcatccttgtgaatg

SEQ ID NO: 7920 - RNA, 92 nt, Homo sapiens
  source 1..92: mol_type = unassigned RNA
caactgaatgtcagcattgacactaaaacacagatcttaagactgacaagccagactctttgtagcagagagccaggccctggaagaaatca

SEQ ID NO: 7921 - DNA, 92 bp, Homo sapiens
  source 1..92: mol_type = unassigned DNA
caactgaatgtcagcattgacactaaaacacagatcttaagactgacaagccagactctttgtagcagagagccaggccctggaagaaatca

SEQ ID NO: 7922 - DNA, 92 bp, Homo sapiens
  source 1..92: mol_type = unassigned DNA
tgatttcttccagggcctggctctctgctacaaagagtctggcttgtcagtcttaagatctgtgttttagtgtcaatgctgacattcagttg

SEQ ID NO: 7923 - RNA, 21 nt, Homo sapiens
  source 1..21: mol_type = unassigned RNA
ggtggttctggctcacatgga

SEQ ID NO: 7924 - DNA, 21 bp, Homo sapiens
  source 1..21: mol_type = unassigned DNA
ggtggttctggctcacatgga

SEQ ID NO: 7925 - DNA, 21 bp, Homo sapiens
  source 1..21: mol_type = unassigned DNA
tccatgtgagccagaaccacc

SEQ ID NO: 7926 - RNA, 22 nt, Homo sapiens
  source 1..22: mol_type = unassigned RNA
ttttgcaatgggaggacacagc

SEQ ID NO: 7927 - DNA, 22 bp, Homo sapiens
  source 1..22: mol_type = unassigned DNA
ttttgcaatgggaggacacagc

SEQ ID NO: 7928 - DNA, 22 bp, Homo sapiens
  source 1..22: mol_type = unassigned DNA
gctgtgtcctcccattgcaaaa

SEQ ID NO: 7929 - RNA, 32 nt, Homo sapiens
  source 1..32: mol_type = unassigned RNA
ggaaagaccaagattggccagctctagctgtg

SEQ ID NO: 7930 - DNA, 32 bp, Homo sapiens
  source 1..32: mol_type = unassigned DNA
ggaaagaccaagattggccagctctagctgtg

SEQ ID NO: 7931 - DNA, 32 bp, Homo sapiens
  source 1..32: mol_type = unassigned DNA
cacagctagagctggccaatcttggtctttcc

SEQ ID NO: 7932 - RNA, 124 nt, Homo sapiens
  source 1..124: mol_type = unassigned RNA
tgggaaaagctcaagccagaatggagtgcttttttactgaagaattctaaaatgtttctgcttcatataatatcctctctctgtcctttttccccttctttctccttgtcttctctcccttttt

SEQ ID NO: 7933 - DNA, 124 bp, Homo sapiens
  source 1..124: mol_type = unassigned DNA
tgggaaaagctcaagccagaatggagtgcttttttactgaagaattctaaaatgtttctgcttcatataatatcctctctctgtcctttttccccttctttctccttgtcttctctcccttttt

SEQ ID NO: 7934 - DNA, 124 bp, Homo sapiens
  source 1..124: mol_type = unassigned DNA
aaaaagggagagaagacaaggagaaagaaggggaaaaaggacagagagaggatattatatgaagcagaaacattttagaattcttcagtaaaaaagcactccattctggcttgagcttttccca

SEQ ID NO: 7935 - RNA, 31 nt, Homo sapiens
  source 1..31: mol_type = unassigned RNA
gcattggcagagctggaaggtctgtgcaagc

SEQ ID NO: 7936 - DNA, 31 bp, Homo sapiens
  source 1..31: mol_type = unassigned DNA
gcattggcagagctggaaggtctgtgcaagc

SEQ ID NO: 7937 - DNA, 31 bp, Homo sapiens
  source 1..31: mol_type = unassigned DNA
gcttgcacagaccttccagctctgccaatgc

SEQ ID NO: 7938 - RNA, 31 nt, Homo sapiens
  source 1..31: mol_type = unassigned RNA
gataatgtgacgtcagccgtagaaggcatca

SEQ ID NO: 7939 - DNA, 31 bp, Homo sapiens
  source 1..31: mol_type = unassigned DNA
gataatgtgacgtcagccgtagaaggcatca

SEQ ID NO: 7940 - DNA, 31 bp, Homo sapiens
  source 1..31: mol_type = unassigned DNA
tgatgccttctacggctgacgtcacattatc

SEQ ID NO: 7941 - RNA, 50 nt, Homo sapiens
  source 1..50: mol_type = unassigned RNA
aactgaggctcagggctgggacagatgcaatgtgagaactcacacacagc

SEQ ID NO: 7942 - DNA, 50 bp, Homo sapiens
  source 1..50: mol_type = unassigned DNA
aactgaggctcagggctgggacagatgcaatgtgagaactcacacacagc

SEQ ID NO: 7943 - DNA, 50 bp, Homo sapiens
  source 1..50: mol_type = unassigned DNA
gctgtgtgtgagttctcacattgcatctgtcccagccctgagcctcagtt

SEQ ID NO: 7944 - RNA, 45 nt, Homo sapiens
  source 1..45: mol_type = unassigned RNA
taggtcatcagatggatgtaggatggggaagggtacagaagattt

SEQ ID NO: 7945 - DNA, 45 bp, Homo sapiens
  source 1..45: mol_type = unassigned DNA
taggtcatcagatggatgtaggatggggaagggtacagaagattt

SEQ ID NO: 7946 - DNA, 45 bp, Homo sapiens
  source 1..45: mol_type = unassigned DNA
aaatcttctgtacccttccccatcctacatccatctgatgaccta

SEQ ID NO: 7947 - RNA, 132 nt, Homo sapiens
  source 1..132: mol_type = unassigned RNA
aggctcctcctatgaaacaggaagagggagttgccaagggctcttcacaggagccaggacgagggccgcactgcccttaaggagctcccagtgtgtttggagaaagaggccagatcagccacagggcatggt

SEQ ID NO: 7948 - DNA, 132 bp, Homo sapiens
  source 1..132: mol_type = unassigned DNA
aggctcctcctatgaaacaggaagagggagttgccaagggctcttcacaggagccaggacgagggccgcactgcccttaaggagctcccagtgtgtttggagaaagaggccagatcagccacagggcatggt

SEQ ID NO: 7949 - DNA, 132 bp, Homo sapiens
  source 1..132: mol_type = unassigned DNA
accatgccctgtggctgatctggcctctttctccaaacacactgggagctccttaagggcagtgcggccctcgtcctggctcctgtgaagagcccttggcaactccctcttcctgtttcataggaggagcct

SEQ ID NO: 7950 - RNA, 24 nt, Homo sapiens
  source 1..24: mol_type = unassigned RNA
ttctccagtagcttgggtggtttt

SEQ ID NO: 7951 - DNA, 24 bp, Homo sapiens
  source 1..24: mol_type = unassigned DNA
ttctccagtagcttgggtggtttt

SEQ ID NO: 7952 - DNA, 24 bp, Homo sapiens
  source 1..24: mol_type = unassigned DNA
aaaaccacccaagctactggagaa

SEQ ID NO: 7953 - RNA, 37 nt, Homo sapiens
  source 1..37: mol_type = unassigned RNA
ctgttaggttgatgcaaaagtaactgtggttttgcca

SEQ ID NO: 7954 - DNA, 37 bp, Homo sapiens
  source 1..37: mol_type = unassigned DNA
ctgttaggttgatgcaaaagtaactgtggttttgcca

SEQ ID NO: 7955 - DNA, 37 bp, Homo sapiens
  source 1..37: mol_type = unassigned DNA
tggcaaaaccacagttacttttgcatcaacctaacag

SEQ ID NO: 7956 - RNA, 73 nt, Homo sapiens
  source 1..73: mol_type = unassigned RNA
ggatcaagtctaggtcgaaggactgactttcttttccaatggtgaactccccttcacgtggatgggagaaata

SEQ ID NO: 7957 - DNA, 73 bp, Homo sapiens
  source 1..73: mol_type = unassigned DNA
ggatcaagtctaggtcgaaggactgactttcttttccaatggtgaactccccttcacgtggatgggagaaata

SEQ ID NO: 7958 - DNA, 73 bp, Homo sapiens
  source 1..73: mol_type = unassigned DNA
tatttctcccatccacgtgaaggggagttcaccattggaaaagaaagtcagtccttcgacctagacttgatcc

SEQ ID NO: 7959 - RNA, 26 nt, Homo sapiens
  source 1..26: mol_type = unassigned RNA
ctgtggcctcttcccgctgcggccgg

SEQ ID NO: 7960 - DNA, 26 bp, Homo sapiens
  source 1..26: mol_type = unassigned DNA
ctgtggcctcttcccgctgcggccgg

SEQ ID NO: 7961 - DNA, 26 bp, Homo sapiens
  source 1..26: mol_type = unassigned DNA
ccggccgcagcgggaagaggccacag

SEQ ID NO: 7962 - RNA, 31 nt, Homo sapiens
  source 1..31: mol_type = unassigned RNA
ctcatattgaatttgtagaattcacagagac

SEQ ID NO: 7963 - DNA, 31 bp, Homo sapiens
  source 1..31: mol_type = unassigned DNA
ctcatattgaatttgtagaattcacagagac

SEQ ID NO: 7964 - DNA, 31 bp, Homo sapiens
  source 1..31: mol_type = unassigned DNA
gtctctgtgaattctacaaattcaatatgag

SEQ ID NO: 7965 - RNA, 30 nt, Homo sapiens
  source 1..30: mol_type = unassigned RNA
aagaagttctacatctgtgtctctagtgcc

SEQ ID NO: 7966 - DNA, 30 bp, Homo sapiens
  source 1..30: mol_type = unassigned DNA
aagaagttctacatctgtgtctctagtgcc

SEQ ID NO: 7967 - DNA, 30 bp, Homo sapiens
  source 1..30: mol_type = unassigned DNA
ggcactagagacacagatgtagaacttctt

SEQ ID NO: 7968 - RNA, 24 nt, Homo sapiens
  source 1..24: mol_type = unassigned RNA
ttctgttatagtttgtttcgtttt

SEQ ID NO: 7969 - DNA, 24 bp, Homo sapiens
  source 1..24: mol_type = unassigned DNA
ttctgttatagtttgtttcgtttt

SEQ ID NO: 7970 - DNA, 24 bp, Homo sapiens
  source 1..24: mol_type = unassigned DNA
aaaacgaaacaaactataacagaa

SEQ ID NO: 7971 - RNA, 29 nt, Homo sapiens
  source 1..29: mol_type = unassigned RNA
atttatgagctccaactctgagtgtccac

SEQ ID NO: 7972 - DNA, 29 bp, Homo sapiens
  source 1..29: mol_type = unassigned DNA
atttatgagctccaactctgagtgtccac

SEQ ID NO: 7973 - DNA, 29 bp, Homo sapiens
  source 1..29: mol_type = unassigned DNA
gtggacactcagagttggagctcataaat

SEQ ID NO: 7974 - RNA, 29 nt, Homo sapiens
  source 1..29: mol_type = unassigned RNA
atagcctgtacagctcttatctccccgcg

SEQ ID NO: 7975 - DNA, 29 bp, Homo sapiens
  source 1..29: mol_type = unassigned DNA
atagcctgtacagctcttatctccccgcg

SEQ ID NO: 7976 - DNA, 29 bp, Homo sapiens
  source 1..29: mol_type = unassigned DNA
cgcggggagataagagctgtacaggctat

SEQ ID NO: 7977 - RNA, 36 nt, Homo sapiens
  source 1..36: mol_type = unassigned RNA
ctctttgtaccactggtagaattcagctgtgaatcc

SEQ ID NO: 7978 - DNA, 36 bp, Homo sapiens
  source 1..36: mol_type = unassigned DNA
ctctttgtaccactggtagaattcagctgtgaatcc

SEQ ID NO: 7979 - DNA, 36 bp, Homo sapiens
  source 1..36: mol_type = unassigned DNA
ggattcacagctgaattctaccagtggtacaaagag

SEQ ID NO: 7980 - RNA, 91 nt, Homo sapiens
  source 1..91: mol_type = unassigned RNA
cttctcagtctctaccttcttcccacaggactgccagcagcagcatctgaaccgaaggctgcattgcctgtctcagggtatgtgactttgg

SEQ ID NO: 7981 - DNA, 91 bp, Homo sapiens
  source 1..91: mol_type = unassigned DNA
cttctcagtctctaccttcttcccacaggactgccagcagcagcatctgaaccgaaggctgcattgcctgtctcagggtatgtgactttgg

SEQ ID NO: 7982 - DNA, 91 bp, Homo sapiens
  source 1..91: mol_type = unassigned DNA
ccaaagtcacataccctgagacaggcaatgcagccttcggttcagatgctgctgctggcagtcctgtgggaagaaggtagagactgagaag

SEQ ID NO: 7983 - RNA, 29 nt, Homo sapiens
  source 1..29: mol_type = unassigned RNA
tactccttcctggtaagggtgggtgtgtc

SEQ ID NO: 7984 - DNA, 29 bp, Homo sapiens
  source 1..29: mol_type = unassigned DNA
tactccttcctggtaagggtgggtgtgtc

SEQ ID NO: 7985 - DNA, 29 bp, Homo sapiens
  source 1..29: mol_type = unassigned DNA
gacacacccacccttaccaggaaggagta

SEQ ID NO: 7986 - RNA, 140 nt, Homo sapiens
  source 1..140: mol_type = unassigned RNA
tatgttcctaaaacatccctgagttcaccaccttggccagaagttgttctgccagacccagttgaggagaccagacaccatgcaggtaagacctccctgggagacagaagctagagggcaccacctagaccctgctccag

SEQ ID NO: 7987 - DNA, 140 bp, Homo sapiens
  source 1..140: mol_type = unassigned DNA
tatgttcctaaaacatccctgagttcaccaccttggccagaagttgttctgccagacccagttgaggagaccagacaccatgcaggtaagacctccctgggagacagaagctagagggcaccacctagaccctgctccag

SEQ ID NO: 7988 - DNA, 140 bp, Homo sapiens
  source 1..140: mol_type = unassigned DNA
ctggagcagggtctaggtggtgccctctagcttctgtctcccagggaggtcttacctgcatggtgtctggtctcctcaactgggtctggcagaacaacttctggccaaggtggtgaactcagggatgttttaggaacata

SEQ ID NO: 7989 - RNA, 33 nt, Homo sapiens
  source 1..33: mol_type = unassigned RNA
actcgttttagagctctgtcccagaggcgttcg

SEQ ID NO: 7990 - DNA, 33 bp, Homo sapiens
  source 1..33: mol_type = unassigned DNA
actcgttttagagctctgtcccagaggcgttcg

SEQ ID NO: 7991 - DNA, 33 bp, Homo sapiens
  source 1..33: mol_type = unassigned DNA
cgaacgcctctgggacagagctctaaaacgagt

SEQ ID NO: 7992 - RNA, 27 nt, Homo sapiens
  source 1..27: mol_type = unassigned RNA
tattgtggttgagtctgaagcgctggg

SEQ ID NO: 7993 - DNA, 27 bp, Homo sapiens
  source 1..27: mol_type = unassigned DNA
tattgtggttgagtctgaagcgctggg

SEQ ID NO: 7994 - DNA, 27 bp, Homo sapiens
  source 1..27: mol_type = unassigned DNA
cccagcgcttcagactcaaccacaata

SEQ ID NO: 7995 - RNA, 30 nt, Homo sapiens
  source 1..30: mol_type = unassigned RNA
gccggggggaaacctgatcggccagataca

SEQ ID NO: 7996 - DNA, 30 bp, Homo sapiens
  source 1..30: mol_type = unassigned DNA
gccggggggaaacctgatcggccagataca

SEQ ID NO: 7997 - DNA, 30 bp, Homo sapiens
  source 1..30: mol_type = unassigned DNA
tgtatctggccgatcaggtttccccccggc

SEQ ID NO: 7998 - RNA, 30 nt, Homo sapiens
  source 1..30: mol_type = unassigned RNA
tatacaggctctggaaaaacatgaaggtaa

SEQ ID NO: 7999 - DNA, 30 bp, Homo sapiens
  source 1..30: mol_type = unassigned DNA
tatacaggctctggaaaaacatgaaggtaa

SEQ ID NO: 8000 - DNA, 30 bp, Homo sapiens
  source 1..30: mol_type = unassigned DNA
ttaccttcatgtttttccagagcctgtata

SEQ ID NO: 8001 - RNA, 42 nt, Homo sapiens
  source 1..42: mol_type = unassigned RNA
tagcttgccctcactgctccccagtacctccccttgtttttt

SEQ ID NO: 8002 - DNA, 42 bp, Homo sapiens
  source 1..42: mol_type = unassigned DNA
tagcttgccctcactgctccccagtacctccccttgtttttt

SEQ ID NO: 8003 - DNA, 42 bp, Homo sapiens
  source 1..42: mol_type = unassigned DNA
aaaaaacaaggggaggtactggggagcagtgagggcaagcta

SEQ ID NO: 8004 - RNA, 56 nt, Homo sapiens
  source 1..56: mol_type = unassigned RNA
tttcctcaccaggtaccaggaacttgttccaagcccagaggttcagatcagcccgt

SEQ ID NO: 8005 - DNA, 56 bp, Homo sapiens
  source 1..56: mol_type = unassigned DNA
tttcctcaccaggtaccaggaacttgttccaagcccagaggttcagatcagcccgt

SEQ ID NO: 8006 - DNA, 56 bp, Homo sapiens
  source 1..56: mol_type = unassigned DNA
acgggctgatctgaacctctgggcttggaacaagttcctggtacctggtgaggaaa

SEQ ID NO: 8007 - RNA, 68 nt, Homo sapiens
  source 1..68: mol_type = unassigned RNA
ctctgtcactcaggctggagtgcaatggcatgatcatgactcactgaagccttgacctcctgggctca

SEQ ID NO: 8008 - DNA, 68 bp, Homo sapiens
  source 1..68: mol_type = unassigned DNA
ctctgtcactcaggctggagtgcaatggcatgatcatgactcactgaagccttgacctcctgggctca

SEQ ID NO: 8009 - DNA, 68 bp, Homo sapiens
  source 1..68: mol_type = unassigned DNA
tgagcccaggaggtcaaggcttcagtgagtcatgatcatgccattgcactccagcctgagtgacagag

SEQ ID NO: 8010 - RNA, 31 nt, Homo sapiens
  source 1..31: mol_type = unassigned RNA
cctgtgattcgccagacgccgcgccgcggcc

SEQ ID NO: 8011 - DNA, 31 bp, Homo sapiens
  source 1..31: mol_type = unassigned DNA
cctgtgattcgccagacgccgcgccgcggcc

SEQ ID NO: 8012 - DNA, 31 bp, Homo sapiens
  source 1..31: mol_type = unassigned DNA
ggccgcggcgcggcgtctggcgaatcacagg

SEQ ID NO: 8013 - RNA, 32 nt, Homo sapiens
  source 1..32: mol_type = unassigned RNA
ataaaccaaacaaccagattcgaatatccaag

SEQ ID NO: 8014 - DNA, 32 bp, Homo sapiens
  source 1..32: mol_type = unassigned DNA
ataaaccaaacaaccagattcgaatatccaag

SEQ ID NO: 8015 - DNA, 32 bp, Homo sapiens
  source 1..32: mol_type = unassigned DNA
cttggatattcgaatctggttgtttggtttat

SEQ ID NO: 8016 - RNA, 112 nt, Homo sapiens
  source 1..112: mol_type = unassigned RNA
attttcttttgtctctcaccctttaattctagatacgaggaatgtctattgaccaggctttggctcagttggaattcaatgacaaaaaaggggccaaaataattaaagaggt

SEQ ID NO: 8017 - DNA, 112 bp, Homo sapiens
  source 1..112: mol_type = unassigned DNA
attttcttttgtctctcaccctttaattctagatacgaggaatgtctattgaccaggctttggctcagttggaattcaatgacaaaaaaggggccaaaataattaaagaggt

SEQ ID NO: 8018 - DNA, 112 bp, Homo sapiens
  source 1..112: mol_type = unassigned DNA
acctctttaattattttggccccttttttgtcattgaattccaactgagccaaagcctggtcaatagacattcctcgtatctagaattaaagggtgagagacaaaagaaaat

SEQ ID NO: 8019 - RNA, 25 nt, Homo sapiens
  source 1..25: mol_type = unassigned RNA
tttattccactgctagaattccatc

SEQ ID NO: 8020 - DNA, 25 bp, Homo sapiens
  source 1..25: mol_type = unassigned DNA
tttattccactgctagaattccatc

SEQ ID NO: 8021 - DNA, 25 bp, Homo sapiens
  source 1..25: mol_type = unassigned DNA
gatggaattctagcagtggaataaa

SEQ ID NO: 8022 - RNA, 34 nt, Homo sapiens
  source 1..34: mol_type = unassigned RNA
ctcagccctcggtcaaaagaatctgttccagaat

SEQ ID NO: 8023 - DNA, 34 bp, Homo sapiens
  source 1..34: mol_type = unassigned DNA
ctcagccctcggtcaaaagaatctgttccagaat

SEQ ID NO: 8024 - DNA, 34 bp, Homo sapiens
  source 1..34: mol_type = unassigned DNA
attctggaacagattcttttgaccgagggctgag

SEQ ID NO: 8025 - RNA, 31 nt, Homo sapiens
  source 1..31: mol_type = unassigned RNA
aaactgattttagagttctgatcgttcaaga

SEQ ID NO: 8026 - DNA, 31 bp, Homo sapiens
  source 1..31: mol_type = unassigned DNA
aaactgattttagagttctgatcgttcaaga

SEQ ID NO: 8027 - DNA, 31 bp, Homo sapiens
  source 1..31: mol_type = unassigned DNA
tcttgaacgatcagaactctaaaatcagttt

SEQ ID NO: 8028 - RNA, 160 nt, Homo sapiens
  source 1..160: mol_type = unassigned RNA
tcctttgcgatttgaaaagtaaatataatctgaataataatatttgtcattaacacatgtctagattctttctgatcaataccagatgcaagatgtgttggagaaatctgatcatctaatagctgcagcaaaagagctgtttcctcgtaggcgcacaggt

SEQ ID NO: 8029 - DNA, 160 bp, Homo sapiens
  source 1..160: mol_type = unassigned DNA
tcctttgcgatttgaaaagtaaatataatctgaataataatatttgtcattaacacatgtctagattctttctgatcaataccagatgcaagatgtgttggagaaatctgatcatctaatagctgcagcaaaagagctgtttcctcgtaggcgcacaggt

SEQ ID NO: 8030 - DNA, 160 bp, Homo sapiens
  source 1..160: mol_type = unassigned DNA
acctgtgcgcctacgaggaaacagctcttttgctgcagctattagatgatcagatttctccaacacatcttgcatctggtattgatcagaaagaatctagacatgtgttaatgacaaatattattattcagattatatttacttttcaaatcgcaaagga

SEQ ID NO: 8031 - RNA, 32 nt, Homo sapiens
  source 1..32: mol_type = unassigned RNA
ccacagaagctttgtttcttgggcaagcagaa

SEQ ID NO: 8032 - DNA, 32 bp, Homo sapiens
  source 1..32: mol_type = unassigned DNA
ccacagaagctttgtttcttgggcaagcagaa

SEQ ID NO: 8033 - DNA, 32 bp, Homo sapiens
  source 1..32: mol_type = unassigned DNA
ttctgcttgcccaagaaacaaagcttctgtgg

SEQ ID NO: 8034 - RNA, 28 nt, Homo sapiens
  source 1..28: mol_type = unassigned RNA
tcagtactttcaagtttgatcatgcact

SEQ ID NO: 8035 - DNA, 28 bp, Homo sapiens
  source 1..28: mol_type = unassigned DNA
tcagtactttcaagtttgatcatgcact

SEQ ID NO: 8036 - DNA, 28 bp, Homo sapiens
  source 1..28: mol_type = unassigned DNA
agtgcatgatcaaacttgaaagtactga

SEQ ID NO: 8037 - RNA, 43 nt, Homo sapiens
  source 1..43: mol_type = unassigned RNA
tataatcttgcaggtgctgatcatctcttttcttctgcttgtg

SEQ ID NO: 8038 - DNA, 43 bp, Homo sapiens
  source 1..43: mol_type = unassigned DNA
tataatcttgcaggtgctgatcatctcttttcttctgcttgtg

SEQ ID NO: 8039 - DNA, 43 bp, Homo sapiens
  source 1..43: mol_type = unassigned DNA
cacaagcagaagaaaagagatgatcagcacctgcaagattata

SEQ ID NO: 8040 - RNA, 40 nt, Homo sapiens
  source 1..40: mol_type = unassigned RNA
gtgtgtgtgttggatggtggggggaggcagttcttcccca

SEQ ID NO: 8041 - DNA, 40 bp, Homo sapiens
  source 1..40: mol_type = unassigned DNA
gtgtgtgtgttggatggtggggggaggcagttcttcccca

SEQ ID NO: 8042 - DNA, 40 bp, Homo sapiens
  source 1..40: mol_type = unassigned DNA
tggggaagaactgcctccccccaccatccaacacacacac

SEQ ID NO: 8043 - RNA, 29 nt, Homo sapiens
  source 1..29: mol_type = unassigned RNA
gcactttggaggatctttctggacattct

SEQ ID NO: 8044 - DNA, 29 bp, Homo sapiens
  source 1..29: mol_type = unassigned DNA
gcactttggaggatctttctggacattct

SEQ ID NO: 8045 - DNA, 29 bp, Homo sapiens
  source 1..29: mol_type = unassigned DNA
agaatgtccagaaagatcctccaaagtgc

SEQ ID NO: 8046 - RNA, 119 nt, Homo sapiens
  source 1..119: mol_type = unassigned RNA
acggagtttaattacaatggcactacttgaaacaagctgcagcagcagcaacaacaaacgctactgttaacccagtcacagctcagctcaatattcagattagagaaagcaagaaccat

SEQ ID NO: 8047 - DNA, 119 bp, Homo sapiens
  source 1..119: mol_type = unassigned DNA
acggagtttaattacaatggcactacttgaaacaagctgcagcagcagcaacaacaaacgctactgttaacccagtcacagctcagctcaatattcagattagagaaagcaagaaccat

SEQ ID NO: 8048 - DNA, 119 bp, Homo sapiens
  source 1..119: mol_type = unassigned DNA
atggttcttgctttctctaatctgaatattgagctgagctgtgactgggttaacagtagcgtttgttgttgctgctgctgcagcttgtttcaagtagtgccattgtaattaaactccgt

SEQ ID NO: 8049 - RNA, 29 nt, Homo sapiens
  source 1..29: mol_type = unassigned RNA
caaaacgtattgagcgggcagtggaagaa

SEQ ID NO: 8050 - DNA, 29 bp, Homo sapiens
  source 1..29: mol_type = unassigned DNA
caaaacgtattgagcgggcagtggaagaa

SEQ ID NO: 8051 - DNA, 29 bp, Homo sapiens
  source 1..29: mol_type = unassigned DNA
ttcttccactgcccgctcaatacgttttg

SEQ ID NO: 8052 - RNA, 36 nt, Homo sapiens
  source 1..36: mol_type = unassigned RNA
ataagggcactggtataattctgaaattatcacaac

SEQ ID NO: 8053 - DNA, 36 bp, Homo sapiens
  source 1..36: mol_type = unassigned DNA
ataagggcactggtataattctgaaattatcacaac

SEQ ID NO: 8054 - DNA, 36 bp, Homo sapiens
  source 1..36: mol_type = unassigned DNA
gttgtgataatttcagaattataccagtgcccttat

SEQ ID NO: 8055 - RNA, 33 nt, Homo sapiens
  source 1..33: mol_type = unassigned RNA
gtggagccaacggccagccagacctgtggcagt

SEQ ID NO: 8056 - DNA, 33 bp, Homo sapiens
  source 1..33: mol_type = unassigned DNA
gtggagccaacggccagccagacctgtggcagt

SEQ ID NO: 8057 - DNA, 33 bp, Homo sapiens
  source 1..33: mol_type = unassigned DNA
actgccacaggtctggctggccgttggctccac

SEQ ID NO: 8058 - RNA, 32 nt, Homo sapiens
  source 1..32: mol_type = unassigned RNA
cagctcgtgtggcaactcgtggcagaacacgg

SEQ ID NO: 8059 - DNA, 32 bp, Homo sapiens
  source 1..32: mol_type = unassigned DNA
cagctcgtgtggcaactcgtggcagaacacgg

SEQ ID NO: 8060 - DNA, 32 bp, Homo sapiens
  source 1..32: mol_type = unassigned DNA
ccgtgttctgccacgagttgccacacgagctg

SEQ ID NO: 8061 - RNA, 32 nt, Homo sapiens
  source 1..32: mol_type = unassigned RNA
cagaattttcttggctggaaaggatggctgtt

SEQ ID NO: 8062 - DNA, 32 bp, Homo sapiens
  source 1..32: mol_type = unassigned DNA
cagaattttcttggctggaaaggatggctgtt

SEQ ID NO: 8063 - DNA, 32 bp, Homo sapiens
  source 1..32: mol_type = unassigned DNA
aacagccatcctttccagccaagaaaattctg

SEQ ID NO: 8064 - RNA, 49 nt, Homo sapiens
  source 1..49: mol_type = unassigned RNA
acatcttttcgaccaggatgaggagacatgttggaactcagaccaggtg

SEQ ID NO: 8065 - DNA, 49 bp, Homo sapiens
  source 1..49: mol_type = unassigned DNA
acatcttttcgaccaggatgaggagacatgttggaactcagaccaggtg

SEQ ID NO: 8066 - DNA, 49 bp, Homo sapiens
  source 1..49: mol_type = unassigned DNA
cacctggtctgagttccaacatgtctcctcatcctggtcgaaaagatgt

SEQ ID NO: 8067 - RNA, 31 nt, Homo sapiens
  source 1..31: mol_type = unassigned RNA
gcttctgggactaggactgaacaggagcagg

SEQ ID NO: 8068 - DNA, 31 bp, Homo sapiens
  source 1..31: mol_type = unassigned DNA
gcttctgggactaggactgaacaggagcagg

SEQ ID NO: 8069 - DNA, 31 bp, Homo sapiens
  source 1..31: mol_type = unassigned DNA
cctgctcctgttcagtcctagtcccagaagc

SEQ ID NO: 8070 - RNA, 29 nt, Homo sapiens
  source 1..29: mol_type = unassigned RNA
ccacccgcgacgtggctgggagcgtgggt

SEQ ID NO: 8071 - DNA, 29 bp, Homo sapiens
  source 1..29: mol_type = unassigned DNA
ccacccgcgacgtggctgggagcgtgggt

SEQ ID NO: 8072 - DNA, 29 bp, Homo sapiens
  source 1..29: mol_type = unassigned DNA
acccacgctcccagccacgtcgcgggtgg

SEQ ID NO: 8073 - RNA, 30 nt, Homo sapiens
  source 1..30: mol_type = unassigned RNA
attctttagtgtttgcctcctcagcggctc

SEQ ID NO: 8074 - DNA, 30 bp, Homo sapiens
  source 1..30: mol_type = unassigned DNA
attctttagtgtttgcctcctcagcggctc

SEQ ID NO: 8075 - DNA, 30 bp, Homo sapiens
  source 1..30: mol_type = unassigned DNA
gagccgctgaggaggcaaacactaaagaat

SEQ ID NO: 8076 - RNA, 68 nt, Homo sapiens
  source 1..68: mol_type = unassigned RNA
tcccaaggtctgtcgagttgcttatgaaattatgcaaacactacatcctgatgcctctgcaaacttcc

SEQ ID NO: 8077 - DNA, 68 bp, Homo sapiens
  source 1..68: mol_type = unassigned DNA
tcccaaggtctgtcgagttgcttatgaaattatgcaaacactacatcctgatgcctctgcaaacttcc

SEQ ID NO: 8078 - DNA, 68 bp, Homo sapiens
  source 1..68: mol_type = unassigned DNA
ggaagtttgcagaggcatcaggatgtagtgtttgcataatttcataagcaactcgacagaccttggga

SEQ ID NO: 8079 - RNA, 51 nt, Homo sapiens
  source 1..51: mol_type = unassigned RNA
taggctaaggctttgactcagtcttaactaagttctgactaggactaaact

SEQ ID NO: 8080 - DNA, 51 bp, Homo sapiens
  source 1..51: mol_type = unassigned DNA
taggctaaggctttgactcagtcttaactaagttctgactaggactaaact

SEQ ID NO: 8081 - DNA, 51 bp, Homo sapiens
  source 1..51: mol_type = unassigned DNA
agtttagtcctagtcagaacttagttaagactgagtcaaagccttagccta

SEQ ID NO: 8082 - RNA, 32 nt, Homo sapiens
  source 1..32: mol_type = unassigned RNA
gtagattctgatacagagcgtctgtgagacga

SEQ ID NO: 8083 - DNA, 32 bp, Homo sapiens
  source 1..32: mol_type = unassigned DNA
gtagattctgatacagagcgtctgtgagacga

SEQ ID NO: 8084 - DNA, 32 bp, Homo sapiens
  source 1..32: mol_type = unassigned DNA
tcgtctcacagacgctctgtatcagaatctac

SEQ ID NO: 8085 - RNA, 81 nt, Homo sapiens
  source 1..81: mol_type = unassigned RNA
tctacatctgtgggctcagaacactacatcagcattctttcatttgtagacaaggatctgctggaacctggctgctcggtt

SEQ ID NO: 8086 - DNA, 81 bp, Homo sapiens
  source 1..81: mol_type = unassigned DNA
tctacatctgtgggctcagaacactacatcagcattctttcatttgtagacaaggatctgctggaacctggctgctcggtt

SEQ ID NO: 8087 - DNA, 81 bp, Homo sapiens
  source 1..81: mol_type = unassigned DNA
aaccgagcagccaggttccagcagatccttgtctacaaatgaaagaatgctgatgtagtgttctgagcccacagatgtaga

SEQ ID NO: 8088 - RNA, 32 nt, Homo sapiens
  source 1..32: mol_type = unassigned RNA
atatgaagctggcactgagagaattcattgta

SEQ ID NO: 8089 - DNA, 32 bp, Homo sapiens
  source 1..32: mol_type = unassigned DNA
atatgaagctggcactgagagaattcattgta

SEQ ID NO: 8090 - DNA, 32 bp, Homo sapiens
  source 1..32: mol_type = unassigned DNA
tacaatgaattctctcagtgccagcttcatat

SEQ ID NO: 8091 - RNA, 29 nt, Homo sapiens
  source 1..29: mol_type = unassigned RNA
ccagcctctgtggccctgtgacctgcagg

SEQ ID NO: 8092 - DNA, 29 bp, Homo sapiens
  source 1..29: mol_type = unassigned DNA
ccagcctctgtggccctgtgacctgcagg

SEQ ID NO: 8093 - DNA, 29 bp, Homo sapiens
  source 1..29: mol_type = unassigned DNA
cctgcaggtcacagggccacagaggctgg

SEQ ID NO: 8094 - RNA, 41 nt, Homo sapiens
  source 1..41: mol_type = unassigned RNA
ttaatattcaatgtcactggtagagttaagaatatgaattg

SEQ ID NO: 8095 - DNA, 41 bp, Homo sapiens
  source 1..41: mol_type = unassigned DNA
ttaatattcaatgtcactggtagagttaagaatatgaattg

SEQ ID NO: 8096 - DNA, 41 bp, Homo sapiens
  source 1..41: mol_type = unassigned DNA
caattcatattcttaactctaccagtgacattgaatattaa

SEQ ID NO: 8097 - RNA, 66 nt, Homo sapiens
  source 1..66: mol_type = unassigned RNA
gacagggtcttgctgtgttgcccagtctggagtgcagtggcatgatcatgactcactgaagcctcg

SEQ ID NO: 8098 - DNA, 66 bp, Homo sapiens
  source 1..66: mol_type = unassigned DNA
gacagggtcttgctgtgttgcccagtctggagtgcagtggcatgatcatgactcactgaagcctcg

SEQ ID NO: 8099 - DNA, 66 bp, Homo sapiens
  source 1..66: mol_type = unassigned DNA
cgaggcttcagtgagtcatgatcatgccactgcactccagactgggcaacacagcaagaccctgtc

SEQ ID NO: 8100 - RNA, 29 nt, Homo sapiens
  source 1..29: mol_type = unassigned RNA
atgaagtctttgttgcaccatggactttt

SEQ ID NO: 8101 - DNA, 29 bp, Homo sapiens
  source 1..29: mol_type = unassigned DNA
atgaagtctttgttgcaccatggactttt

SEQ ID NO: 8102 - DNA, 29 bp, Homo sapiens
  source 1..29: mol_type = unassigned DNA
aaaagtccatggtgcaacaaagacttcat

SEQ ID NO: 8103 - RNA, 29 nt, Homo sapiens
  source 1..29: mol_type = unassigned RNA
tatgcttcagaaagctgtggaacgctacc

SEQ ID NO: 8104 - DNA, 29 bp, Homo sapiens
  source 1..29: mol_type = unassigned DNA
tatgcttcagaaagctgtggaacgctacc

SEQ ID NO: 8105 - DNA, 29 bp, Homo sapiens
  source 1..29: mol_type = unassigned DNA
ggtagcgttccacagctttctgaagcata

SEQ ID NO: 8106 - RNA, 140 nt, Homo sapiens
  source 1..140: mol_type = unassigned RNA
caggaataggaggccttcaagattttgtgctgaaatctgcaacactgtgtagcctgccatcctgcccaccatttataccactcaacttcgaagccactcctattgtgagagttgctgttgaaccaaaacatccaagtaag

SEQ ID NO: 8107 - DNA, 140 bp, Homo sapiens
  source 1..140: mol_type = unassigned DNA
caggaataggaggccttcaagattttgtgctgaaatctgcaacactgtgtagcctgccatcctgcccaccatttataccactcaacttcgaagccactcctattgtgagagttgctgttgaaccaaaacatccaagtaag

SEQ ID NO: 8108 - DNA, 140 bp, Homo sapiens
  source 1..140: mol_type = unassigned DNA
cttacttggatgttttggttcaacagcaactctcacaataggagtggcttcgaagttgagtggtataaatggtgggcaggatggcaggctacacagtgttgcagatttcagcacaaaatcttgaaggcctcctattcctg

SEQ ID NO: 8109 - RNA, 31 nt, Homo sapiens
  source 1..31: mol_type = unassigned RNA
acactaatatatggacctagcttgaggcaat

SEQ ID NO: 8110 - DNA, 31 bp, Homo sapiens
  source 1..31: mol_type = unassigned DNA
acactaatatatggacctagcttgaggcaat

SEQ ID NO: 8111 - DNA, 31 bp, Homo sapiens
  source 1..31: mol_type = unassigned DNA
attgcctcaagctaggtccatatattagtgt

SEQ ID NO: 8112 - RNA, 32 nt, Homo sapiens
  source 1..32: mol_type = unassigned RNA
tctcctgtggtgtgggccaggcggcggcttcc

SEQ ID NO: 8113 - DNA, 32 bp, Homo sapiens
  source 1..32: mol_type = unassigned DNA
tctcctgtggtgtgggccaggcggcggcttcc

SEQ ID NO: 8114 - DNA, 32 bp, Homo sapiens
  source 1..32: mol_type = unassigned DNA
ggaagccgccgcctggcccacaccacaggaga

SEQ ID NO: 8115 - RNA, 30 nt, Homo sapiens
  source 1..30: mol_type = unassigned RNA
taacatggtccccttcccacgtctccattt

SEQ ID NO: 8116 - DNA, 30 bp, Homo sapiens
  source 1..30: mol_type = unassigned DNA
taacatggtccccttcccacgtctccattt

SEQ ID NO: 8117 - DNA, 30 bp, Homo sapiens
  source 1..30: mol_type = unassigned DNA
aaatggagacgtgggaaggggaccatgtta

SEQ ID NO: 8118 - RNA, 32 nt, Homo sapiens
  source 1..32: mol_type = unassigned RNA
tgattctcatttcaacaggaatggccagtaaa

SEQ ID NO: 8119 - DNA, 32 bp, Homo sapiens
  source 1..32: mol_type = unassigned DNA
tgattctcatttcaacaggaatggccagtaaa

SEQ ID NO: 8120 - DNA, 32 bp, Homo sapiens
  source 1..32: mol_type = unassigned DNA
tttactggccattcctgttgaaatgagaatca

SEQ ID NO: 8121 - RNA, 29 nt, Homo sapiens
  source 1..29: mol_type = unassigned RNA
aagtagtggcctggactggactgcagagc

SEQ ID NO: 8122 - DNA, 29 bp, Homo sapiens
  source 1..29: mol_type = unassigned DNA
aagtagtggcctggactggactgcagagc

SEQ ID NO: 8123 - DNA, 29 bp, Homo sapiens
  source 1..29: mol_type = unassigned DNA
gctctgcagtccagtccaggccactactt

SEQ ID NO: 8124 - RNA, 33 nt, Homo sapiens
  source 1..33: mol_type = unassigned RNA
gaaacatttgagggctctgctgatgttctggct

SEQ ID NO: 8125 - DNA, 33 bp, Homo sapiens
  source 1..33: mol_type = unassigned DNA
gaaacatttgagggctctgctgatgttctggct

SEQ ID NO: 8126 - DNA, 33 bp, Homo sapiens
  source 1..33: mol_type = unassigned DNA
agccagaacatcagcagagccctcaaatgtttc

SEQ ID NO: 8127 - RNA, 31 nt, Homo sapiens
  source 1..31: mol_type = unassigned RNA
taccccttatctggtaaagctggttttagaa

SEQ ID NO: 8128 - DNA, 31 bp, Homo sapiens
  source 1..31: mol_type = unassigned DNA
taccccttatctggtaaagctggttttagaa

SEQ ID NO: 8129 - DNA, 31 bp, Homo sapiens
  source 1..31: mol_type = unassigned DNA
ttctaaaaccagctttaccagataaggggta

SEQ ID NO: 8130 - RNA, 30 nt, Homo sapiens
  source 1..30: mol_type = unassigned RNA
aggtgaatgtagaccctgaggacctcatcc

SEQ ID NO: 8131 - DNA, 30 bp, Homo sapiens
  source 1..30: mol_type = unassigned DNA
aggtgaatgtagaccctgaggacctcatcc

SEQ ID NO: 8132 - DNA, 30 bp, Homo sapiens
  source 1..30: mol_type = unassigned DNA
ggatgaggtcctcagggtctacattcacct

SEQ ID NO: 8133 - RNA, 28 nt, Homo sapiens
  source 1..28: mol_type = unassigned RNA
aggcagactccacgtcggctggcatgag

SEQ ID NO: 8134 - DNA, 28 bp, Homo sapiens
  source 1..28: mol_type = unassigned DNA
aggcagactccacgtcggctggcatgag

SEQ ID NO: 8135 - DNA, 28 bp, Homo sapiens
  source 1..28: mol_type = unassigned DNA
ctcatgccagccgacgtggagtctgcct

SEQ ID NO: 8136 - RNA, 30 nt, Homo sapiens
  source 1..30: mol_type = unassigned RNA
gcctggccaagggcgcgccccaccagcgcc

SEQ ID NO: 8137 - DNA, 30 bp, Homo sapiens
  source 1..30: mol_type = unassigned DNA
gcctggccaagggcgcgccccaccagcgcc

SEQ ID NO: 8138 - DNA, 30 bp, Homo sapiens
  source 1..30: mol_type = unassigned DNA
ggcgctggtggggcgcgcccttggccaggc

SEQ ID NO: 8139 - RNA, 31 nt, Homo sapiens
  source 1..31: mol_type = unassigned RNA
ctgtacactatagaactcattcaggagagaa

SEQ ID NO: 8140 - DNA, 31 bp, Homo sapiens
  source 1..31: mol_type = unassigned DNA
ctgtacactatagaactcattcaggagagaa

SEQ ID NO: 8141 - DNA, 31 bp, Homo sapiens
  source 1..31: mol_type = unassigned DNA
ttctctcctgaatgagttctatagtgtacag

SEQ ID NO: 8142 - RNA, 35 nt, Homo sapiens
  source 1..35: mol_type = unassigned RNA
cagtgttagagttctgctgaaagtagggaaggaga

SEQ ID NO: 8143 - DNA, 35 bp, Homo sapiens
  source 1..35: mol_type = unassigned DNA
cagtgttagagttctgctgaaagtagggaaggaga

SEQ ID NO: 8144 - DNA, 35 bp, Homo sapiens
  source 1..35: mol_type = unassigned DNA
tctccttccctactttcagcagaactctaacactg

SEQ ID NO: 8145 - RNA, 51 nt, Homo sapiens
  source 1..51: mol_type = unassigned RNA
taaagaaatctgaaattttgagttattagttttgttgttttgtttttttga

SEQ ID NO: 8146 - DNA, 51 bp, Homo sapiens
  source 1..51: mol_type = unassigned DNA
taaagaaatctgaaattttgagttattagttttgttgttttgtttttttga

SEQ ID NO: 8147 - DNA, 51 bp, Homo sapiens
  source 1..51: mol_type = unassigned DNA
tcaaaaaaacaaaacaacaaaactaataactcaaaatttcagatttcttta

SEQ ID NO: 8148 - RNA, 33 nt, Homo sapiens
  source 1..33: mol_type = unassigned RNA
agagaccaaagatgtagaacacagcagagagca

SEQ ID NO: 8149 - DNA, 33 bp, Homo sapiens
  source 1..33: mol_type = unassigned DNA
agagaccaaagatgtagaacacagcagagagca

SEQ ID NO: 8150 - DNA, 33 bp, Homo sapiens
  source 1..33: mol_type = unassigned DNA
tgctctctgctgtgttctacatctttggtctct

SEQ ID NO: 8151 - RNA, 31 nt, Homo sapiens
  source 1..31: mol_type = unassigned RNA
atcctggtggtagaggggaagggaggaggtc

SEQ ID NO: 8152 - DNA, 31 bp, Homo sapiens
  source 1..31: mol_type = unassigned DNA
atcctggtggtagaggggaagggaggaggtc

SEQ ID NO: 8153 - DNA, 31 bp, Homo sapiens
  source 1..31: mol_type = unassigned DNA
gacctcctcccttcccctctaccaccaggat

SEQ ID NO: 8154 - RNA, 123 nt, Homo sapiens
  source 1..123: mol_type = unassigned RNA
gtgctggggagaggagggcgtggtctctggctagggctccaacggtcaggaacctaggtcaggacaggcacacctgctttcccgcccaaacttcgcattttccaagaccaccctggctctcca

SEQ ID NO: 8155 - DNA, 123 bp, Homo sapiens
  source 1..123: mol_type = unassigned DNA
gtgctggggagaggagggcgtggtctctggctagggctccaacggtcaggaacctaggtcaggacaggcacacctgctttcccgcccaaacttcgcattttccaagaccaccctggctctcca

SEQ ID NO: 8156 - DNA, 123 bp, Homo sapiens
  source 1..123: mol_type = unassigned DNA
tggagagccagggtggtcttggaaaatgcgaagtttgggcgggaaagcaggtgtgcctgtcctgacctaggttcctgaccgttggagccctagccagagaccacgccctcctctccccagcac

SEQ ID NO: 8157 - RNA, 40 nt, Homo sapiens
  source 1..40: mol_type = unassigned RNA
atgatggagatgatggagaagctggagatcatggagatga

SEQ ID NO: 8158 - DNA, 40 bp, Homo sapiens
  source 1..40: mol_type = unassigned DNA
atgatggagatgatggagaagctggagatcatggagatga

SEQ ID NO: 8159 - DNA, 40 bp, Homo sapiens
  source 1..40: mol_type = unassigned DNA
tcatctccatgatctccagcttctccatcatctccatcat

SEQ ID NO: 8160 - RNA, 44 nt, Homo sapiens
  source 1..44: mol_type = unassigned RNA
acatctctcactttcttctgaagcggttacttagctgggcttta

SEQ ID NO: 8161 - DNA, 44 bp, Homo sapiens
  source 1..44: mol_type = unassigned DNA
acatctctcactttcttctgaagcggttacttagctgggcttta

SEQ ID NO: 8162 - DNA, 44 bp, Homo sapiens
  source 1..44: mol_type = unassigned DNA
taaagcccagctaagtaaccgcttcagaagaaagtgagagatgt

SEQ ID NO: 8163 - RNA, 164 nt, Homo sapiens
  source 1..164: mol_type = unassigned RNA
cctgggtgtgcagggctctgggaggatgagcgagtgggggcgctgagagctgccctcaccctggttgcctctgaccccctctgtccacagatcagccaggtcttaggcaatgaaatcaagtttaccattcgggagcctttggggctcaggtgagcatttacctg

SEQ ID NO: 8164 - DNA, 164 bp, Homo sapiens
  source 1..164: mol_type = unassigned DNA
cctgggtgtgcagggctctgggaggatgagcgagtgggggcgctgagagctgccctcaccctggttgcctctgaccccctctgtccacagatcagccaggtcttaggcaatgaaatcaagtttaccattcgggagcctttggggctcaggtgagcatttacctg

SEQ ID NO: 8165 - DNA, 164 bp, Homo sapiens
  source 1..164: mol_type = unassigned DNA
caggtaaatgctcacctgagccccaaaggctcccgaatggtaaacttgatttcattgcctaagacctggctgatctgtggacagagggggtcagaggcaaccagggtgagggcagctctcagcgcccccactcgctcatcctcccagagccctgcacacccagg

SEQ ID NO: 8166 - RNA, 28 nt, Homo sapiens
  source 1..28: mol_type = unassigned RNA
catgactgccagcatgtttgacctttct

SEQ ID NO: 8167 - DNA, 28 bp, Homo sapiens
  source 1..28: mol_type = unassigned DNA
catgactgccagcatgtttgacctttct

SEQ ID NO: 8168 - DNA, 28 bp, Homo sapiens
  source 1..28: mol_type = unassigned DNA
agaaaggtcaaacatgctggcagtcatg

SEQ ID NO: 8169 - RNA, 114 nt, Homo sapiens
  source 1..114: mol_type = unassigned RNA
ggcttcacagtctcctagagtataaagcctgtaatctcaacacatctcacaggataccctttacaatctggtacttgccaatatttttacaatctcgtcttctacttgtgccca

SEQ ID NO: 8170 - DNA, 114 bp, Homo sapiens
  source 1..114: mol_type = unassigned DNA
ggcttcacagtctcctagagtataaagcctgtaatctcaacacatctcacaggataccctttacaatctggtacttgccaatatttttacaatctcgtcttctacttgtgccca

SEQ ID NO: 8171 - DNA, 114 bp, Homo sapiens
  source 1..114: mol_type = unassigned DNA
tgggcacaagtagaagacgagattgtaaaaatattggcaagtaccagattgtaaagggtatcctgtgagatgtgttgagattacaggctttatactctaggagactgtgaagcc

SEQ ID NO: 8172 - RNA, 32 nt, Homo sapiens
  source 1..32: mol_type = unassigned RNA
ttctcctgtggtgtgggccaggcggcggcttc

SEQ ID NO: 8173 - DNA, 32 bp, Homo sapiens
  source 1..32: mol_type = unassigned DNA
ttctcctgtggtgtgggccaggcggcggcttc

SEQ ID NO: 8174 - DNA, 32 bp, Homo sapiens
  source 1..32: mol_type = unassigned DNA
gaagccgccgcctggcccacaccacaggagaa

SEQ ID NO: 8175 - RNA, 34 nt, Homo sapiens
  source 1..34: mol_type = unassigned RNA
gaatgtcactggtacagttcaaaggctggagagc

SEQ ID NO: 8176 - DNA, 34 bp, Homo sapiens
  source 1..34: mol_type = unassigned DNA
gaatgtcactggtacagttcaaaggctggagagc

SEQ ID NO: 8177 - DNA, 34 bp, Homo sapiens
  source 1..34: mol_type = unassigned DNA
gctctccagcctttgaactgtaccagtgacattc

SEQ ID NO: 8178 - RNA, 29 nt, Homo sapiens
  source 1..29: mol_type = unassigned RNA
ggctgctctgggagttggaagagtcgcgg

SEQ ID NO: 8179 - DNA, 29 bp, Homo sapiens
  source 1..29: mol_type = unassigned DNA
ggctgctctgggagttggaagagtcgcgg

SEQ ID NO: 8180 - DNA, 29 bp, Homo sapiens
  source 1..29: mol_type = unassigned DNA
ccgcgactcttccaactcccagagcagcc

SEQ ID NO: 8181 - RNA, 118 nt, Homo sapiens
  source 1..118: mol_type = unassigned RNA
cattattgaatgactggtgaaatgacaaaaagcctcatgttctactaaggctgtggatagcacagagcacactgggggcagaggctgagcgtgtttgtgtaggagcactcaatactgc

SEQ ID NO: 8182 - DNA, 118 bp, Homo sapiens
  source 1..118: mol_type = unassigned DNA
cattattgaatgactggtgaaatgacaaaaagcctcatgttctactaaggctgtggatagcacagagcacactgggggcagaggctgagcgtgtttgtgtaggagcactcaatactgc

SEQ ID NO: 8183 - DNA, 118 bp, Homo sapiens
  source 1..118: mol_type = unassigned DNA
gcagtattgagtgctcctacacaaacacgctcagcctctgcccccagtgtgctctgtgctatccacagccttagtagaacatgaggctttttgtcatttcaccagtcattcaataatg

SEQ ID NO: 8184 - RNA, 23 nt, Homo sapiens
  source 1..23: mol_type = unassigned RNA
ttatttattagtttgtgatgcta

SEQ ID NO: 8185 - DNA, 23 bp, Homo sapiens
  source 1..23: mol_type = unassigned DNA
ttatttattagtttgtgatgcta

SEQ ID NO: 8186 - DNA, 23 bp, Homo sapiens
  source 1..23: mol_type = unassigned DNA
tagcatcacaaactaataaataa

SEQ ID NO: 8187 - RNA, 31 nt, Homo sapiens
  source 1..31: mol_type = unassigned RNA
cagagctctttgcgttggtccacggtgtgct

SEQ ID NO: 8188 - DNA, 31 bp, Homo sapiens
  source 1..31: mol_type = unassigned DNA
cagagctctttgcgttggtccacggtgtgct

SEQ ID NO: 8189 - DNA, 31 bp, Homo sapiens
  source 1..31: mol_type = unassigned DNA
agcacaccgtggaccaacgcaaagagctctg

SEQ ID NO: 8190 - RNA, 30 nt, Homo sapiens
  source 1..30: mol_type = unassigned RNA
ttgtccccattgtcggaggtcagagaaacc

SEQ ID NO: 8191 - DNA, 30 bp, Homo sapiens
  source 1..30: mol_type = unassigned DNA
ttgtccccattgtcggaggtcagagaaacc

SEQ ID NO: 8192 - DNA, 30 bp, Homo sapiens
  source 1..30: mol_type = unassigned DNA
ggtttctctgacctccgacaatggggacaa

SEQ ID NO: 8193 - RNA, 30 nt, Homo sapiens
  source 1..30: mol_type = unassigned RNA
atcagaggcctggaagcactgagccatgca

SEQ ID NO: 8194 - DNA, 30 bp, Homo sapiens
  source 1..30: mol_type = unassigned DNA
atcagaggcctggaagcactgagccatgca

SEQ ID NO: 8195 - DNA, 30 bp, Homo sapiens
  source 1..30: mol_type = unassigned DNA
tgcatggctcagtgcttccaggcctctgat

SEQ ID NO: 8196 - RNA, 27 nt, Homo sapiens
  source 1..27: mol_type = unassigned RNA
gggtgagcctctctgaacagggtccct

SEQ ID NO: 8197 - DNA, 27 bp, Homo sapiens
  source 1..27: mol_type = unassigned DNA
gggtgagcctctctgaacagggtccct

SEQ ID NO: 8198 - DNA, 27 bp, Homo sapiens
  source 1..27: mol_type = unassigned DNA
agggaccctgttcagagaggctcaccc

SEQ ID NO: 8199 - RNA, 30 nt, Homo sapiens
  source 1..30: mol_type = unassigned RNA
gcccctctgctgggtagagaggcactttca

SEQ ID NO: 8200 - DNA, 30 bp, Homo sapiens
  source 1..30: mol_type = unassigned DNA
gcccctctgctgggtagagaggcactttca

SEQ ID NO: 8201 - DNA, 30 bp, Homo sapiens
  source 1..30: mol_type = unassigned DNA
tgaaagtgcctctctacccagcagaggggc

SEQ ID NO: 8202 - RNA, 32 nt, Homo sapiens
  source 1..32: mol_type = unassigned RNA
aacagacaagtgactgtatctgtgtagactat

SEQ ID NO: 8203 - DNA, 32 bp, Homo sapiens
  source 1..32: mol_type = unassigned DNA
aacagacaagtgactgtatctgtgtagactat

SEQ ID NO: 8204 - DNA, 32 bp, Homo sapiens
  source 1..32: mol_type = unassigned DNA
atagtctacacagatacagtcacttgtctgtt

SEQ ID NO: 8205 - RNA, 29 nt, Homo sapiens
  source 1..29: mol_type = unassigned RNA
ttactaagtccccagctgtagtcgctgtg

SEQ ID NO: 8206 - DNA, 29 bp, Homo sapiens
  source 1..29: mol_type = unassigned DNA
ttactaagtccccagctgtagtcgctgtg

SEQ ID NO: 8207 - DNA, 29 bp, Homo sapiens
  source 1..29: mol_type = unassigned DNA
cacagcgactacagctggggacttagtaa

SEQ ID NO: 8208 - RNA, 32 nt, Homo sapiens
  source 1..32: mol_type = unassigned RNA
atcaaggtcctgtggaacatcttgaagcccct

SEQ ID NO: 8209 - DNA, 32 bp, Homo sapiens
  source 1..32: mol_type = unassigned DNA
atcaaggtcctgtggaacatcttgaagcccct

SEQ ID NO: 8210 - DNA, 32 bp, Homo sapiens
  source 1..32: mol_type = unassigned DNA
aggggcttcaagatgttccacaggaccttgat

SEQ ID NO: 8211 - RNA, 31 nt, Homo sapiens
  source 1..31: mol_type = unassigned RNA
tgacactgacttggactttcctgatcaatct

SEQ ID NO: 8212 - DNA, 31 bp, Homo sapiens
  source 1..31: mol_type = unassigned DNA
tgacactgacttggactttcctgatcaatct

SEQ ID NO: 8213 - DNA, 31 bp, Homo sapiens
  source 1..31: mol_type = unassigned DNA
agattgatcaggaaagtccaagtcagtgtca

SEQ ID NO: 8214 - RNA, 30 nt, Homo sapiens
  source 1..30: mol_type = unassigned RNA
cacttactgccaggcaagcctactgtgccc

SEQ ID NO: 8215 - DNA, 30 bp, Homo sapiens
  source 1..30: mol_type = unassigned DNA
cacttactgccaggcaagcctactgtgccc

SEQ ID NO: 8216 - DNA, 30 bp, Homo sapiens
  source 1..30: mol_type = unassigned DNA
gggcacagtaggcttgcctggcagtaagtg

SEQ ID NO: 8217 - RNA, 28 nt, Homo sapiens
  source 1..28: mol_type = unassigned RNA
ctgggtgggaactctgagccggcacaca

SEQ ID NO: 8218 - DNA, 28 bp, Homo sapiens
  source 1..28: mol_type = unassigned DNA
ctgggtgggaactctgagccggcacaca

SEQ ID NO: 8219 - DNA, 28 bp, Homo sapiens
  source 1..28: mol_type = unassigned DNA
tgtgtgccggctcagagttcccacccag

SEQ ID NO: 8220 - RNA, 84 nt, Homo sapiens
  source 1..84: mol_type = unassigned RNA
ctaattacctgggctgctaacattcacaaaatgtaggttaaatctcgtcactataaatttcaaagggctgtacaaatatcttta

SEQ ID NO: 8221 - DNA, 84 bp, Homo sapiens
  source 1..84: mol_type = unassigned DNA
ctaattacctgggctgctaacattcacaaaatgtaggttaaatctcgtcactataaatttcaaagggctgtacaaatatcttta

SEQ ID NO: 8222 - DNA, 84 bp, Homo sapiens
  source 1..84: mol_type = unassigned DNA
taaagatatttgtacagccctttgaaatttatagtgacgagatttaacctacattttgtgaatgttagcagcccaggtaattag

SEQ ID NO: 8223 - RNA, 50 nt, Homo sapiens
  source 1..50: mol_type = unassigned RNA
cccattgtctcagcctaaagtctccttaaccagataagcaacttcagcaa

SEQ ID NO: 8224 - DNA, 50 bp, Homo sapiens
  source 1..50: mol_type = unassigned DNA
cccattgtctcagcctaaagtctccttaaccagataagcaacttcagcaa

SEQ ID NO: 8225 - DNA, 50 bp, Homo sapiens
  source 1..50: mol_type = unassigned DNA
ttgctgaagttgcttatctggttaaggagactttaggctgagacaatggg

SEQ ID NO: 8226 - RNA, 31 nt, Homo sapiens
  source 1..31: mol_type = unassigned RNA
ttatccagttggcgaaggactttgaggattt

SEQ ID NO: 8227 - DNA, 31 bp, Homo sapiens
  source 1..31: mol_type = unassigned DNA
ttatccagttggcgaaggactttgaggattt

SEQ ID NO: 8228 - DNA, 31 bp, Homo sapiens
  source 1..31: mol_type = unassigned DNA
aaatcctcaaagtccttcgccaactggataa

SEQ ID NO: 8229 - RNA, 23 nt, Homo sapiens
  source 1..23: mol_type = unassigned RNA
tgatgtattagttggatatttat

SEQ ID NO: 8230 - DNA, 23 bp, Homo sapiens
  source 1..23: mol_type = unassigned DNA
tgatgtattagttggatatttat

SEQ ID NO: 8231 - DNA, 23 bp, Homo sapiens
  source 1..23: mol_type = unassigned DNA
ataaatatccaactaatacatca

SEQ ID NO: 8232 - RNA, 44 nt, Homo sapiens
  source 1..44: mol_type = unassigned RNA
agtcatagtgtttgtcttgttatgtgactggttgatttcactca

SEQ ID NO: 8233 - DNA, 44 bp, Homo sapiens
  source 1..44: mol_type = unassigned DNA
agtcatagtgtttgtcttgttatgtgactggttgatttcactca

SEQ ID NO: 8234 - DNA, 44 bp, Homo sapiens
  source 1..44: mol_type = unassigned DNA
tgagtgaaatcaaccagtcacataacaagacaaacactatgact

SEQ ID NO: 8235 - RNA, 27 nt, Homo sapiens
  source 1..27: mol_type = unassigned RNA
aagtctcggaaagggggctgtgcgcac

SEQ ID NO: 8236 - DNA, 27 bp, Homo sapiens
  source 1..27: mol_type = unassigned DNA
aagtctcggaaagggggctgtgcgcac

SEQ ID NO: 8237 - DNA, 27 bp, Homo sapiens
  source 1..27: mol_type = unassigned DNA
gtgcgcacagccccctttccgagactt

SEQ ID NO: 8238 - RNA, 98 nt, Homo sapiens
  source 1..98: mol_type = unassigned RNA
cagcactggccagaaaatggagtcttaaaccttgaatcccccataaccaccttgactagaaagcacacagtgctgggaaaaaagaatgtctgaagtgg

SEQ ID NO: 8239 - DNA, 98 bp, Homo sapiens
  source 1..98: mol_type = unassigned DNA
cagcactggccagaaaatggagtcttaaaccttgaatcccccataaccaccttgactagaaagcacacagtgctgggaaaaaagaatgtctgaagtgg

SEQ ID NO: 8240 - DNA, 98 bp, Homo sapiens
  source 1..98: mol_type = unassigned DNA
ccacttcagacattcttttttcccagcactgtgtgctttctagtcaaggtggttatgggggattcaaggtttaagactccattttctggccagtgctg

SEQ ID NO: 8241 - RNA, 39 nt, Homo sapiens
  source 1..39: mol_type = unassigned RNA
tctctccagtggaatcttggcaatggtagaaataccttt

SEQ ID NO: 8242 - DNA, 39 bp, Homo sapiens
  source 1..39: mol_type = unassigned DNA
tctctccagtggaatcttggcaatggtagaaataccttt

SEQ ID NO: 8243 - DNA, 39 bp, Homo sapiens
  source 1..39: mol_type = unassigned DNA
aaaggtatttctaccattgccaagattccactggagaga

SEQ ID NO: 8244 - RNA, 34 nt, Homo sapiens
  source 1..34: mol_type = unassigned RNA
aggatctgtggaacatcttgaagctctcaatctt

SEQ ID NO: 8245 - DNA, 34 bp, Homo sapiens
  source 1..34: mol_type = unassigned DNA
aggatctgtggaacatcttgaagctctcaatctt

SEQ ID NO: 8246 - DNA, 34 bp, Homo sapiens
  source 1..34: mol_type = unassigned DNA
aagattgagagcttcaagatgttccacagatcct

SEQ ID NO: 8247 - RNA, 34 nt, Homo sapiens
  source 1..34: mol_type = unassigned RNA
tgtttatacatatagttggactacatatgtttat

SEQ ID NO: 8248 - DNA, 34 bp, Homo sapiens
  source 1..34: mol_type = unassigned DNA
tgtttatacatatagttggactacatatgtttat

SEQ ID NO: 8249 - DNA, 34 bp, Homo sapiens
  source 1..34: mol_type = unassigned DNA
ataaacatatgtagtccaactatatgtataaaca

SEQ ID NO: 8250 - RNA, 29 nt, Homo sapiens
  source 1..29: mol_type = unassigned RNA
aaggcaggagtcaggacttatggattccg

SEQ ID NO: 8251 - DNA, 29 bp, Homo sapiens
  source 1..29: mol_type = unassigned DNA
aaggcaggagtcaggacttatggattccg

SEQ ID NO: 8252 - DNA, 29 bp, Homo sapiens
  source 1..29: mol_type = unassigned DNA
cggaatccataagtcctgactcctgcctt

SEQ ID NO: 8253 - RNA, 32 nt, Homo sapiens
  source 1..32: mol_type = unassigned RNA
aaatcacaggcttctgagcacagctgcattaa

SEQ ID NO: 8254 - DNA, 32 bp, Homo sapiens
  source 1..32: mol_type = unassigned DNA
aaatcacaggcttctgagcacagctgcattaa

SEQ ID NO: 8255 - DNA, 32 bp, Homo sapiens
  source 1..32: mol_type = unassigned DNA
ttaatgcagctgtgctcagaagcctgtgattt

SEQ ID NO: 8256 - RNA, 29 nt, Homo sapiens
  source 1..29: mol_type = unassigned RNA
aagacacggtgtcactgactgtggatggt

SEQ ID NO: 8257 - DNA, 29 bp, Homo sapiens
  source 1..29: mol_type = unassigned DNA
aagacacggtgtcactgactgtggatggt

SEQ ID NO: 8258 - DNA, 29 bp, Homo sapiens
  source 1..29: mol_type = unassigned DNA
accatccacagtcagtgacaccgtgtctt

SEQ ID NO: 8259 - RNA, 30 nt, Homo sapiens
  source 1..30: mol_type = unassigned RNA
gagggtttcagagggacttgggatcatgga

SEQ ID NO: 8260 - DNA, 30 bp, Homo sapiens
  source 1..30: mol_type = unassigned DNA
gagggtttcagagggacttgggatcatgga

SEQ ID NO: 8261 - DNA, 30 bp, Homo sapiens
  source 1..30: mol_type = unassigned DNA
tccatgatcccaagtccctctgaaaccctc

SEQ ID NO: 8262 - RNA, 115 nt, Homo sapiens
  source 1..115: mol_type = unassigned RNA
ttgtgctgaggcctggagaatgggccgtgatgaacatctggctgagaccccgtgcctctttccctgtgtcttttcatgcatttggatgttgccacagggatggaggtcttgtcag

SEQ ID NO: 8263 - DNA, 115 bp, Homo sapiens
  source 1..115: mol_type = unassigned DNA
ttgtgctgaggcctggagaatgggccgtgatgaacatctggctgagaccccgtgcctctttccctgtgtcttttcatgcatttggatgttgccacagggatggaggtcttgtcag

SEQ ID NO: 8264 - DNA, 115 bp, Homo sapiens
  source 1..115: mol_type = unassigned DNA
ctgacaagacctccatccctgtggcaacatccaaatgcatgaaaagacacagggaaagaggcacggggtctcagccagatgttcatcacggcccattctccaggcctcagcacaa

SEQ ID NO: 8265 - RNA, 55 nt, Homo sapiens
  source 1..55: mol_type = unassigned RNA
tgctgcctaagaaaactgagagccatcataaggccaagggaaagtgaagagttaa

SEQ ID NO: 8266 - DNA, 55 bp, Homo sapiens
  source 1..55: mol_type = unassigned DNA
tgctgcctaagaaaactgagagccatcataaggccaagggaaagtgaagagttaa

SEQ ID NO: 8267 - DNA, 55 bp, Homo sapiens
  source 1..55: mol_type = unassigned DNA
ttaactcttcactttcccttggccttatgatggctctcagttttcttaggcagca

SEQ ID NO: 8268 - RNA, 76 nt, Homo sapiens
  source 1..76: mol_type = unassigned RNA
tctggggggtaatggcgtggggctcccccatctcgtcttaccgctgccctagacacagatgcggcttctgcttgta

SEQ ID NO: 8269 - DNA, 76 bp, Homo sapiens
  source 1..76: mol_type = unassigned DNA
tctggggggtaatggcgtggggctcccccatctcgtcttaccgctgccctagacacagatgcggcttctgcttgta

SEQ ID NO: 8270 - DNA, 76 bp, Homo sapiens
  source 1..76: mol_type = unassigned DNA
tacaagcagaagccgcatctgtgtctagggcagcggtaagacgagatgggggagccccacgccattaccccccaga

SEQ ID NO: 8271 - RNA, 125 nt, Homo sapiens
  source 1..125: mol_type = unassigned RNA
cttgcagcttctgtggccccaggaaatccttggagttccttggactgtagctgcgtcactccaatctctgcctccatcttcacaggatggccccttctgtgtttctcctgtcatgtctgtgcctt

SEQ ID NO: 8272 - DNA, 125 bp, Homo sapiens
  source 1..125: mol_type = unassigned DNA
cttgcagcttctgtggccccaggaaatccttggagttccttggactgtagctgcgtcactccaatctctgcctccatcttcacaggatggccccttctgtgtttctcctgtcatgtctgtgcctt

SEQ ID NO: 8273 - DNA, 125 bp, Homo sapiens
  source 1..125: mol_type = unassigned DNA
aaggcacagacatgacaggagaaacacagaaggggccatcctgtgaagatggaggcagagattggagtgacgcagctacagtccaaggaactccaaggatttcctggggccacagaagctgcaag

SEQ ID NO: 8274 - RNA, 30 nt, Homo sapiens
  source 1..30: mol_type = unassigned RNA
tggacacagagtcaagggcccaagaggaaa

SEQ ID NO: 8275 - DNA, 30 bp, Homo sapiens
  source 1..30: mol_type = unassigned DNA
tggacacagagtcaagggcccaagaggaaa

SEQ ID NO: 8276 - DNA, 30 bp, Homo sapiens
  source 1..30: mol_type = unassigned DNA
tttcctcttgggcccttgactctgtgtcca

SEQ ID NO: 8277 - RNA, 41 nt, Homo sapiens
  source 1..41: mol_type = unassigned RNA
ctcagcctggagctggatcagggaatgtgggctctcatcct

SEQ ID NO: 8278 - DNA, 41 bp, Homo sapiens
  source 1..41: mol_type = unassigned DNA
ctcagcctggagctggatcagggaatgtgggctctcatcct

SEQ ID NO: 8279 - DNA, 41 bp, Homo sapiens
  source 1..41: mol_type = unassigned DNA
aggatgagagcccacattccctgatccagctccaggctgag

SEQ ID NO: 8280 - RNA, 31 nt, Homo sapiens
  source 1..31: mol_type = unassigned RNA
gactcacaagaaagccaactgtatgtcttgt

SEQ ID NO: 8281 - DNA, 31 bp, Homo sapiens
  source 1..31: mol_type = unassigned DNA
gactcacaagaaagccaactgtatgtcttgt

SEQ ID NO: 8282 - DNA, 31 bp, Homo sapiens
  source 1..31: mol_type = unassigned DNA
acaagacatacagttggctttcttgtgagtc

SEQ ID NO: 8283 - RNA, 33 nt, Homo sapiens
  source 1..33: mol_type = unassigned RNA
taatacagaaaaggaaccaagacatctgaaagg

SEQ ID NO: 8284 - DNA, 33 bp, Homo sapiens
  source 1..33: mol_type = unassigned DNA
taatacagaaaaggaaccaagacatctgaaagg

SEQ ID NO: 8285 - DNA, 33 bp, Homo sapiens
  source 1..33: mol_type = unassigned DNA
cctttcagatgtcttggttccttttctgtatta

SEQ ID NO: 8286 - RNA, 30 nt, Homo sapiens
  source 1..30: mol_type = unassigned RNA
ttagagctaaaccagcccccacccccaccc

SEQ ID NO: 8287 - DNA, 30 bp, Homo sapiens
  source 1..30: mol_type = unassigned DNA
ttagagctaaaccagcccccacccccaccc

SEQ ID NO: 8288 - DNA, 30 bp, Homo sapiens
  source 1..30: mol_type = unassigned DNA
gggtgggggtgggggctggtttagctctaa

SEQ ID NO: 8289 - RNA, 76 nt, Homo sapiens
  source 1..76: mol_type = unassigned RNA
atgctggactgcctgtctaattacaaccctaaaaatgatcggaaggctcagagcatctgtgagcgggtaactcccc

SEQ ID NO: 8290 - DNA, 76 bp, Homo sapiens
  source 1..76: mol_type = unassigned DNA
atgctggactgcctgtctaattacaaccctaaaaatgatcggaaggctcagagcatctgtgagcgggtaactcccc

SEQ ID NO: 8291 - DNA, 76 bp, Homo sapiens
  source 1..76: mol_type = unassigned DNA
ggggagttacccgctcacagatgctctgagccttccgatcatttttagggttgtaattagacaggcagtccagcat

SEQ ID NO: 8292 - RNA, 123 nt, Homo sapiens
  source 1..123: mol_type = unassigned RNA
actgaagaccttaagaagtttctaaaaccatatactttagaagaacagaaaaacctcacagtctgtcctgatggagcactttttgaacagaagggtccagtttatgttgcttgtcaatctccc

SEQ ID NO: 8293 - DNA, 123 bp, Homo sapiens
  source 1..123: mol_type = unassigned DNA
actgaagaccttaagaagtttctaaaaccatatactttagaagaacagaaaaacctcacagtctgtcctgatggagcactttttgaacagaagggtccagtttatgttgcttgtcaatctccc

SEQ ID NO: 8294 - DNA, 123 bp, Homo sapiens
  source 1..123: mol_type = unassigned DNA
gggagattgacaagcaacataaactggacccttctgttcaaaaagtgctccatcaggacagactgtgaggtttttctgttcttctaaagtatatggttttagaaacttcttaaggtcttcagt

SEQ ID NO: 8295 - RNA, 31 nt, Homo sapiens
  source 1..31: mol_type = unassigned RNA
accaggatgatgagagctgtggaagctgtat

SEQ ID NO: 8296 - DNA, 31 bp, Homo sapiens
  source 1..31: mol_type = unassigned DNA
accaggatgatgagagctgtggaagctgtat

SEQ ID NO: 8297 - DNA, 31 bp, Homo sapiens
  source 1..31: mol_type = unassigned DNA
atacagcttccacagctctcatcatcctggt

SEQ ID NO: 8298 - RNA, 28 nt, Homo sapiens
  source 1..28: mol_type = unassigned RNA
ttcgcgcgcgcccccgtccccccgcaac

SEQ ID NO: 8299 - DNA, 28 bp, Homo sapiens
  source 1..28: mol_type = unassigned DNA
ttcgcgcgcgcccccgtccccccgcaac

SEQ ID NO: 8300 - DNA, 28 bp, Homo sapiens
  source 1..28: mol_type = unassigned DNA
gttgcggggggacgggggcgcgcgcgaa

SEQ ID NO: 8301 - RNA, 31 nt, Homo sapiens
  source 1..31: mol_type = unassigned RNA
tccagcagattgggctggagctgggccgctc

SEQ ID NO: 8302 - DNA, 31 bp, Homo sapiens
  source 1..31: mol_type = unassigned DNA
tccagcagattgggctggagctgggccgctc

SEQ ID NO: 8303 - DNA, 31 bp, Homo sapiens
  source 1..31: mol_type = unassigned DNA
gagcggcccagctccagcccaatctgctgga

SEQ ID NO: 8304 - RNA, 31 nt, Homo sapiens
  source 1..31: mol_type = unassigned RNA
aaggagcctgagggctgcagggcaatgcggt

SEQ ID NO: 8305 - DNA, 31 bp, Homo sapiens
  source 1..31: mol_type = unassigned DNA
aaggagcctgagggctgcagggcaatgcggt

SEQ ID NO: 8306 - DNA, 31 bp, Homo sapiens
  source 1..31: mol_type = unassigned DNA
accgcattgccctgcagccctcaggctcctt

SEQ ID NO: 8307 - RNA, 27 nt, Homo sapiens
  source 1..27: mol_type = unassigned RNA
cagaaacaactgagtctcttgaagtta

SEQ ID NO: 8308 - DNA, 27 bp, Homo sapiens
  source 1..27: mol_type = unassigned DNA
cagaaacaactgagtctcttgaagtta

SEQ ID NO: 8309 - DNA, 27 bp, Homo sapiens
  source 1..27: mol_type = unassigned DNA
taacttcaagagactcagttgtttctg

SEQ ID NO: 8310 - RNA, 36 nt, Homo sapiens
  source 1..36: mol_type = unassigned RNA
caattgtgccagcctggtttggtaattgacctcgag

SEQ ID NO: 8311 - DNA, 36 bp, Homo sapiens
  source 1..36: mol_type = unassigned DNA
caattgtgccagcctggtttggtaattgacctcgag

SEQ ID NO: 8312 - DNA, 36 bp, Homo sapiens
  source 1..36: mol_type = unassigned DNA
ctcgaggtcaattaccaaaccaggctggcacaattg

SEQ ID NO: 8313 - RNA, 54 nt, Homo sapiens
  source 1..54: mol_type = unassigned RNA
ttccctcctcctcccgccccgcggggagctcggccctcctcctgcgggggggga

SEQ ID NO: 8314 - DNA, 54 bp, Homo sapiens
  source 1..54: mol_type = unassigned DNA
ttccctcctcctcccgccccgcggggagctcggccctcctcctgcgggggggga

SEQ ID NO: 8315 - DNA, 54 bp, Homo sapiens
  source 1..54: mol_type = unassigned DNA
tccccccccgcaggaggagggccgagctccccgcggggcgggaggaggagggaa

SEQ ID NO: 8316 - RNA, 23 nt, Homo sapiens
  source 1..23: mol_type = unassigned RNA
tgttgcacttgtctaactcacag

SEQ ID NO: 8317 - DNA, 23 bp, Homo sapiens
  source 1..23: mol_type = unassigned DNA
tgttgcacttgtctaactcacag

SEQ ID NO: 8318 - DNA, 23 bp, Homo sapiens
  source 1..23: mol_type = unassigned DNA
ctgtgagttagacaagtgcaaca

SEQ ID NO: 8319 - RNA, 31 nt, Homo sapiens
  source 1..31: mol_type = unassigned RNA
tccatgaatttctggactggaggaagatgaa

SEQ ID NO: 8320 - DNA, 31 bp, Homo sapiens
  source 1..31: mol_type = unassigned DNA
tccatgaatttctggactggaggaagatgaa

SEQ ID NO: 8321 - DNA, 31 bp, Homo sapiens
  source 1..31: mol_type = unassigned DNA
ttcatcttcctccagtccagaaattcatgga

SEQ ID NO: 8322 - RNA, 31 nt, Homo sapiens
  source 1..31: mol_type = unassigned RNA
agcaacctgagcccggttgaaaggacccctc

SEQ ID NO: 8323 - DNA, 31 bp, Homo sapiens
  source 1..31: mol_type = unassigned DNA
agcaacctgagcccggttgaaaggacccctc

SEQ ID NO: 8324 - DNA, 31 bp, Homo sapiens
  source 1..31: mol_type = unassigned DNA
gaggggtcctttcaaccgggctcaggttgct

SEQ ID NO: 8325 - RNA, 29 nt, Homo sapiens
  source 1..29: mol_type = unassigned RNA
ggctaattgtggctcctctgcttgtaacc

SEQ ID NO: 8326 - DNA, 29 bp, Homo sapiens
  source 1..29: mol_type = unassigned DNA
ggctaattgtggctcctctgcttgtaacc

SEQ ID NO: 8327 - DNA, 29 bp, Homo sapiens
  source 1..29: mol_type = unassigned DNA
ggttacaagcagaggagccacaattagcc

SEQ ID NO: 8328 - RNA, 26 nt, Homo sapiens
  source 1..26: mol_type = unassigned RNA
ttctcaaattggttgtgtggtttttg

SEQ ID NO: 8329 - DNA, 26 bp, Homo sapiens
  source 1..26: mol_type = unassigned DNA
ttctcaaattggttgtgtggtttttg

SEQ ID NO: 8330 - DNA, 26 bp, Homo sapiens
  source 1..26: mol_type = unassigned DNA
caaaaaccacacaaccaatttgagaa

SEQ ID NO: 8331 - RNA, 34 nt, Homo sapiens
  source 1..34: mol_type = unassigned RNA
aaatgtgggcaagactgtctttgaatatagaaca

SEQ ID NO: 8332 - DNA, 34 bp, Homo sapiens
  source 1..34: mol_type = unassigned DNA
aaatgtgggcaagactgtctttgaatatagaaca

SEQ ID NO: 8333 - DNA, 34 bp, Homo sapiens
  source 1..34: mol_type = unassigned DNA
tgttctatattcaaagacagtcttgcccacattt

SEQ ID NO: 8334 - RNA, 87 nt, Homo sapiens
  source 1..87: mol_type = unassigned RNA
ttgagttggctggcctcaaccatgtgtagaactcacactttctccttgcctatccttttgcactgcaccagtatctgagttgatcgt

SEQ ID NO: 8335 - DNA, 87 bp, Homo sapiens
  source 1..87: mol_type = unassigned DNA
ttgagttggctggcctcaaccatgtgtagaactcacactttctccttgcctatccttttgcactgcaccagtatctgagttgatcgt

SEQ ID NO: 8336 - DNA, 87 bp, Homo sapiens
  source 1..87: mol_type = unassigned DNA
acgatcaactcagatactggtgcagtgcaaaaggataggcaaggagaaagtgtgagttctacacatggttgaggccagccaactcaa

SEQ ID NO: 8337 - RNA, 28 nt, Homo sapiens
  source 1..28: mol_type = unassigned RNA
cagcaactctgcatctactggacaaagt

SEQ ID NO: 8338 - DNA, 28 bp, Homo sapiens
  source 1..28: mol_type = unassigned DNA
cagcaactctgcatctactggacaaagt

SEQ ID NO: 8339 - DNA, 28 bp, Homo sapiens
  source 1..28: mol_type = unassigned DNA
actttgtccagtagatgcagagttgctg

SEQ ID NO: 8340 - RNA, 30 nt, Homo sapiens
  source 1..30: mol_type = unassigned RNA
aaaatgctcatcgtcactggccatcagaga

SEQ ID NO: 8341 - DNA, 30 bp, Homo sapiens
  source 1..30: mol_type = unassigned DNA
aaaatgctcatcgtcactggccatcagaga

SEQ ID NO: 8342 - DNA, 30 bp, Homo sapiens
  source 1..30: mol_type = unassigned DNA
tctctgatggccagtgacgatgagcatttt

SEQ ID NO: 8343 - RNA, 30 nt, Homo sapiens
  source 1..30: mol_type = unassigned RNA
agggctctctagggaaggggaccaggcagg

SEQ ID NO: 8344 - DNA, 30 bp, Homo sapiens
  source 1..30: mol_type = unassigned DNA
agggctctctagggaaggggaccaggcagg

SEQ ID NO: 8345 - DNA, 30 bp, Homo sapiens
  source 1..30: mol_type = unassigned DNA
cctgcctggtccccttccctagagagccct

SEQ ID NO: 8346 - RNA, 33 nt, Homo sapiens
  source 1..33: mol_type = unassigned RNA
agaatgtggccatggaggaactcatcaccaagc

SEQ ID NO: 8347 - DNA, 33 bp, Homo sapiens
  source 1..33: mol_type = unassigned DNA
agaatgtggccatggaggaactcatcaccaagc

SEQ ID NO: 8348 - DNA, 33 bp, Homo sapiens
  source 1..33: mol_type = unassigned DNA
gcttggtgatgagttcctccatggccacattct

SEQ ID NO: 8349 - RNA, 82 nt, Homo sapiens
  source 1..82: mol_type = unassigned RNA
cttctctcagaacaaaatcacttcattttattgtcttagtttgtatattttctgtgacttgaaataaactttgaacacaatt

SEQ ID NO: 8350 - DNA, 82 bp, Homo sapiens
  source 1..82: mol_type = unassigned DNA
cttctctcagaacaaaatcacttcattttattgtcttagtttgtatattttctgtgacttgaaataaactttgaacacaatt

SEQ ID NO: 8351 - DNA, 82 bp, Homo sapiens
  source 1..82: mol_type = unassigned DNA
aattgtgttcaaagtttatttcaagtcacagaaaatatacaaactaagacaataaaatgaagtgattttgttctgagagaag

SEQ ID NO: 8352 - RNA, 31 nt, Homo sapiens
  source 1..31: mol_type = unassigned RNA
acctacctgctgcagaactctctgggtggta

SEQ ID NO: 8353 - DNA, 31 bp, Homo sapiens
  source 1..31: mol_type = unassigned DNA
acctacctgctgcagaactctctgggtggta

SEQ ID NO: 8354 - DNA, 31 bp, Homo sapiens
  source 1..31: mol_type = unassigned DNA
taccacccagagagttctgcagcaggtaggt

SEQ ID NO: 8355 - RNA, 23 nt, Homo sapiens
  source 1..23: mol_type = unassigned RNA
ttttgcaattgtaaaagtcactt

SEQ ID NO: 8356 - DNA, 23 bp, Homo sapiens
  source 1..23: mol_type = unassigned DNA
ttttgcaattgtaaaagtcactt

SEQ ID NO: 8357 - DNA, 23 bp, Homo sapiens
  source 1..23: mol_type = unassigned DNA
aagtgacttttacaattgcaaaa

SEQ ID NO: 8358 - RNA, 55 nt, Homo sapiens
  source 1..55: mol_type = unassigned RNA
tcacattattgatcaaaggaccaaataagcacacactctctcaaatcaaagaagc

SEQ ID NO: 8359 - DNA, 55 bp, Homo sapiens
  source 1..55: mol_type = unassigned DNA
tcacattattgatcaaaggaccaaataagcacacactctctcaaatcaaagaagc

SEQ ID NO: 8360 - DNA, 55 bp, Homo sapiens
  source 1..55: mol_type = unassigned DNA
gcttctttgatttgagagagtgtgtgcttatttggtcctttgatcaataatgtga

SEQ ID NO: 8361 - RNA, 52 nt, Homo sapiens
  source 1..52: mol_type = unassigned RNA
tgacctaattgagcaaggccagtgatgggctgaaatgtgtgctggacaaagt

SEQ ID NO: 8362 - DNA, 52 bp, Homo sapiens
  source 1..52: mol_type = unassigned DNA
tgacctaattgagcaaggccagtgatgggctgaaatgtgtgctggacaaagt

SEQ ID NO: 8363 - DNA, 52 bp, Homo sapiens
  source 1..52: mol_type = unassigned DNA
actttgtccagcacacatttcagcccatcactggccttgctcaattaggtca

SEQ ID NO: 8364 - RNA, 81 nt, Homo sapiens
  source 1..81: mol_type = unassigned RNA
tacaccatctaggtttgtgtagtacactctgatgttcctacaatgatgaaatcgcctaatgcatttcccaaaacatacacc

SEQ ID NO: 8365 - DNA, 81 bp, Homo sapiens
  source 1..81: mol_type = unassigned DNA
tacaccatctaggtttgtgtagtacactctgatgttcctacaatgatgaaatcgcctaatgcatttcccaaaacatacacc

SEQ ID NO: 8366 - DNA, 81 bp, Homo sapiens
  source 1..81: mol_type = unassigned DNA
ggtgtatgttttgggaaatgcattaggcgatttcatcattgtaggaacatcagagtgtactacacaaacctagatggtgta

SEQ ID NO: 8367 - RNA, 25 nt, Homo sapiens
  source 1..25: mol_type = unassigned RNA
ggcagcagcgtcgtcataggtaata

SEQ ID NO: 8368 - DNA, 25 bp, Homo sapiens
  source 1..25: mol_type = unassigned DNA
ggcagcagcgtcgtcataggtaata

SEQ ID NO: 8369 - DNA, 25 bp, Homo sapiens
  source 1..25: mol_type = unassigned DNA
tattacctatgacgacgctgctgcc

SEQ ID NO: 8370 - RNA, 139 nt, Homo sapiens
  source 1..139: mol_type = unassigned RNA
cattccagcggatattttggtgtttgcgaggcatgcagtcaatattttgtacagttagtggacagtattcagcaacgcctgatagcttctttggccttatgttaaataaaaagacctgtttgggatgtattttttattt

SEQ ID NO: 8371 - DNA, 139 bp, Homo sapiens
  source 1..139: mol_type = unassigned DNA
cattccagcggatattttggtgtttgcgaggcatgcagtcaatattttgtacagttagtggacagtattcagcaacgcctgatagcttctttggccttatgttaaataaaaagacctgtttgggatgtattttttattt

SEQ ID NO: 8372 - DNA, 139 bp, Homo sapiens
  source 1..139: mol_type = unassigned DNA
aaataaaaaatacatcccaaacaggtctttttatttaacataaggccaaagaagctatcaggcgttgctgaatactgtccactaactgtacaaaatattgactgcatgcctcgcaaacaccaaaatatccgctggaatg

SEQ ID NO: 8373 - RNA, 186 nt, Homo sapiens
  source 1..186: mol_type = unassigned RNA
gcgacacggggaaaagatgcggagctgtgtgcgtctccctaggtcttctgggagatgtggtctcttggccctttggtcacagggctgcaggactacaatgccagcatgcagcgggttcatggacagtgtgtatcactggaggaagacgtggagctgtgcgtgcctcgctgggcttgcagggagatg

SEQ ID NO: 8374 - DNA, 186 bp, Homo sapiens
  source 1..186: mol_type = unassigned DNA
gcgacacggggaaaagatgcggagctgtgtgcgtctccctaggtcttctgggagatgtggtctcttggccctttggtcacagggctgcaggactacaatgccagcatgcagcgggttcatggacagtgtgtatcactggaggaagacgtggagctgtgcgtgcctcgctgggcttgcagggagatg

SEQ ID NO: 8375 - DNA, 186 bp, Homo sapiens
  source 1..186: mol_type = unassigned DNA
catctccctgcaagcccagcgaggcacgcacagctccacgtcttcctccagtgatacacactgtccatgaacccgctgcatgctggcattgtagtcctgcagccctgtgaccaaagggccaagagaccacatctcccagaagacctagggagacgcacacagctccgcatcttttccccgtgtcgc

SEQ ID NO: 8376 - RNA, 30 nt, Homo sapiens
  source 1..30: mol_type = unassigned RNA
tagaagaaggattcttgagactgtacatct

SEQ ID NO: 8377 - DNA, 30 bp, Homo sapiens
  source 1..30: mol_type = unassigned DNA
tagaagaaggattcttgagactgtacatct

SEQ ID NO: 8378 - DNA, 30 bp, Homo sapiens
  source 1..30: mol_type = unassigned DNA
agatgtacagtctcaagaatccttcttcta

SEQ ID NO: 8379 - RNA, 76 nt, Homo sapiens
  source 1..76: mol_type = unassigned RNA
tatgccaattgtctggtctgacatgacctacaagcagctgcagcagtgctgggttccaggtgcaggcactaggaac

SEQ ID NO: 8380 - DNA, 76 bp, Homo sapiens
  source 1..76: mol_type = unassigned DNA
tatgccaattgtctggtctgacatgacctacaagcagctgcagcagtgctgggttccaggtgcaggcactaggaac

SEQ ID NO: 8381 - DNA, 76 bp, Homo sapiens
  source 1..76: mol_type = unassigned DNA
gttcctagtgcctgcacctggaacccagcactgctgcagctgcttgtaggtcatgtcagaccagacaattggcata

SEQ ID NO: 8382 - RNA, 47 nt, Homo sapiens
  source 1..47: mol_type = unassigned RNA
cctgagctgtccaataaaatactcgttggccatggtagcctcccatg

SEQ ID NO: 8383 - DNA, 47 bp, Homo sapiens
  source 1..47: mol_type = unassigned DNA
cctgagctgtccaataaaatactcgttggccatggtagcctcccatg

SEQ ID NO: 8384 - DNA, 47 bp, Homo sapiens
  source 1..47: mol_type = unassigned DNA
catgggaggctaccatggccaacgagtattttattggacagctcagg

SEQ ID NO: 8385 - RNA, 31 nt, Homo sapiens
  source 1..31: mol_type = unassigned RNA
atttcagatccatggggctgcttgaccatag

SEQ ID NO: 8386 - DNA, 31 bp, Homo sapiens
  source 1..31: mol_type = unassigned DNA
atttcagatccatggggctgcttgaccatag

SEQ ID NO: 8387 - DNA, 31 bp, Homo sapiens
  source 1..31: mol_type = unassigned DNA
ctatggtcaagcagccccatggatctgaaat

SEQ ID NO: 8388 - RNA, 96 nt, Homo sapiens
  source 1..96: mol_type = unassigned RNA
atcatgatagcgattgtttttggagggattctgtacagagcggtttagtgactgttaaaaatttaaacacgttcacgttctcaagtggaaactcgc

SEQ ID NO: 8389 - DNA, 96 bp, Homo sapiens
  source 1..96: mol_type = unassigned DNA
atcatgatagcgattgtttttggagggattctgtacagagcggtttagtgactgttaaaaatttaaacacgttcacgttctcaagtggaaactcgc

SEQ ID NO: 8390 - DNA, 96 bp, Homo sapiens
  source 1..96: mol_type = unassigned DNA
gcgagtttccacttgagaacgtgaacgtgtttaaatttttaacagtcactaaaccgctctgtacagaatccctccaaaaacaatcgctatcatgat

SEQ ID NO: 8391 - RNA, 31 nt, Homo sapiens
  source 1..31: mol_type = unassigned RNA
cctgttcttcagccactgaccctgcaggtgg

SEQ ID NO: 8392 - DNA, 31 bp, Homo sapiens
  source 1..31: mol_type = unassigned DNA
cctgttcttcagccactgaccctgcaggtgg

SEQ ID NO: 8393 - DNA, 31 bp, Homo sapiens
  source 1..31: mol_type = unassigned DNA
ccacctgcagggtcagtggctgaagaacagg

SEQ ID NO: 8394 - RNA, 82 nt, Homo sapiens
  source 1..82: mol_type = unassigned RNA
ctagtaaacaatagtagaactcagacttgaaccaaacacatggcttcctaaacaatggaagattttgggccaggcatggggg

SEQ ID NO: 8395 - DNA, 82 bp, Homo sapiens
  source 1..82: mol_type = unassigned DNA
ctagtaaacaatagtagaactcagacttgaaccaaacacatggcttcctaaacaatggaagattttgggccaggcatggggg

SEQ ID NO: 8396 - DNA, 82 bp, Homo sapiens
  source 1..82: mol_type = unassigned DNA
cccccatgcctggcccaaaatcttccattgtttaggaagccatgtgtttggttcaagtctgagttctactattgtttactag

SEQ ID NO: 8397 - RNA, 30 nt, Homo sapiens
  source 1..30: mol_type = unassigned RNA
ctgaaaacagatattctggcccagggaatc

SEQ ID NO: 8398 - DNA, 30 bp, Homo sapiens
  source 1..30: mol_type = unassigned DNA
ctgaaaacagatattctggcccagggaatc

SEQ ID NO: 8399 - DNA, 30 bp, Homo sapiens
  source 1..30: mol_type = unassigned DNA
gattccctgggccagaatatctgttttcag

SEQ ID NO: 8400 - RNA, 44 nt, Homo sapiens
  source 1..44: mol_type = unassigned RNA
ttaaactgaaatagaactgctagtgtgattggttgatcagcaaa

SEQ ID NO: 8401 - DNA, 44 bp, Homo sapiens
  source 1..44: mol_type = unassigned DNA
ttaaactgaaatagaactgctagtgtgattggttgatcagcaaa

SEQ ID NO: 8402 - DNA, 44 bp, Homo sapiens
  source 1..44: mol_type = unassigned DNA
tttgctgatcaaccaatcacactagcagttctatttcagtttaa

SEQ ID NO: 8403 - RNA, 31 nt, Homo sapiens
  source 1..31: mol_type = unassigned RNA
gtgtctgactggaggctccgggacaaatgag

SEQ ID NO: 8404 - DNA, 31 bp, Homo sapiens
  source 1..31: mol_type = unassigned DNA
gtgtctgactggaggctccgggacaaatgag

SEQ ID NO: 8405 - DNA, 31 bp, Homo sapiens
  source 1..31: mol_type = unassigned DNA
ctcatttgtcccggagcctccagtcagacac

SEQ ID NO: 8406 - RNA, 24 nt, Homo sapiens
  source 1..24: mol_type = unassigned RNA
aattgcactggcagaatcactttg

SEQ ID NO: 8407 - DNA, 24 bp, Homo sapiens
  source 1..24: mol_type = unassigned DNA
aattgcactggcagaatcactttg

SEQ ID NO: 8408 - DNA, 24 bp, Homo sapiens
  source 1..24: mol_type = unassigned DNA
caaagtgattctgccagtgcaatt

SEQ ID NO: 8409 - RNA, 34 nt, Homo sapiens
  source 1..34: mol_type = unassigned RNA
acacagaactcttatctaggatgtggttctgttc

SEQ ID NO: 8410 - DNA, 34 bp, Homo sapiens
  source 1..34: mol_type = unassigned DNA
acacagaactcttatctaggatgtggttctgttc

SEQ ID NO: 8411 - DNA, 34 bp, Homo sapiens
  source 1..34: mol_type = unassigned DNA
gaacagaaccacatcctagataagagttctgtgt

SEQ ID NO: 8412 - RNA, 127 nt, Homo sapiens
  source 1..127: mol_type = unassigned RNA
tatttaagggtaaagcactaaaatgctcattgaaagctctttggatggtctagatttgttgactggtagacttccctgtagggtaattgttatctacctggacttttgttggggtacctgaaatggc

SEQ ID NO: 8413 - DNA, 127 bp, Homo sapiens
  source 1..127: mol_type = unassigned DNA
tatttaagggtaaagcactaaaatgctcattgaaagctctttggatggtctagatttgttgactggtagacttccctgtagggtaattgttatctacctggacttttgttggggtacctgaaatggc

SEQ ID NO: 8414 - DNA, 127 bp, Homo sapiens
  source 1..127: mol_type = unassigned DNA
gccatttcaggtaccccaacaaaagtccaggtagataacaattaccctacagggaagtctaccagtcaacaaatctagaccatccaaagagctttcaatgagcattttagtgctttacccttaaata

SEQ ID NO: 8415 - RNA, 31 nt, Homo sapiens
  source 1..31: mol_type = unassigned RNA
gtgacttagcaagggctctgaaatgacaaag

SEQ ID NO: 8416 - DNA, 31 bp, Homo sapiens
  source 1..31: mol_type = unassigned DNA
gtgacttagcaagggctctgaaatgacaaag

SEQ ID NO: 8417 - DNA, 31 bp, Homo sapiens
  source 1..31: mol_type = unassigned DNA
ctttgtcatttcagagcccttgctaagtcac

SEQ ID NO: 8418 - RNA, 29 nt, Homo sapiens
  source 1..29: mol_type = unassigned RNA
ctgtctctgcttgtcaaaaggcggcagcg

SEQ ID NO: 8419 - DNA, 29 bp, Homo sapiens
  source 1..29: mol_type = unassigned DNA
ctgtctctgcttgtcaaaaggcggcagcg

SEQ ID NO: 8420 - DNA, 29 bp, Homo sapiens
  source 1..29: mol_type = unassigned DNA
cgctgccgccttttgacaagcagagacag

SEQ ID NO: 8421 - RNA, 31 nt, Homo sapiens
  source 1..31: mol_type = unassigned RNA
tcccagggtatgacctctcggctgatgacat

SEQ ID NO: 8422 - DNA, 31 bp, Homo sapiens
  source 1..31: mol_type = unassigned DNA
tcccagggtatgacctctcggctgatgacat

SEQ ID NO: 8423 - DNA, 31 bp, Homo sapiens
  source 1..31: mol_type = unassigned DNA
atgtcatcagccgagaggtcataccctggga

SEQ ID NO: 8424 - RNA, 69 nt, Homo sapiens
  source 1..69: mol_type = unassigned RNA
gttttatgatgttcttcgaaggaactctcagctggctaattcagtcatgcaaactctgctctcacaggt

SEQ ID NO: 8425 - DNA, 69 bp, Homo sapiens
  source 1..69: mol_type = unassigned DNA
gttttatgatgttcttcgaaggaactctcagctggctaattcagtcatgcaaactctgctctcacaggt

SEQ ID NO: 8426 - DNA, 69 bp, Homo sapiens
  source 1..69: mol_type = unassigned DNA
acctgtgagagcagagtttgcatgactgaattagccagctgagagttccttcgaagaacatcataaaac

SEQ ID NO: 8427 - RNA, 47 nt, Homo sapiens
  source 1..47: mol_type = unassigned RNA
cccaggaattcctggctgtagtgagctatgattgtgtcactgtactt

SEQ ID NO: 8428 - DNA, 47 bp, Homo sapiens
  source 1..47: mol_type = unassigned DNA
cccaggaattcctggctgtagtgagctatgattgtgtcactgtactt

SEQ ID NO: 8429 - DNA, 47 bp, Homo sapiens
  source 1..47: mol_type = unassigned DNA
aagtacagtgacacaatcatagctcactacagccaggaattcctggg

SEQ ID NO: 8430 - RNA, 89 nt, Homo sapiens
  source 1..89: mol_type = unassigned RNA
caagctaatcaggcttcaggtgtcggaatgagcatcaggaccaggcctcaactccagtgagttccaggggtgcccaccagacctgctgg

SEQ ID NO: 8431 - DNA, 89 bp, Homo sapiens
  source 1..89: mol_type = unassigned DNA
caagctaatcaggcttcaggtgtcggaatgagcatcaggaccaggcctcaactccagtgagttccaggggtgcccaccagacctgctgg

SEQ ID NO: 8432 - DNA, 89 bp, Homo sapiens
  source 1..89: mol_type = unassigned DNA
ccagcaggtctggtgggcacccctggaactcactggagttgaggcctggtcctgatgctcattccgacacctgaagcctgattagcttg

SEQ ID NO: 8433 - RNA, 28 nt, Homo sapiens
  source 1..28: mol_type = unassigned RNA
ttgccttggaccctgacacaatgcaagc

SEQ ID NO: 8434 - DNA, 28 bp, Homo sapiens
  source 1..28: mol_type = unassigned DNA
ttgccttggaccctgacacaatgcaagc

SEQ ID NO: 8435 - DNA, 28 bp, Homo sapiens
  source 1..28: mol_type = unassigned DNA
gcttgcattgtgtcagggtccaaggcaa

SEQ ID NO: 8436 - RNA, 27 nt, Homo sapiens
  source 1..27: mol_type = unassigned RNA
agcagcaggtgctgtggtctctcaaaa

SEQ ID NO: 8437 - DNA, 27 bp, Homo sapiens
  source 1..27: mol_type = unassigned DNA
agcagcaggtgctgtggtctctcaaaa

SEQ ID NO: 8438 - DNA, 27 bp, Homo sapiens
  source 1..27: mol_type = unassigned DNA
ttttgagagaccacagcacctgctgct

SEQ ID NO: 8439 - RNA, 32 nt, Homo sapiens
  source 1..32: mol_type = unassigned RNA
aagtttaactgtgactactgaaatgacaagaa

SEQ ID NO: 8440 - DNA, 32 bp, Homo sapiens
  source 1..32: mol_type = unassigned DNA
aagtttaactgtgactactgaaatgacaagaa

SEQ ID NO: 8441 - DNA, 32 bp, Homo sapiens
  source 1..32: mol_type = unassigned DNA
ttcttgtcatttcagtagtcacagttaaactt

SEQ ID NO: 8442 - RNA, 32 nt, Homo sapiens
  source 1..32: mol_type = unassigned RNA
ctccaactggggtcctggctgcagagctgtct

SEQ ID NO: 8443 - DNA, 32 bp, Homo sapiens
  source 1..32: mol_type = unassigned DNA
ctccaactggggtcctggctgcagagctgtct

SEQ ID NO: 8444 - DNA, 32 bp, Homo sapiens
  source 1..32: mol_type = unassigned DNA
agacagctctgcagccaggaccccagttggag

SEQ ID NO: 8445 - RNA, 31 nt, Homo sapiens
  source 1..31: mol_type = unassigned RNA
tgattggaattagaccatttggcctttgaac

SEQ ID NO: 8446 - DNA, 31 bp, Homo sapiens
  source 1..31: mol_type = unassigned DNA
tgattggaattagaccatttggcctttgaac

SEQ ID NO: 8447 - DNA, 31 bp, Homo sapiens
  source 1..31: mol_type = unassigned DNA
gttcaaaggccaaatggtctaattccaatca

SEQ ID NO: 8448 - RNA, 25 nt, Homo sapiens
  source 1..25: mol_type = unassigned RNA
tcagtcattcatccggcatctgaga

SEQ ID NO: 8449 - DNA, 25 bp, Homo sapiens
  source 1..25: mol_type = unassigned DNA
tcagtcattcatccggcatctgaga

SEQ ID NO: 8450 - DNA, 25 bp, Homo sapiens
  source 1..25: mol_type = unassigned DNA
tctcagatgccggatgaatgactga

SEQ ID NO: 8451 - RNA, 33 nt, Homo sapiens
  source 1..33: mol_type = unassigned RNA
ttcaacagctgcgtcgtgacattgaggacttaa

SEQ ID NO: 8452 - DNA, 33 bp, Homo sapiens
  source 1..33: mol_type = unassigned DNA
ttcaacagctgcgtcgtgacattgaggacttaa

SEQ ID NO: 8453 - DNA, 33 bp, Homo sapiens
  source 1..33: mol_type = unassigned DNA
ttaagtcctcaatgtcacgacgcagctgttgaa

SEQ ID NO: 8454 - RNA, 151 nt, Homo sapiens
  source 1..151: mol_type = unassigned RNA
aagagtgaaatgtgaccccggaagaactttcagaggcgcaatgttgctggccctgaagatggaggaagggctgctgagccaaataaggtaggtggcctccggaagatggaaagaggattcaccccaagagcttccagaaaggaaggcaacc

SEQ ID NO: 8455 - DNA, 151 bp, Homo sapiens
  source 1..151: mol_type = unassigned DNA
aagagtgaaatgtgaccccggaagaactttcagaggcgcaatgttgctggccctgaagatggaggaagggctgctgagccaaataaggtaggtggcctccggaagatggaaagaggattcaccccaagagcttccagaaaggaaggcaacc

SEQ ID NO: 8456 - DNA, 151 bp, Homo sapiens
  source 1..151: mol_type = unassigned DNA
ggttgccttcctttctggaagctcttggggtgaatcctctttccatcttccggaggccacctaccttatttggctcagcagcccttcctccatcttcagggccagcaacattgcgcctctgaaagttcttccggggtcacatttcactctt

SEQ ID NO: 8457 - RNA, 87 nt, Homo sapiens
  source 1..87: mol_type = unassigned RNA
ggcgcattcaccacagggcttcacatctgcttgcccttcttccccttaccctgttatctctatgcagccttcttacttcagctaacc

SEQ ID NO: 8458 - DNA, 87 bp, Homo sapiens
  source 1..87: mol_type = unassigned DNA
ggcgcattcaccacagggcttcacatctgcttgcccttcttccccttaccctgttatctctatgcagccttcttacttcagctaacc

SEQ ID NO: 8459 - DNA, 87 bp, Homo sapiens
  source 1..87: mol_type = unassigned DNA
ggttagctgaagtaagaaggctgcatagagataacagggtaaggggaagaagggcaagcagatgtgaagccctgtggtgaatgcgcc

SEQ ID NO: 8460 - RNA, 62 nt, Homo sapiens
  source 1..62: mol_type = unassigned RNA
acacggagagcatcgccggggcggagctgagttctcctctgcacacacttcggagatacagc

SEQ ID NO: 8461 - DNA, 62 bp, Homo sapiens
  source 1..62: mol_type = unassigned DNA
acacggagagcatcgccggggcggagctgagttctcctctgcacacacttcggagatacagc

SEQ ID NO: 8462 - DNA, 62 bp, Homo sapiens
  source 1..62: mol_type = unassigned DNA
gctgtatctccgaagtgtgtgcagaggagaactcagctccgccccggcgatgctctccgtgt

SEQ ID NO: 8463 - RNA, 33 nt, Homo sapiens
  source 1..33: mol_type = unassigned RNA
tgataaattactgctagaatgaacttgtcaatg

SEQ ID NO: 8464 - DNA, 33 bp, Homo sapiens
  source 1..33: mol_type = unassigned DNA
tgataaattactgctagaatgaacttgtcaatg

SEQ ID NO: 8465 - DNA, 33 bp, Homo sapiens
  source 1..33: mol_type = unassigned DNA
cattgacaagttcattctagcagtaatttatca

SEQ ID NO: 8466 - RNA, 22 nt, Homo sapiens
  source 1..22: mol_type = unassigned RNA
tgaagataaatatttgacttgg

SEQ ID NO: 8467 - DNA, 22 bp, Homo sapiens
  source 1..22: mol_type = unassigned DNA
tgaagataaatatttgacttgg

SEQ ID NO: 8468 - DNA, 22 bp, Homo sapiens
  source 1..22: mol_type = unassigned DNA
ccaagtcaaatatttatcttca

SEQ ID NO: 8469 - RNA, 29 nt, Homo sapiens
  source 1..29: mol_type = unassigned RNA
tgctcactgtttggctctgcgcagagctg

SEQ ID NO: 8470 - DNA, 29 bp, Homo sapiens
  source 1..29: mol_type = unassigned DNA
tgctcactgtttggctctgcgcagagctg

SEQ ID NO: 8471 - DNA, 29 bp, Homo sapiens
  source 1..29: mol_type = unassigned DNA
cagctctgcgcagagccaaacagtgagca

SEQ ID NO: 8472 - RNA, 29 nt, Homo sapiens
  source 1..29: mol_type = unassigned RNA
ggagcctgtttggagaaaagtagacaggg

SEQ ID NO: 8473 - DNA, 29 bp, Homo sapiens
  source 1..29: mol_type = unassigned DNA
ggagcctgtttggagaaaagtagacaggg

SEQ ID NO: 8474 - DNA, 29 bp, Homo sapiens
  source 1..29: mol_type = unassigned DNA
ccctgtctacttttctccaaacaggctcc

SEQ ID NO: 8475 - RNA, 30 nt, Homo sapiens
  source 1..30: mol_type = unassigned RNA
tcgcctggatggtggtgtcggatcagccca

SEQ ID NO: 8476 - DNA, 30 bp, Homo sapiens
  source 1..30: mol_type = unassigned DNA
tcgcctggatggtggtgtcggatcagccca

SEQ ID NO: 8477 - DNA, 30 bp, Homo sapiens
  source 1..30: mol_type = unassigned DNA
tgggctgatccgacaccaccatccaggcga

SEQ ID NO: 8478 - RNA, 37 nt, Homo sapiens
  source 1..37: mol_type = unassigned RNA
tttgaaagccagctgatctgtggagccttgttaaggg

SEQ ID NO: 8479 - DNA, 37 bp, Homo sapiens
  source 1..37: mol_type = unassigned DNA
tttgaaagccagctgatctgtggagccttgttaaggg

SEQ ID NO: 8480 - DNA, 37 bp, Homo sapiens
  source 1..37: mol_type = unassigned DNA
cccttaacaaggctccacagatcagctggctttcaaa

SEQ ID NO: 8481 - RNA, 30 nt, Homo sapiens
  source 1..30: mol_type = unassigned RNA
cagcctctgcggactgagaatcgagagccc

SEQ ID NO: 8482 - DNA, 30 bp, Homo sapiens
  source 1..30: mol_type = unassigned DNA
cagcctctgcggactgagaatcgagagccc

SEQ ID NO: 8483 - DNA, 30 bp, Homo sapiens
  source 1..30: mol_type = unassigned DNA
gggctctcgattctcagtccgcagaggctg

SEQ ID NO: 8484 - RNA, 30 nt, Homo sapiens
  source 1..30: mol_type = unassigned RNA
agagctgaagatcaagcgcctgagaaataa

SEQ ID NO: 8485 - DNA, 30 bp, Homo sapiens
  source 1..30: mol_type = unassigned DNA
agagctgaagatcaagcgcctgagaaataa

SEQ ID NO: 8486 - DNA, 30 bp, Homo sapiens
  source 1..30: mol_type = unassigned DNA
ttatttctcaggcgcttgatcttcagctct

SEQ ID NO: 8487 - RNA, 72 nt, Homo sapiens
  source 1..72: mol_type = unassigned RNA
atggggtggataatctgtactttcctcctgcaagagcagtggtggatttcactgttgggggcacacaaaggt

SEQ ID NO: 8488 - DNA, 72 bp, Homo sapiens
  source 1..72: mol_type = unassigned DNA
atggggtggataatctgtactttcctcctgcaagagcagtggtggatttcactgttgggggcacacaaaggt

SEQ ID NO: 8489 - DNA, 72 bp, Homo sapiens
  source 1..72: mol_type = unassigned DNA
acctttgtgtgcccccaacagtgaaatccaccactgctcttgcaggaggaaagtacagattatccaccccat

SEQ ID NO: 8490 - RNA, 44 nt, Homo sapiens
  source 1..44: mol_type = unassigned RNA
ccaaattaagatggtaagacctctgagaccaaatttttgtcctc

SEQ ID NO: 8491 - DNA, 44 bp, Homo sapiens
  source 1..44: mol_type = unassigned DNA
ccaaattaagatggtaagacctctgagaccaaatttttgtcctc

SEQ ID NO: 8492 - DNA, 44 bp, Homo sapiens
  source 1..44: mol_type = unassigned DNA
gaggacaaaaatttggtctcagaggtcttaccatcttaatttgg

SEQ ID NO: 8493 - RNA, 30 nt, Homo sapiens
  source 1..30: mol_type = unassigned RNA
ccaactgttggaagctctgaaaataaaaga

SEQ ID NO: 8494 - DNA, 30 bp, Homo sapiens
  source 1..30: mol_type = unassigned DNA
ccaactgttggaagctctgaaaataaaaga

SEQ ID NO: 8495 - DNA, 30 bp, Homo sapiens
  source 1..30: mol_type = unassigned DNA
tcttttattttcagagcttccaacagttgg

SEQ ID NO: 8496 - RNA, 25 nt, Homo sapiens
  source 1..25: mol_type = unassigned RNA
ccaaggcctgagttctggacctacc

SEQ ID NO: 8497 - DNA, 25 bp, Homo sapiens
  source 1..25: mol_type = unassigned DNA
ccaaggcctgagttctggacctacc

SEQ ID NO: 8498 - DNA, 25 bp, Homo sapiens
  source 1..25: mol_type = unassigned DNA
ggtaggtccagaactcaggccttgg

SEQ ID NO: 8499 - RNA, 70 nt, Homo sapiens
  source 1..70: mol_type = unassigned RNA
tcctctgccaggcatccatgtggcttatctaaccatgccattcaggtccctgttcagatatcgccaagca

SEQ ID NO: 8500 - DNA, 70 bp, Homo sapiens
  source 1..70: mol_type = unassigned DNA
tcctctgccaggcatccatgtggcttatctaaccatgccattcaggtccctgttcagatatcgccaagca

SEQ ID NO: 8501 - DNA, 70 bp, Homo sapiens
  source 1..70: mol_type = unassigned DNA
tgcttggcgatatctgaacagggacctgaatggcatggttagataagccacatggatgcctggcagagga

SEQ ID NO: 8502 - RNA, 31 nt, Homo sapiens
  source 1..31: mol_type = unassigned RNA
tttgaccccagtgcgcgggaccaggtgacct

SEQ ID NO: 8503 - DNA, 31 bp, Homo sapiens
  source 1..31: mol_type = unassigned DNA
tttgaccccagtgcgcgggaccaggtgacct

SEQ ID NO: 8504 - DNA, 31 bp, Homo sapiens
  source 1..31: mol_type = unassigned DNA
aggtcacctggtcccgcgcactggggtcaaa

SEQ ID NO: 8505 - RNA, 30 nt, Homo sapiens
  source 1..30: mol_type = unassigned RNA
atctatactaccaaaactctgtacagtgac

SEQ ID NO: 8506 - DNA, 30 bp, Homo sapiens
  source 1..30: mol_type = unassigned DNA
atctatactaccaaaactctgtacagtgac

SEQ ID NO: 8507 - DNA, 30 bp, Homo sapiens
  source 1..30: mol_type = unassigned DNA
gtcactgtacagagttttggtagtatagat

SEQ ID NO: 8508 - RNA, 101 nt, Homo sapiens
  source 1..101: mol_type = unassigned RNA
tagtgtggtcctggcaacattcacccctgggctgctcagatctgtacctcttctgcctgagggagagacagacttataggtcggaatcacaggacacgatt

SEQ ID NO: 8509 - DNA, 101 bp, Homo sapiens
  source 1..101: mol_type = unassigned DNA
tagtgtggtcctggcaacattcacccctgggctgctcagatctgtacctcttctgcctgagggagagacagacttataggtcggaatcacaggacacgatt

SEQ ID NO: 8510 - DNA, 101 bp, Homo sapiens
  source 1..101: mol_type = unassigned DNA
aatcgtgtcctgtgattccgacctataagtctgtctctccctcaggcagaagaggtacagatctgagcagcccaggggtgaatgttgccaggaccacacta

SEQ ID NO: 8511 - RNA, 30 nt, Homo sapiens
  source 1..30: mol_type = unassigned RNA
ccgggatgcctgctcccgcgtcctgccctg

SEQ ID NO: 8512 - DNA, 30 bp, Homo sapiens
  source 1..30: mol_type = unassigned DNA
ccgggatgcctgctcccgcgtcctgccctg

SEQ ID NO: 8513 - DNA, 30 bp, Homo sapiens
  source 1..30: mol_type = unassigned DNA
cagggcaggacgcgggagcaggcatcccgg

SEQ ID NO: 8514 - RNA, 27 nt, Homo sapiens
  source 1..27: mol_type = unassigned RNA
cccgcacagattgagccgagttgtcgc

SEQ ID NO: 8515 - DNA, 27 bp, Homo sapiens
  source 1..27: mol_type = unassigned DNA
cccgcacagattgagccgagttgtcgc

SEQ ID NO: 8516 - DNA, 27 bp, Homo sapiens
  source 1..27: mol_type = unassigned DNA
gcgacaactcggctcaatctgtgcggg

SEQ ID NO: 8517 - RNA, 26 nt, Homo sapiens
  source 1..26: mol_type = unassigned RNA
ctctgctctggctccggcaggcacag

SEQ ID NO: 8518 - DNA, 26 bp, Homo sapiens
  source 1..26: mol_type = unassigned DNA
ctctgctctggctccggcaggcacag

SEQ ID NO: 8519 - DNA, 26 bp, Homo sapiens
  source 1..26: mol_type = unassigned DNA
ctgtgcctgccggagccagagcagag

SEQ ID NO: 8520 - RNA, 27 nt, Homo sapiens
  source 1..27: mol_type = unassigned RNA
gtgtggcggccgagcacatgggcccgc

SEQ ID NO: 8521 - DNA, 27 bp, Homo sapiens
  source 1..27: mol_type = unassigned DNA
gtgtggcggccgagcacatgggcccgc

SEQ ID NO: 8522 - DNA, 27 bp, Homo sapiens
  source 1..27: mol_type = unassigned DNA
gcgggcccatgtgctcggccgccacac

SEQ ID NO: 8523 - RNA, 30 nt, Homo sapiens
  source 1..30: mol_type = unassigned RNA
aaaagtccttggccagggcgcggcgtggca

SEQ ID NO: 8524 - DNA, 30 bp, Homo sapiens
  source 1..30: mol_type = unassigned DNA
aaaagtccttggccagggcgcggcgtggca

SEQ ID NO: 8525 - DNA, 30 bp, Homo sapiens
  source 1..30: mol_type = unassigned DNA
tgccacgccgcgccctggccaaggactttt

SEQ ID NO: 8526 - RNA, 48 nt, Homo sapiens
  source 1..48: mol_type = unassigned RNA
cagcagaagggtcaagtgacagtgatggagacatctcagggcaactag

SEQ ID NO: 8527 - DNA, 48 bp, Homo sapiens
  source 1..48: mol_type = unassigned DNA
cagcagaagggtcaagtgacagtgatggagacatctcagggcaactag

SEQ ID NO: 8528 - DNA, 48 bp, Homo sapiens
  source 1..48: mol_type = unassigned DNA
ctagttgccctgagatgtctccatcactgtcacttgacccttctgctg

SEQ ID NO: 8529 - RNA, 68 nt, Homo sapiens
  source 1..68: mol_type = unassigned RNA
ttttaggtaattgttttaaaggatttgtgatgatcaatttgaacgtctgaaattcagtaatatttaac

SEQ ID NO: 8530 - DNA, 68 bp, Homo sapiens
  source 1..68: mol_type = unassigned DNA
ttttaggtaattgttttaaaggatttgtgatgatcaatttgaacgtctgaaattcagtaatatttaac

SEQ ID NO: 8531 - DNA, 68 bp, Homo sapiens
  source 1..68: mol_type = unassigned DNA
gttaaatattactgaatttcagacgttcaaattgatcatcacaaatcctttaaaacaattacctaaaa

SEQ ID NO: 8532 - RNA, 32 nt, Homo sapiens
  source 1..32: mol_type = unassigned RNA
gcaccacttgtggcttttgaatatcttccaca

SEQ ID NO: 8533 - DNA, 32 bp, Homo sapiens
  source 1..32: mol_type = unassigned DNA
gcaccacttgtggcttttgaatatcttccaca

SEQ ID NO: 8534 - DNA, 32 bp, Homo sapiens
  source 1..32: mol_type = unassigned DNA
tgtggaagatattcaaaagccacaagtggtgc

SEQ ID NO: 8535 - RNA, 83 nt, Homo sapiens
  source 1..83: mol_type = unassigned RNA
ctccctctttcctaaaccaaatccccagatcctagaaatccagcccttctgccctccggaggcgcctttcccaacgtaaagta

SEQ ID NO: 8536 - DNA, 83 bp, Homo sapiens
  source 1..83: mol_type = unassigned DNA
ctccctctttcctaaaccaaatccccagatcctagaaatccagcccttctgccctccggaggcgcctttcccaacgtaaagta

SEQ ID NO: 8537 - DNA, 83 bp, Homo sapiens
  source 1..83: mol_type = unassigned DNA
tactttacgttgggaaaggcgcctccggagggcagaagggctggatttctaggatctggggatttggtttaggaaagagggag

SEQ ID NO: 8538 - RNA, 23 nt, Homo sapiens
  source 1..23: mol_type = unassigned RNA
aagcattggacttactacaccaa

SEQ ID NO: 8539 - DNA, 23 bp, Homo sapiens
  source 1..23: mol_type = unassigned DNA
aagcattggacttactacaccaa

SEQ ID NO: 8540 - DNA, 23 bp, Homo sapiens
  source 1..23: mol_type = unassigned DNA
ttggtgtagtaagtccaatgctt

SEQ ID NO: 8541 - RNA, 166 nt, Homo sapiens
  source 1..166: mol_type = unassigned RNA
ctggagtctgtgcttgtgactcactcggaccaacacaatgcagcaaaggtgatgtgtgccacgcctgagcctgggcttgaaaggtcttgcgtcttctgcttggtctcttgaaaccctgctgccaccaggtgaacaagcccaagctaacctactgggtgatcagaga

SEQ ID NO: 8542 - DNA, 166 bp, Homo sapiens
  source 1..166: mol_type = unassigned DNA
ctggagtctgtgcttgtgactcactcggaccaacacaatgcagcaaaggtgatgtgtgccacgcctgagcctgggcttgaaaggtcttgcgtcttctgcttggtctcttgaaaccctgctgccaccaggtgaacaagcccaagctaacctactgggtgatcagaga

SEQ ID NO: 8543 - DNA, 166 bp, Homo sapiens
  source 1..166: mol_type = unassigned DNA
tctctgatcacccagtaggttagcttgggcttgttcacctggtggcagcagggtttcaagagaccaagcagaagacgcaagacctttcaagcccaggctcaggcgtggcacacatcacctttgctgcattgtgttggtccgagtgagtcacaagcacagactccag

SEQ ID NO: 8544 - RNA, 30 nt, Homo sapiens
  source 1..30: mol_type = unassigned RNA
agtaattagaacttctggaatatgctaggg

SEQ ID NO: 8545 - DNA, 30 bp, Homo sapiens
  source 1..30: mol_type = unassigned DNA
agtaattagaacttctggaatatgctaggg

SEQ ID NO: 8546 - DNA, 30 bp, Homo sapiens
  source 1..30: mol_type = unassigned DNA
ccctagcatattccagaagttctaattact

SEQ ID NO: 8547 - RNA, 31 nt, Homo sapiens
  source 1..31: mol_type = unassigned RNA
tcacacgcatcgccaaggacatggaggacag

SEQ ID NO: 8548 - DNA, 31 bp, Homo sapiens
  source 1..31: mol_type = unassigned DNA
tcacacgcatcgccaaggacatggaggacag

SEQ ID NO: 8549 - DNA, 31 bp, Homo sapiens
  source 1..31: mol_type = unassigned DNA
ctgtcctccatgtccttggcgatgcgtgtga

SEQ ID NO: 8550 - RNA, 74 nt, Homo sapiens
  source 1..74: mol_type = unassigned RNA
ttctttactgagagtgtagaaatcaacaatgactgtagcttctcttgaaagaatccactggtatatttcacttc

SEQ ID NO: 8551 - DNA, 74 bp, Homo sapiens
  source 1..74: mol_type = unassigned DNA
ttctttactgagagtgtagaaatcaacaatgactgtagcttctcttgaaagaatccactggtatatttcacttc

SEQ ID NO: 8552 - DNA, 74 bp, Homo sapiens
  source 1..74: mol_type = unassigned DNA
gaagtgaaatataccagtggattctttcaagagaagctacagtcattgttgatttctacactctcagtaaagaa

SEQ ID NO: 8553 - RNA, 58 nt, Homo sapiens
  source 1..58: mol_type = unassigned RNA
tgtcagggcgtggctgtcccaggccaggtgagtcccgggaccaggcctgtggagaggg

SEQ ID NO: 8554 - DNA, 58 bp, Homo sapiens
  source 1..58: mol_type = unassigned DNA
tgtcagggcgtggctgtcccaggccaggtgagtcccgggaccaggcctgtggagaggg

SEQ ID NO: 8555 - DNA, 58 bp, Homo sapiens
  source 1..58: mol_type = unassigned DNA
ccctctccacaggcctggtcccgggactcacctggcctgggacagccacgccctgaca

SEQ ID NO: 8556 - RNA, 31 nt, Homo sapiens
  source 1..31: mol_type = unassigned RNA
tattttacaaaccaggtcagtgtaggccaag

SEQ ID NO: 8557 - DNA, 31 bp, Homo sapiens
  source 1..31: mol_type = unassigned DNA
tattttacaaaccaggtcagtgtaggccaag

SEQ ID NO: 8558 - DNA, 31 bp, Homo sapiens
  source 1..31: mol_type = unassigned DNA
cttggcctacactgacctggtttgtaaaata

SEQ ID NO: 8559 - RNA, 31 nt, Homo sapiens
  source 1..31: mol_type = unassigned RNA
gaagcatatgaactctgcaggagtcctggcc

SEQ ID NO: 8560 - DNA, 31 bp, Homo sapiens
  source 1..31: mol_type = unassigned DNA
gaagcatatgaactctgcaggagtcctggcc

SEQ ID NO: 8561 - DNA, 31 bp, Homo sapiens
  source 1..31: mol_type = unassigned DNA
ggccaggactcctgcagagttcatatgcttc

SEQ ID NO: 8562 - RNA, 38 nt, Homo sapiens
  source 1..38: mol_type = unassigned RNA
gtctgtgctagggctaattttctagcacagtgttggag

SEQ ID NO: 8563 - DNA, 38 bp, Homo sapiens
  source 1..38: mol_type = unassigned DNA
gtctgtgctagggctaattttctagcacagtgttggag

SEQ ID NO: 8564 - DNA, 38 bp, Homo sapiens
  source 1..38: mol_type = unassigned DNA
ctccaacactgtgctagaaaattagccctagcacagac

SEQ ID NO: 8565 - RNA, 29 nt, Homo sapiens
  source 1..29: mol_type = unassigned RNA
gccttctgtttgtacaaggtcccagcact

SEQ ID NO: 8566 - DNA, 29 bp, Homo sapiens
  source 1..29: mol_type = unassigned DNA
gccttctgtttgtacaaggtcccagcact

SEQ ID NO: 8567 - DNA, 29 bp, Homo sapiens
  source 1..29: mol_type = unassigned DNA
agtgctgggaccttgtacaaacagaaggc

SEQ ID NO: 8568 - RNA, 32 nt, Homo sapiens
  source 1..32: mol_type = unassigned RNA
ttaaaggtttctggccagaggaattggggtct

SEQ ID NO: 8569 - DNA, 32 bp, Homo sapiens
  source 1..32: mol_type = unassigned DNA
ttaaaggtttctggccagaggaattggggtct

SEQ ID NO: 8570 - DNA, 32 bp, Homo sapiens
  source 1..32: mol_type = unassigned DNA
agaccccaattcctctggccagaaacctttaa

SEQ ID NO: 8571 - RNA, 149 nt, Homo sapiens
  source 1..149: mol_type = unassigned RNA
actcgtcctccaggtctgacccgcctccagcccgaggccaccaaaagacacacctcccttcccccaacccgccacagccggctctacaggtaacaggcgtttcttctcgcgcagtttgaacaaaaacaatccagaaggaacagatttgg

SEQ ID NO: 8572 - DNA, 149 bp, Homo sapiens
  source 1..149: mol_type = unassigned DNA
actcgtcctccaggtctgacccgcctccagcccgaggccaccaaaagacacacctcccttcccccaacccgccacagccggctctacaggtaacaggcgtttcttctcgcgcagtttgaacaaaaacaatccagaaggaacagatttgg

SEQ ID NO: 8573 - DNA, 149 bp, Homo sapiens
  source 1..149: mol_type = unassigned DNA
ccaaatctgttccttctggattgtttttgttcaaactgcgcgagaagaaacgcctgttacctgtagagccggctgtggcgggttgggggaagggaggtgtgtcttttggtggcctcgggctggaggcgggtcagacctggaggacgagt

SEQ ID NO: 8574 - RNA, 30 nt, Homo sapiens
  source 1..30: mol_type = unassigned RNA
aagtctgcacttcccaggtccccggcgctt

SEQ ID NO: 8575 - DNA, 30 bp, Homo sapiens
  source 1..30: mol_type = unassigned DNA
aagtctgcacttcccaggtccccggcgctt

SEQ ID NO: 8576 - DNA, 30 bp, Homo sapiens
  source 1..30: mol_type = unassigned DNA
aagcgccggggacctgggaagtgcagactt

SEQ ID NO: 8577 - RNA, 83 nt, Homo sapiens
  source 1..83: mol_type = unassigned RNA
tcctgatcgcctcttgggattttgtttcaggactccttactcatacatgcatcaagggagctctgcagagctgcacagttggt

SEQ ID NO: 8578 - DNA, 83 bp, Homo sapiens
  source 1..83: mol_type = unassigned DNA
tcctgatcgcctcttgggattttgtttcaggactccttactcatacatgcatcaagggagctctgcagagctgcacagttggt

SEQ ID NO: 8579 - DNA, 83 bp, Homo sapiens
  source 1..83: mol_type = unassigned DNA
accaactgtgcagctctgcagagctcccttgatgcatgtatgagtaaggagtcctgaaacaaaatcccaagaggcgatcagga

SEQ ID NO: 8580 - RNA, 39 nt, Homo sapiens
  source 1..39: mol_type = unassigned RNA
attttgcaacgtagaacttacaaatgaccatatgtttct

SEQ ID NO: 8581 - DNA, 39 bp, Homo sapiens
  source 1..39: mol_type = unassigned DNA
attttgcaacgtagaacttacaaatgaccatatgtttct

SEQ ID NO: 8582 - DNA, 39 bp, Homo sapiens
  source 1..39: mol_type = unassigned DNA
agaaacatatggtcatttgtaagttctacgttgcaaaat

SEQ ID NO: 8583 - RNA, 30 nt, Homo sapiens
  source 1..30: mol_type = unassigned RNA
tgggcccgtgactgtgggagcggggccggg

SEQ ID NO: 8584 - DNA, 30 bp, Homo sapiens
  source 1..30: mol_type = unassigned DNA
tgggcccgtgactgtgggagcggggccggg

SEQ ID NO: 8585 - DNA, 30 bp, Homo sapiens
  source 1..30: mol_type = unassigned DNA
cccggccccgctcccacagtcacgggccca

SEQ ID NO: 8586 - RNA, 24 nt, Homo sapiens
  source 1..24: mol_type = unassigned RNA
tgaggttattagtttgtatcctat

SEQ ID NO: 8587 - DNA, 24 bp, Homo sapiens
  source 1..24: mol_type = unassigned DNA
tgaggttattagtttgtatcctat

SEQ ID NO: 8588 - DNA, 24 bp, Homo sapiens
  source 1..24: mol_type = unassigned DNA
ataggatacaaactaataacctca

SEQ ID NO: 8589 - RNA, 61 nt, Homo sapiens
  source 1..61: mol_type = unassigned RNA
cacggagagcatcgccggggcggagctgagttctcctctgcacacacttcggagatacagc

SEQ ID NO: 8590 - DNA, 61 bp, Homo sapiens
  source 1..61: mol_type = unassigned DNA
cacggagagcatcgccggggcggagctgagttctcctctgcacacacttcggagatacagc

SEQ ID NO: 8591 - DNA, 61 bp, Homo sapiens
  source 1..61: mol_type = unassigned DNA
gctgtatctccgaagtgtgtgcagaggagaactcagctccgccccggcgatgctctccgtg

SEQ ID NO: 8592 - RNA, 28 nt, Homo sapiens
  source 1..28: mol_type = unassigned RNA
agtttaaagagaggctgactgtggggtt

SEQ ID NO: 8593 - DNA, 28 bp, Homo sapiens
  source 1..28: mol_type = unassigned DNA
agtttaaagagaggctgactgtggggtt

SEQ ID NO: 8594 - DNA, 28 bp, Homo sapiens
  source 1..28: mol_type = unassigned DNA
aaccccacagtcagcctctctttaaact

SEQ ID NO: 8595 - RNA, 100 nt, Homo sapiens
  source 1..100: mol_type = unassigned RNA
tttctctttcagctgccccaacacagcaggatctcactggactctgatgatggagtgtccaggctgggcagtgctggctccaaggtgattcctgctacag

SEQ ID NO: 8596 - DNA, 100 bp, Homo sapiens
  source 1..100: mol_type = unassigned DNA
tttctctttcagctgccccaacacagcaggatctcactggactctgatgatggagtgtccaggctgggcagtgctggctccaaggtgattcctgctacag

SEQ ID NO: 8597 - DNA, 100 bp, Homo sapiens
  source 1..100: mol_type = unassigned DNA
ctgtagcaggaatcaccttggagccagcactgcccagcctggacactccatcatcagagtccagtgagatcctgctgtgttggggcagctgaaagagaaa

SEQ ID NO: 8598 - RNA, 40 nt, Homo sapiens
  source 1..40: mol_type = unassigned RNA
cccttcattgtaccaatgatgaaaatgtggctgagacatt

SEQ ID NO: 8599 - DNA, 40 bp, Homo sapiens
  source 1..40: mol_type = unassigned DNA
cccttcattgtaccaatgatgaaaatgtggctgagacatt

SEQ ID NO: 8600 - DNA, 40 bp, Homo sapiens
  source 1..40: mol_type = unassigned DNA
aatgtctcagccacattttcatcattggtacaatgaaggg

SEQ ID NO: 8601 - RNA, 27 nt, Homo sapiens
  source 1..27: mol_type = unassigned RNA
cccccccccccccccccccggggaaaa

SEQ ID NO: 8602 - DNA, 27 bp, Homo sapiens
  source 1..27: mol_type = unassigned DNA
ttttccccggggggggggggggggggg

SEQ ID NO: 8603 - RNA, 32 nt, Homo sapiens
  source 1..32: mol_type = unassigned RNA
attaggttttccagagagaggctgttagcctg

SEQ ID NO: 8604 - DNA, 32 bp, Homo sapiens
  source 1..32: mol_type = unassigned DNA
attaggttttccagagagaggctgttagcctg

SEQ ID NO: 8605 - DNA, 32 bp, Homo sapiens
  source 1..32: mol_type = unassigned DNA
caggctaacagcctctctctggaaaacctaat

SEQ ID NO: 8606 - RNA, 25 nt, Homo sapiens
  source 1..25: mol_type = unassigned RNA
gacatccgtcattgctgctgctacc

SEQ ID NO: 8607 - DNA, 25 bp, Homo sapiens
  source 1..25: mol_type = unassigned DNA
gacatccgtcattgctgctgctacc

SEQ ID NO: 8608 - DNA, 25 bp, Homo sapiens
  source 1..25: mol_type = unassigned DNA
ggtagcagcagcaatgacggatgtc

SEQ ID NO: 8609 - RNA, 111 nt, Homo sapiens
  source 1..111: mol_type = unassigned RNA
ctgccactttgactcagcacagatgagatgtaactcagtgcaggtgggatggcagtggtagaatttgcactcttactgccagaaatgctggggatagtgggaaggagaaga

SEQ ID NO: 8610 - DNA, 111 bp, Homo sapiens
  source 1..111: mol_type = unassigned DNA
ctgccactttgactcagcacagatgagatgtaactcagtgcaggtgggatggcagtggtagaatttgcactcttactgccagaaatgctggggatagtgggaaggagaaga

SEQ ID NO: 8611 - DNA, 111 bp, Homo sapiens
  source 1..111: mol_type = unassigned DNA
tcttctccttcccactatccccagcatttctggcagtaagagtgcaaattctaccactgccatcccacctgcactgagttacatctcatctgtgctgagtcaaagtggcag

SEQ ID NO: 8612 - RNA, 30 nt, Homo sapiens
  source 1..30: mol_type = unassigned RNA
tgacaacagttggccgattagaaggcagac

SEQ ID NO: 8613 - DNA, 30 bp, Homo sapiens
  source 1..30: mol_type = unassigned DNA
tgacaacagttggccgattagaaggcagac

SEQ ID NO: 8614 - DNA, 30 bp, Homo sapiens
  source 1..30: mol_type = unassigned DNA
gtctgccttctaatcggccaactgttgtca

SEQ ID NO: 8615 - RNA, 32 nt, Homo sapiens
  source 1..32: mol_type = unassigned RNA
gaaaagaattgtggcaatgacagaactaaaaa

SEQ ID NO: 8616 - DNA, 32 bp, Homo sapiens
  source 1..32: mol_type = unassigned DNA
gaaaagaattgtggcaatgacagaactaaaaa

SEQ ID NO: 8617 - DNA, 32 bp, Homo sapiens
  source 1..32: mol_type = unassigned DNA
tttttagttctgtcattgccacaattcttttc

SEQ ID NO: 8618 - RNA, 27 nt, Homo sapiens
  source 1..27: mol_type = unassigned RNA
tgaagaaattttggatcttctatgccc

SEQ ID NO: 8619 - DNA, 27 bp, Homo sapiens
  source 1..27: mol_type = unassigned DNA
tgaagaaattttggatcttctatgccc

SEQ ID NO: 8620 - DNA, 27 bp, Homo sapiens
  source 1..27: mol_type = unassigned DNA
gggcatagaagatccaaaatttcttca

SEQ ID NO: 8621 - RNA, 37 nt, Homo sapiens
  source 1..37: mol_type = unassigned RNA
ttaacaatggcactctgaggctcagaggggtctgcca

SEQ ID NO: 8622 - DNA, 37 bp, Homo sapiens
  source 1..37: mol_type = unassigned DNA
ttaacaatggcactctgaggctcagaggggtctgcca

SEQ ID NO: 8623 - DNA, 37 bp, Homo sapiens
  source 1..37: mol_type = unassigned DNA
tggcagacccctctgagcctcagagtgccattgttaa

SEQ ID NO: 8624 - RNA, 27 nt, Homo sapiens
  source 1..27: mol_type = unassigned RNA
gccctacttattagattgtatccttta

SEQ ID NO: 8625 - DNA, 27 bp, Homo sapiens
  source 1..27: mol_type = unassigned DNA
gccctacttattagattgtatccttta

SEQ ID NO: 8626 - DNA, 27 bp, Homo sapiens
  source 1..27: mol_type = unassigned DNA
taaaggatacaatctaataagtagggc

SEQ ID NO: 8627 - RNA, 29 nt, Homo sapiens
  source 1..29: mol_type = unassigned RNA
gggccctgagaaccctgaagagccctact

SEQ ID NO: 8628 - DNA, 29 bp, Homo sapiens
  source 1..29: mol_type = unassigned DNA
gggccctgagaaccctgaagagccctact

SEQ ID NO: 8629 - DNA, 29 bp, Homo sapiens
  source 1..29: mol_type = unassigned DNA
agtagggctcttcagggttctcagggccc

SEQ ID NO: 8630 - RNA, 83 nt, Homo sapiens
  source 1..83: mol_type = unassigned RNA
tgaatctggttccattttatcaggtatcagctttgacaagactgatgaatcactggattgcgactcttctttggtgaagactt

SEQ ID NO: 8631 - DNA, 83 bp, Homo sapiens
  source 1..83: mol_type = unassigned DNA
tgaatctggttccattttatcaggtatcagctttgacaagactgatgaatcactggattgcgactcttctttggtgaagactt

SEQ ID NO: 8632 - DNA, 83 bp, Homo sapiens
  source 1..83: mol_type = unassigned DNA
aagtcttcaccaaagaagagtcgcaatccagtgattcatcagtcttgtcaaagctgatacctgataaaatggaaccagattca

SEQ ID NO: 8633 - RNA, 30 nt, Homo sapiens
  source 1..30: mol_type = unassigned RNA
gatccctgaggaggtcgccagggcgctgtc

SEQ ID NO: 8634 - DNA, 30 bp, Homo sapiens
  source 1..30: mol_type = unassigned DNA
gatccctgaggaggtcgccagggcgctgtc

SEQ ID NO: 8635 - DNA, 30 bp, Homo sapiens
  source 1..30: mol_type = unassigned DNA
gacagcgccctggcgacctcctcagggatc

SEQ ID NO: 8636 - RNA, 31 nt, Homo sapiens
  source 1..31: mol_type = unassigned RNA
tggactacagattagaggataataaagaaca

SEQ ID NO: 8637 - DNA, 31 bp, Homo sapiens
  source 1..31: mol_type = unassigned DNA
tggactacagattagaggataataaagaaca

SEQ ID NO: 8638 - DNA, 31 bp, Homo sapiens
  source 1..31: mol_type = unassigned DNA
tgttctttattatcctctaatctgtagtcca

SEQ ID NO: 8639 - RNA, 36 nt, Homo sapiens
  source 1..36: mol_type = unassigned RNA
aagagctgtgggtaaattaactgaacttaatcatgt

SEQ ID NO: 8640 - DNA, 36 bp, Homo sapiens
  source 1..36: mol_type = unassigned DNA
aagagctgtgggtaaattaactgaacttaatcatgt

SEQ ID NO: 8641 - DNA, 36 bp, Homo sapiens
  source 1..36: mol_type = unassigned DNA
acatgattaagttcagttaatttacccacagctctt

SEQ ID NO: 8642 - RNA, 33 nt, Homo sapiens
  source 1..33: mol_type = unassigned RNA
cctccagctggtcccagagcccggcttggtccg

SEQ ID NO: 8643 - DNA, 33 bp, Homo sapiens
  source 1..33: mol_type = unassigned DNA
cctccagctggtcccagagcccggcttggtccg

SEQ ID NO: 8644 - DNA, 33 bp, Homo sapiens
  source 1..33: mol_type = unassigned DNA
cggaccaagccgggctctgggaccagctggagg

SEQ ID NO: 8645 - RNA, 31 nt, Homo sapiens
  source 1..31: mol_type = unassigned RNA
aaaccaagttgggattgcagaacagagaaga

SEQ ID NO: 8646 - DNA, 31 bp, Homo sapiens
  source 1..31: mol_type = unassigned DNA
aaaccaagttgggattgcagaacagagaaga

SEQ ID NO: 8647 - DNA, 31 bp, Homo sapiens
  source 1..31: mol_type = unassigned DNA
tcttctctgttctgcaatcccaacttggttt

SEQ ID NO: 8648 - RNA, 138 nt, Homo sapiens
  source 1..138: mol_type = unassigned RNA
agactactaattattgtctttctctacagattgaagtaggactggttgttggaaacagtcaagttgcatttgaaaaagcagaaaattcgtcacttaatcttattggtaagatttacagtttttagaagatttgaaatg

SEQ ID NO: 8649 - DNA, 138 bp, Homo sapiens
  source 1..138: mol_type = unassigned DNA
agactactaattattgtctttctctacagattgaagtaggactggttgttggaaacagtcaagttgcatttgaaaaagcagaaaattcgtcacttaatcttattggtaagatttacagtttttagaagatttgaaatg

SEQ ID NO: 8650 - DNA, 138 bp, Homo sapiens
  source 1..138: mol_type = unassigned DNA
catttcaaatcttctaaaaactgtaaatcttaccaataagattaagtgacgaattttctgctttttcaaatgcaacttgactgtttccaacaaccagtcctacttcaatctgtagagaaagacaataattagtagtct

SEQ ID NO: 8651 - RNA, 33 nt, Homo sapiens
  source 1..33: mol_type = unassigned RNA
tgtgaacaatgggaacctgagctgagcaggtaa

SEQ ID NO: 8652 - DNA, 33 bp, Homo sapiens
  source 1..33: mol_type = unassigned DNA
tgtgaacaatgggaacctgagctgagcaggtaa

SEQ ID NO: 8653 - DNA, 33 bp, Homo sapiens
  source 1..33: mol_type = unassigned DNA
ttacctgctcagctcaggttcccattgttcaca

SEQ ID NO: 8654 - RNA, 31 nt, Homo sapiens
  source 1..31: mol_type = unassigned RNA
cagctctcgacaggtagaattcacttttagc

SEQ ID NO: 8655 - DNA, 31 bp, Homo sapiens
  source 1..31: mol_type = unassigned DNA
cagctctcgacaggtagaattcacttttagc

SEQ ID NO: 8656 - DNA, 31 bp, Homo sapiens
  source 1..31: mol_type = unassigned DNA
gctaaaagtgaattctacctgtcgagagctg

SEQ ID NO: 8657 - RNA, 34 nt, Homo sapiens
  source 1..34: mol_type = unassigned RNA
tgctccagggagaggctgaccagtccctgctgac

SEQ ID NO: 8658 - DNA, 34 bp, Homo sapiens
  source 1..34: mol_type = unassigned DNA
tgctccagggagaggctgaccagtccctgctgac

SEQ ID NO: 8659 - DNA, 34 bp, Homo sapiens
  source 1..34: mol_type = unassigned DNA
gtcagcagggactggtcagcctctccctggagca

SEQ ID NO: 8660 - RNA, 30 nt, Homo sapiens
  source 1..30: mol_type = unassigned RNA
cacaaccctgaactagggaggccaggcccc

SEQ ID NO: 8661 - DNA, 30 bp, Homo sapiens
  source 1..30: mol_type = unassigned DNA
cacaaccctgaactagggaggccaggcccc

SEQ ID NO: 8662 - DNA, 30 bp, Homo sapiens
  source 1..30: mol_type = unassigned DNA
ggggcctggcctccctagttcagggttgtg

SEQ ID NO: 8663 - RNA, 170 nt, Homo sapiens
  source 1..170: mol_type = unassigned RNA
tcagcctgaggtaattcgccaaacgtctggggaactgcagctgacagctgcgtgtctctcccagcagtcagggagtcagtctttcaacctgcaatcggagcatgcagccatttggggactttcagtttgcagagtaaggagagctttggtctggggcggaaactttgctt

SEQ ID NO: 8664 - DNA, 170 bp, Homo sapiens
  source 1..170: mol_type = unassigned DNA
tcagcctgaggtaattcgccaaacgtctggggaactgcagctgacagctgcgtgtctctcccagcagtcagggagtcagtctttcaacctgcaatcggagcatgcagccatttggggactttcagtttgcagagtaaggagagctttggtctggggcggaaactttgctt

SEQ ID NO: 8665 - DNA, 170 bp, Homo sapiens
  source 1..170: mol_type = unassigned DNA
aagcaaagtttccgccccagaccaaagctctccttactctgcaaactgaaagtccccaaatggctgcatgctccgattgcaggttgaaagactgactccctgactgctgggagagacacgcagctgtcagctgcagttccccagacgtttggcgaattacctcaggctga

SEQ ID NO: 8666 - RNA, 29 nt, Homo sapiens
  source 1..29: mol_type = unassigned RNA
gactcaacagatgtcgggggagaaaactc

SEQ ID NO: 8667 - DNA, 29 bp, Homo sapiens
  source 1..29: mol_type = unassigned DNA
gactcaacagatgtcgggggagaaaactc

SEQ ID NO: 8668 - DNA, 29 bp, Homo sapiens
  source 1..29: mol_type = unassigned DNA
gagttttctcccccgacatctgttgagtc

SEQ ID NO: 8669 - RNA, 65 nt, Homo sapiens
  source 1..65: mol_type = unassigned RNA
tggagttatgaggattcagtgagatcacgcctgtagtagtggctggcactggctggggggcaggg

SEQ ID NO: 8670 - DNA, 65 bp, Homo sapiens
  source 1..65: mol_type = unassigned DNA
tggagttatgaggattcagtgagatcacgcctgtagtagtggctggcactggctggggggcaggg

SEQ ID NO: 8671 - DNA, 65 bp, Homo sapiens
  source 1..65: mol_type = unassigned DNA
ccctgccccccagccagtgccagccactactacaggcgtgatctcactgaatcctcataactcca

SEQ ID NO: 8672 - RNA, 25 nt, Homo sapiens
  source 1..25: mol_type = unassigned RNA
cgccaatttcggttggccggccaca

SEQ ID NO: 8673 - DNA, 25 bp, Homo sapiens
  source 1..25: mol_type = unassigned DNA
cgccaatttcggttggccggccaca

SEQ ID NO: 8674 - DNA, 25 bp, Homo sapiens
  source 1..25: mol_type = unassigned DNA
tgtggccggccaaccgaaattggcg

SEQ ID NO: 8675 - RNA, 31 nt, Homo sapiens
  source 1..31: mol_type = unassigned RNA
gacatcttcactctgctcagatggcctgggt

SEQ ID NO: 8676 - DNA, 31 bp, Homo sapiens
  source 1..31: mol_type = unassigned DNA
gacatcttcactctgctcagatggcctgggt

SEQ ID NO: 8677 - DNA, 31 bp, Homo sapiens
  source 1..31: mol_type = unassigned DNA
acccaggccatctgagcagagtgaagatgtc

SEQ ID NO: 8678 - RNA, 53 nt, Homo sapiens
  source 1..53: mol_type = unassigned RNA
catcctcatcatcttctgcttgttgatcctttcttagtcgacaagtggatacc

SEQ ID NO: 8679 - DNA, 53 bp, Homo sapiens
  source 1..53: mol_type = unassigned DNA
catcctcatcatcttctgcttgttgatcctttcttagtcgacaagtggatacc

SEQ ID NO: 8680 - DNA, 53 bp, Homo sapiens
  source 1..53: mol_type = unassigned DNA
ggtatccacttgtcgactaagaaaggatcaacaagcagaagatgatgaggatg

SEQ ID NO: 8681 - RNA, 134 nt, Homo sapiens
  source 1..134: mol_type = unassigned RNA
ccccgcatcattttaagctggtctcagtgcatgtgttcattcgccacggagacaggtacccactgtatgtcattcccaaaacaaagcgaccagaaattgactgcactctggtggctaacaggtaaattgcactt

SEQ ID NO: 8682 - DNA, 134 bp, Homo sapiens
  source 1..134: mol_type = unassigned DNA
ccccgcatcattttaagctggtctcagtgcatgtgttcattcgccacggagacaggtacccactgtatgtcattcccaaaacaaagcgaccagaaattgactgcactctggtggctaacaggtaaattgcactt

SEQ ID NO: 8683 - DNA, 134 bp, Homo sapiens
  source 1..134: mol_type = unassigned DNA
aagtgcaatttacctgttagccaccagagtgcagtcaatttctggtcgctttgttttgggaatgacatacagtgggtacctgtctccgtggcgaatgaacacatgcactgagaccagcttaaaatgatgcgggg

SEQ ID NO: 8684 - RNA, 31 nt, Homo sapiens
  source 1..31: mol_type = unassigned RNA
gatgcatgactgtaagatctacggctgagtg

SEQ ID NO: 8685 - DNA, 31 bp, Homo sapiens
  source 1..31: mol_type = unassigned DNA
gatgcatgactgtaagatctacggctgagtg

SEQ ID NO: 8686 - DNA, 31 bp, Homo sapiens
  source 1..31: mol_type = unassigned DNA
cactcagccgtagatcttacagtcatgcatc

SEQ ID NO: 8687 - RNA, 24 nt, Homo sapiens
  source 1..24: mol_type = unassigned RNA
ctgggggttccgcgcggcctgggg

SEQ ID NO: 8688 - DNA, 24 bp, Homo sapiens
  source 1..24: mol_type = unassigned DNA
ctgggggttccgcgcggcctgggg

SEQ ID NO: 8689 - DNA, 24 bp, Homo sapiens
  source 1..24: mol_type = unassigned DNA
ccccaggccgcgcggaacccccag

SEQ ID NO: 8690 - RNA, 31 nt, Homo sapiens
  source 1..31: mol_type = unassigned RNA
aacaatttaagccagactctgaaggcaggct

SEQ ID NO: 8691 - DNA, 31 bp, Homo sapiens
  source 1..31: mol_type = unassigned DNA
aacaatttaagccagactctgaaggcaggct

SEQ ID NO: 8692 - DNA, 31 bp, Homo sapiens
  source 1..31: mol_type = unassigned DNA
agcctgccttcagagtctggcttaaattgtt

SEQ ID NO: 8693 - RNA, 34 nt, Homo sapiens
  source 1..34: mol_type = unassigned RNA
agaagatactgtcactggggactttgtttctgtg

SEQ ID NO: 8694 - DNA, 34 bp, Homo sapiens
  source 1..34: mol_type = unassigned DNA
agaagatactgtcactggggactttgtttctgtg

SEQ ID NO: 8695 - DNA, 34 bp, Homo sapiens
  source 1..34: mol_type = unassigned DNA
cacagaaacaaagtccccagtgacagtatcttct

SEQ ID NO: 8696 - RNA, 31 nt, Homo sapiens
  source 1..31: mol_type = unassigned RNA
cgccatgctgtggatgctgaccaggtcgcca

SEQ ID NO: 8697 - DNA, 31 bp, Homo sapiens
  source 1..31: mol_type = unassigned DNA
cgccatgctgtggatgctgaccaggtcgcca

SEQ ID NO: 8698 - DNA, 31 bp, Homo sapiens
  source 1..31: mol_type = unassigned DNA
tggcgacctggtcagcatccacagcatggcg

SEQ ID NO: 8699 - RNA, 30 nt, Homo sapiens
  source 1..30: mol_type = unassigned RNA
attcctggataaaagtactgtatgattttg

SEQ ID NO: 8700 - DNA, 30 bp, Homo sapiens
  source 1..30: mol_type = unassigned DNA
attcctggataaaagtactgtatgattttg

SEQ ID NO: 8701 - DNA, 30 bp, Homo sapiens
  source 1..30: mol_type = unassigned DNA
caaaatcatacagtacttttatccaggaat

SEQ ID NO: 8702 - RNA, 30 nt, Homo sapiens
  source 1..30: mol_type = unassigned RNA
aagccagggttgggtagggactgggaacag

SEQ ID NO: 8703 - DNA, 30 bp, Homo sapiens
  source 1..30: mol_type = unassigned DNA
aagccagggttgggtagggactgggaacag

SEQ ID NO: 8704 - DNA, 30 bp, Homo sapiens
  source 1..30: mol_type = unassigned DNA
ctgttcccagtccctacccaaccctggctt

SEQ ID NO: 8705 - RNA, 29 nt, Homo sapiens
  source 1..29: mol_type = unassigned RNA
tggcaggctctgatgaaagctgaggctct

SEQ ID NO: 8706 - DNA, 29 bp, Homo sapiens
  source 1..29: mol_type = unassigned DNA
tggcaggctctgatgaaagctgaggctct

SEQ ID NO: 8707 - DNA, 29 bp, Homo sapiens
  source 1..29: mol_type = unassigned DNA
agagcctcagctttcatcagagcctgcca

SEQ ID NO: 8708 - RNA, 40 nt, Homo sapiens
  source 1..40: mol_type = unassigned RNA
ttatcagacgctcacagggctctcacactctgggctggta

SEQ ID NO: 8709 - DNA, 40 bp, Homo sapiens
  source 1..40: mol_type = unassigned DNA
ttatcagacgctcacagggctctcacactctgggctggta

SEQ ID NO: 8710 - DNA, 40 bp, Homo sapiens
  source 1..40: mol_type = unassigned DNA
taccagcccagagtgtgagagccctgtgagcgtctgataa

SEQ ID NO: 8711 - RNA, 28 nt, Homo sapiens
  source 1..28: mol_type = unassigned RNA
ccgcgaggtcagagccgggctgtgccgc

SEQ ID NO: 8712 - DNA, 28 bp, Homo sapiens
  source 1..28: mol_type = unassigned DNA
ccgcgaggtcagagccgggctgtgccgc

SEQ ID NO: 8713 - DNA, 28 bp, Homo sapiens
  source 1..28: mol_type = unassigned DNA
gcggcacagcccggctctgacctcgcgg

SEQ ID NO: 8714 - RNA, 27 nt, Homo sapiens
  source 1..27: mol_type = unassigned RNA
cagcaggttttagggtctaggaccctg

SEQ ID NO: 8715 - DNA, 27 bp, Homo sapiens
  source 1..27: mol_type = unassigned DNA
cagcaggttttagggtctaggaccctg

SEQ ID NO: 8716 - DNA, 27 bp, Homo sapiens
  source 1..27: mol_type = unassigned DNA
cagggtcctagaccctaaaacctgctg

SEQ ID NO: 8717 - RNA, 33 nt, Homo sapiens
  source 1..33: mol_type = unassigned RNA
ctgatcaccattgatcaggcagcacttggttcc

SEQ ID NO: 8718 - DNA, 33 bp, Homo sapiens
  source 1..33: mol_type = unassigned DNA
ctgatcaccattgatcaggcagcacttggttcc

SEQ ID NO: 8719 - DNA, 33 bp, Homo sapiens
  source 1..33: mol_type = unassigned DNA
ggaaccaagtgctgcctgatcaatggtgatcag

SEQ ID NO: 8720 - RNA, 31 nt, Homo sapiens
  source 1..31: mol_type = unassigned RNA
cagtttcaggattgggtgagacagagacaaa

SEQ ID NO: 8721 - DNA, 31 bp, Homo sapiens
  source 1..31: mol_type = unassigned DNA
cagtttcaggattgggtgagacagagacaaa

SEQ ID NO: 8722 - DNA, 31 bp, Homo sapiens
  source 1..31: mol_type = unassigned DNA
tttgtctctgtctcacccaatcctgaaactg

SEQ ID NO: 8723 - RNA, 27 nt, Homo sapiens
  source 1..27: mol_type = unassigned RNA
tgaagctgtagggaaaaggctggctgc

SEQ ID NO: 8724 - DNA, 27 bp, Homo sapiens
  source 1..27: mol_type = unassigned DNA
tgaagctgtagggaaaaggctggctgc

SEQ ID NO: 8725 - DNA, 27 bp, Homo sapiens
  source 1..27: mol_type = unassigned DNA
gcagccagccttttccctacagcttca

SEQ ID NO: 8726 - RNA, 43 nt, Homo sapiens
  source 1..43: mol_type = unassigned RNA
gaaggattccagagtcaatgctagtaagactgctgacaaaaag

SEQ ID NO: 8727 - DNA, 43 bp, Homo sapiens
  source 1..43: mol_type = unassigned DNA
gaaggattccagagtcaatgctagtaagactgctgacaaaaag

SEQ ID NO: 8728 - DNA, 43 bp, Homo sapiens
  source 1..43: mol_type = unassigned DNA
ctttttgtcagcagtcttactagcattgactctggaatccttc

SEQ ID NO: 8729 - RNA, 26 nt, Homo sapiens
  source 1..26: mol_type = unassigned RNA
aaaaccactggtagaactaacacaca

SEQ ID NO: 8730 - DNA, 26 bp, Homo sapiens
  source 1..26: mol_type = unassigned DNA
aaaaccactggtagaactaacacaca

SEQ ID NO: 8731 - DNA, 26 bp, Homo sapiens
  source 1..26: mol_type = unassigned DNA
tgtgtgttagttctaccagtggtttt

SEQ ID NO: 8732 - RNA, 29 nt, Homo sapiens
  source 1..29: mol_type = unassigned RNA
tcaccaccaccaggatgtgactgctgaag

SEQ ID NO: 8733 - DNA, 29 bp, Homo sapiens
  source 1..29: mol_type = unassigned DNA
tcaccaccaccaggatgtgactgctgaag

SEQ ID NO: 8734 - DNA, 29 bp, Homo sapiens
  source 1..29: mol_type = unassigned DNA
cttcagcagtcacatcctggtggtggtga

SEQ ID NO: 8735 - RNA, 29 nt, Homo sapiens
  source 1..29: mol_type = unassigned RNA
ctcttgcctggactgcacactcctgctgc

SEQ ID NO: 8736 - DNA, 29 bp, Homo sapiens
  source 1..29: mol_type = unassigned DNA
ctcttgcctggactgcacactcctgctgc

SEQ ID NO: 8737 - DNA, 29 bp, Homo sapiens
  source 1..29: mol_type = unassigned DNA
gcagcaggagtgtgcagtccaggcaagag

SEQ ID NO: 8738 - RNA, 26 nt, Homo sapiens
  source 1..26: mol_type = unassigned RNA
gggcctctgagggcaagaaaggtagc

SEQ ID NO: 8739 - DNA, 26 bp, Homo sapiens
  source 1..26: mol_type = unassigned DNA
gggcctctgagggcaagaaaggtagc

SEQ ID NO: 8740 - DNA, 26 bp, Homo sapiens
  source 1..26: mol_type = unassigned DNA
gctacctttcttgccctcagaggccc

SEQ ID NO: 8741 - RNA, 36 nt, Homo sapiens
  source 1..36: mol_type = unassigned RNA
actgaaccagtagtgtcaatggtagacttcacatgg

SEQ ID NO: 8742 - DNA, 36 bp, Homo sapiens
  source 1..36: mol_type = unassigned DNA
actgaaccagtagtgtcaatggtagacttcacatgg

SEQ ID NO: 8743 - DNA, 36 bp, Homo sapiens
  source 1..36: mol_type = unassigned DNA
ccatgtgaagtctaccattgacactactggttcagt

SEQ ID NO: 8744 - RNA, 49 nt, Homo sapiens
  source 1..49: mol_type = unassigned RNA
tacagagcaaggagctactgtaatgaccagtcaacaggggatataaagg

SEQ ID NO: 8745 - DNA, 49 bp, Homo sapiens
  source 1..49: mol_type = unassigned DNA
tacagagcaaggagctactgtaatgaccagtcaacaggggatataaagg

SEQ ID NO: 8746 - DNA, 49 bp, Homo sapiens
  source 1..49: mol_type = unassigned DNA
cctttatatcccctgttgactggtcattacagtagctccttgctctgta

SEQ ID NO: 8747 - RNA, 30 nt, Homo sapiens
  source 1..30: mol_type = unassigned RNA
ccttccttaggctctgaaggcaagactgtt

SEQ ID NO: 8748 - DNA, 30 bp, Homo sapiens
  source 1..30: mol_type = unassigned DNA
ccttccttaggctctgaaggcaagactgtt

SEQ ID NO: 8749 - DNA, 30 bp, Homo sapiens
  source 1..30: mol_type = unassigned DNA
aacagtcttgccttcagagcctaaggaagg

SEQ ID NO: 8750 - RNA, 63 nt, Homo sapiens
  source 1..63: mol_type = unassigned RNA
gtcttaagcaaaagtactgtggaagctgcagcatttcctcctcctttccagaaactgagcaag

SEQ ID NO: 8751 - DNA, 63 bp, Homo sapiens
  source 1..63: mol_type = unassigned DNA
gtcttaagcaaaagtactgtggaagctgcagcatttcctcctcctttccagaaactgagcaag

SEQ ID NO: 8752 - DNA, 63 bp, Homo sapiens
  source 1..63: mol_type = unassigned DNA
cttgctcagtttctggaaaggaggaggaaatgctgcagcttccacagtacttttgcttaagac

SEQ ID NO: 8753 - RNA, 29 nt, Homo sapiens
  source 1..29: mol_type = unassigned RNA
ggctctgcctgcagtcgcctgagaatgat

SEQ ID NO: 8754 - DNA, 29 bp, Homo sapiens
  source 1..29: mol_type = unassigned DNA
ggctctgcctgcagtcgcctgagaatgat

SEQ ID NO: 8755 - DNA, 29 bp, Homo sapiens
  source 1..29: mol_type = unassigned DNA
atcattctcaggcgactgcaggcagagcc

SEQ ID NO: 8756 - RNA, 32 nt, Homo sapiens
  source 1..32: mol_type = unassigned RNA
gtagtacaatcgtgtggacatagtttggaaac

SEQ ID NO: 8757 - DNA, 32 bp, Homo sapiens
  source 1..32: mol_type = unassigned DNA
gtagtacaatcgtgtggacatagtttggaaac

SEQ ID NO: 8758 - DNA, 32 bp, Homo sapiens
  source 1..32: mol_type = unassigned DNA
gtttccaaactatgtccacacgattgtactac

SEQ ID NO: 8759 - RNA, 29 nt, Homo sapiens
  source 1..29: mol_type = unassigned RNA
cactgtgaagttggcctcattgttggtaa

SEQ ID NO: 8760 - DNA, 29 bp, Homo sapiens
  source 1..29: mol_type = unassigned DNA
cactgtgaagttggcctcattgttggtaa

SEQ ID NO: 8761 - DNA, 29 bp, Homo sapiens
  source 1..29: mol_type = unassigned DNA
ttaccaacaatgaggccaacttcacagtg

SEQ ID NO: 8762 - RNA, 52 nt, Homo sapiens
  source 1..52: mol_type = unassigned RNA
gcctggttcacagttcagtcaggccactcgtgtgtagaactcacactggcct

SEQ ID NO: 8763 - DNA, 52 bp, Homo sapiens
  source 1..52: mol_type = unassigned DNA
gcctggttcacagttcagtcaggccactcgtgtgtagaactcacactggcct

SEQ ID NO: 8764 - DNA, 52 bp, Homo sapiens
  source 1..52: mol_type = unassigned DNA
aggccagtgtgagttctacacacgagtggcctgactgaactgtgaaccaggc

SEQ ID NO: 8765 - RNA, 200 nt, Homo sapiens
  source 1..200: mol_type = unassigned RNA
ctttagagaaaacattggtttatcatagtctttttctttcattgagttttcatttagactagcatggcaagcagggtggccttggactttgatttaggggatcgtgctttggcctggaaaataagcactggcctgcatgcctagaacctgagtgaaggcagtcaacatcctagtatgaatcagacctagcagaaatgtaa

SEQ ID NO: 8766 - DNA, 200 bp, Homo sapiens
  source 1..200: mol_type = unassigned DNA
ctttagagaaaacattggtttatcatagtctttttctttcattgagttttcatttagactagcatggcaagcagggtggccttggactttgatttaggggatcgtgctttggcctggaaaataagcactggcctgcatgcctagaacctgagtgaaggcagtcaacatcctagtatgaatcagacctagcagaaatgtaa

SEQ ID NO: 8767 - DNA, 200 bp, Homo sapiens
  source 1..200: mol_type = unassigned DNA
ttacatttctgctaggtctgattcatactaggatgttgactgccttcactcaggttctaggcatgcaggccagtgcttattttccaggccaaagcacgatcccctaaatcaaagtccaaggccaccctgcttgccatgctagtctaaatgaaaactcaatgaaagaaaaagactatgataaaccaatgttttctctaaag

SEQ ID NO: 8768 - RNA, 63 nt, Homo sapiens
  source 1..63: mol_type = unassigned RNA
ctctgtcatcataactgaggtatttgtctgtattgttttgcattggtgggtctgttcccccga

SEQ ID NO: 8769 - DNA, 63 bp, Homo sapiens
  source 1..63: mol_type = unassigned DNA
ctctgtcatcataactgaggtatttgtctgtattgttttgcattggtgggtctgttcccccga

SEQ ID NO: 8770 - DNA, 63 bp, Homo sapiens
  source 1..63: mol_type = unassigned DNA
tcgggggaacagacccaccaatgcaaaacaatacagacaaatacctcagttatgatgacagag

SEQ ID NO: 8771 - RNA, 31 nt, Homo sapiens
  source 1..31: mol_type = unassigned RNA
gcctcctggactatgacactgtggctggggc

SEQ ID NO: 8772 - DNA, 31 bp, Homo sapiens
  source 1..31: mol_type = unassigned DNA
gcctcctggactatgacactgtggctggggc

SEQ ID NO: 8773 - DNA, 31 bp, Homo sapiens
  source 1..31: mol_type = unassigned DNA
gccccagccacagtgtcatagtccaggaggc

SEQ ID NO: 8774 - RNA, 32 nt, Homo sapiens
  source 1..32: mol_type = unassigned RNA
atccgctggagcgctctggagagcgaggatat

SEQ ID NO: 8775 - DNA, 32 bp, Homo sapiens
  source 1..32: mol_type = unassigned DNA
atccgctggagcgctctggagagcgaggatat

SEQ ID NO: 8776 - DNA, 32 bp, Homo sapiens
  source 1..32: mol_type = unassigned DNA
atatcctcgctctccagagcgctccagcggat

SEQ ID NO: 8777 - RNA, 186 nt, Homo sapiens
  source 1..186: mol_type = unassigned RNA
ctctctaacacagtgggttagaagctgaccttggtattcatgtatatatttcagtttgggaaaggaatctactttgctgacatgtcttccaagagtgccaattactgctttgcctctcgcctaaagaatacaggactgctgctcttatcagaggtgagacaggagtatgtctgtgatctctagttt

SEQ ID NO: 8778 - DNA, 186 bp, Homo sapiens
  source 1..186: mol_type = unassigned DNA
ctctctaacacagtgggttagaagctgaccttggtattcatgtatatatttcagtttgggaaaggaatctactttgctgacatgtcttccaagagtgccaattactgctttgcctctcgcctaaagaatacaggactgctgctcttatcagaggtgagacaggagtatgtctgtgatctctagttt

SEQ ID NO: 8779 - DNA, 186 bp, Homo sapiens
  source 1..186: mol_type = unassigned DNA
aaactagagatcacagacatactcctgtctcacctctgataagagcagcagtcctgtattctttaggcgagaggcaaagcagtaattggcactcttggaagacatgtcagcaaagtagattcctttcccaaactgaaatatatacatgaataccaaggtcagcttctaacccactgtgttagagag

SEQ ID NO: 8780 - RNA, 30 nt, Homo sapiens
  source 1..30: mol_type = unassigned RNA
ttaacttttagatcatgtagctgagacata

SEQ ID NO: 8781 - DNA, 30 bp, Homo sapiens
  source 1..30: mol_type = unassigned DNA
ttaacttttagatcatgtagctgagacata

SEQ ID NO: 8782 - DNA, 30 bp, Homo sapiens
  source 1..30: mol_type = unassigned DNA
tatgtctcagctacatgatctaaaagttaa

SEQ ID NO: 8783 - RNA, 31 nt, Homo sapiens
  source 1..31: mol_type = unassigned RNA
tcttatctgactggccagttccctctcatct

SEQ ID NO: 8784 - DNA, 31 bp, Homo sapiens
  source 1..31: mol_type = unassigned DNA
tcttatctgactggccagttccctctcatct

SEQ ID NO: 8785 - DNA, 31 bp, Homo sapiens
  source 1..31: mol_type = unassigned DNA
agatgagagggaactggccagtcagataaga

SEQ ID NO: 8786 - RNA, 31 nt, Homo sapiens
  source 1..31: mol_type = unassigned RNA
tcacaccaaccgggaggggacatgtgggccg

SEQ ID NO: 8787 - DNA, 31 bp, Homo sapiens
  source 1..31: mol_type = unassigned DNA
tcacaccaaccgggaggggacatgtgggccg

SEQ ID NO: 8788 - DNA, 31 bp, Homo sapiens
  source 1..31: mol_type = unassigned DNA
cggcccacatgtcccctcccggttggtgtga

SEQ ID NO: 8789 - RNA, 120 nt, Homo sapiens
  source 1..120: mol_type = unassigned RNA
ctaaagccaggtatcaaactgacactgtcagctcttctggatctcaagaaggtcagtgctggtggccccatgcttggtctaggactggaatttcaagcataaatgaatactgtacaattg

SEQ ID NO: 8790 - DNA, 120 bp, Homo sapiens
  source 1..120: mol_type = unassigned DNA
ctaaagccaggtatcaaactgacactgtcagctcttctggatctcaagaaggtcagtgctggtggccccatgcttggtctaggactggaatttcaagcataaatgaatactgtacaattg

SEQ ID NO: 8791 - DNA, 120 bp, Homo sapiens
  source 1..120: mol_type = unassigned DNA
caattgtacagtattcatttatgcttgaaattccagtcctagaccaagcatggggccaccagcactgaccttcttgagatccagaagagctgacagtgtcagtttgatacctggctttag

SEQ ID NO: 8792 - RNA, 33 nt, Homo sapiens
  source 1..33: mol_type = unassigned RNA
ctagatcaaaggcctctgaatggcttcaaggac

SEQ ID NO: 8793 - DNA, 33 bp, Homo sapiens
  source 1..33: mol_type = unassigned DNA
ctagatcaaaggcctctgaatggcttcaaggac

SEQ ID NO: 8794 - DNA, 33 bp, Homo sapiens
  source 1..33: mol_type = unassigned DNA
gtccttgaagccattcagaggcctttgatctag

SEQ ID NO: 8795 - RNA, 34 nt, Homo sapiens
  source 1..34: mol_type = unassigned RNA
tgagagcatgtaccagatcaagtatgaggagctg

SEQ ID NO: 8796 - DNA, 34 bp, Homo sapiens
  source 1..34: mol_type = unassigned DNA
tgagagcatgtaccagatcaagtatgaggagctg

SEQ ID NO: 8797 - DNA, 34 bp, Homo sapiens
  source 1..34: mol_type = unassigned DNA
cagctcctcatacttgatctggtacatgctctca

SEQ ID NO: 8798 - RNA, 171 nt, Homo sapiens
  source 1..171: mol_type = unassigned RNA
agtgaaacttagtgcctcagacaagcaggggcaagtctgctaaggaagctgtggccagaagcacagatcaggtactgccgcccactctgtccactgggccctctgctgccacttcctgcctggcagcccttctgtgcctcagccctggcctcccgctgccccagccccagc

SEQ ID NO: 8799 - DNA, 171 bp, Homo sapiens
  source 1..171: mol_type = unassigned DNA
agtgaaacttagtgcctcagacaagcaggggcaagtctgctaaggaagctgtggccagaagcacagatcaggtactgccgcccactctgtccactgggccctctgctgccacttcctgcctggcagcccttctgtgcctcagccctggcctcccgctgccccagccccagc

SEQ ID NO: 8800 - DNA, 171 bp, Homo sapiens
  source 1..171: mol_type = unassigned DNA
gctggggctggggcagcgggaggccagggctgaggcacagaagggctgccaggcaggaagtggcagcagagggcccagtggacagagtgggcggcagtacctgatctgtgcttctggccacagcttccttagcagacttgcccctgcttgtctgaggcactaagtttcact

SEQ ID NO: 8801 - RNA, 44 nt, Homo sapiens
  source 1..44: mol_type = unassigned RNA
aaatatttaggttggcgcaaaagtaattgcggttttgaccatta

SEQ ID NO: 8802 - DNA, 44 bp, Homo sapiens
  source 1..44: mol_type = unassigned DNA
aaatatttaggttggcgcaaaagtaattgcggttttgaccatta

SEQ ID NO: 8803 - DNA, 44 bp, Homo sapiens
  source 1..44: mol_type = unassigned DNA
taatggtcaaaaccgcaattacttttgcgccaacctaaatattt

SEQ ID NO: 8804 - RNA, 33 nt, Homo sapiens
  source 1..33: mol_type = unassigned RNA
ttccaggagaaacgttggactgactgtccaaga

SEQ ID NO: 8805 - DNA, 33 bp, Homo sapiens
  source 1..33: mol_type = unassigned DNA
ttccaggagaaacgttggactgactgtccaaga

SEQ ID NO: 8806 - DNA, 33 bp, Homo sapiens
  source 1..33: mol_type = unassigned DNA
tcttggacagtcagtccaacgtttctcctggaa

SEQ ID NO: 8807 - RNA, 33 nt, Homo sapiens
  source 1..33: mol_type = unassigned RNA
ctacagaaaactcaagaacacagcagagcaatt

SEQ ID NO: 8808 - DNA, 33 bp, Homo sapiens
  source 1..33: mol_type = unassigned DNA
ctacagaaaactcaagaacacagcagagcaatt

SEQ ID NO: 8809 - DNA, 33 bp, Homo sapiens
  source 1..33: mol_type = unassigned DNA
aattgctctgctgtgttcttgagttttctgtag

SEQ ID NO: 8810 - RNA, 24 nt, Homo sapiens
  source 1..24: mol_type = unassigned RNA
ttttttctttccgccgtgtgaaga

SEQ ID NO: 8811 - DNA, 24 bp, Homo sapiens
  source 1..24: mol_type = unassigned DNA
ttttttctttccgccgtgtgaaga

SEQ ID NO: 8812 - DNA, 24 bp, Homo sapiens
  source 1..24: mol_type = unassigned DNA
tcttcacacggcggaaagaaaaaa

SEQ ID NO: 8813 - RNA, 29 nt, Homo sapiens
  source 1..29: mol_type = unassigned RNA
agcagaaatctagaagactgtcagcttcc

SEQ ID NO: 8814 - DNA, 29 bp, Homo sapiens
  source 1..29: mol_type = unassigned DNA
agcagaaatctagaagactgtcagcttcc

SEQ ID NO: 8815 - DNA, 29 bp, Homo sapiens
  source 1..29: mol_type = unassigned DNA
ggaagctgacagtcttctagatttctgct

SEQ ID NO: 8816 - RNA, 61 nt, Homo sapiens
  source 1..61: mol_type = unassigned RNA
gacatggtgagactagtttggagagaactctggcaacactgctgaggataggtttcatggg

SEQ ID NO: 8817 - DNA, 61 bp, Homo sapiens
  source 1..61: mol_type = unassigned DNA
gacatggtgagactagtttggagagaactctggcaacactgctgaggataggtttcatggg

SEQ ID NO: 8818 - DNA, 61 bp, Homo sapiens
  source 1..61: mol_type = unassigned DNA
cccatgaaacctatcctcagcagtgttgccagagttctctccaaactagtctcaccatgtc

SEQ ID NO: 8819 - RNA, 100 nt, Homo sapiens
  source 1..100: mol_type = unassigned RNA
tccctcttcctcctccacagctaaggcccttgttcaagaacaccagtgttggccctctgtactctggctgcaggctgaccttgctcaggtgagaactgag

SEQ ID NO: 8820 - DNA, 100 bp, Homo sapiens
  source 1..100: mol_type = unassigned DNA
tccctcttcctcctccacagctaaggcccttgttcaagaacaccagtgttggccctctgtactctggctgcaggctgaccttgctcaggtgagaactgag

SEQ ID NO: 8821 - DNA, 100 bp, Homo sapiens
  source 1..100: mol_type = unassigned DNA
ctcagttctcacctgagcaaggtcagcctgcagccagagtacagagggccaacactggtgttcttgaacaagggccttagctgtggaggaggaagaggga

SEQ ID NO: 8822 - RNA, 32 nt, Homo sapiens
  source 1..32: mol_type = unassigned RNA
gaagatacaccaggatatcagactgccttctc

SEQ ID NO: 8823 - DNA, 32 bp, Homo sapiens
  source 1..32: mol_type = unassigned DNA
gaagatacaccaggatatcagactgccttctc

SEQ ID NO: 8824 - DNA, 32 bp, Homo sapiens
  source 1..32: mol_type = unassigned DNA
gagaaggcagtctgatatcctggtgtatcttc

SEQ ID NO: 8825 - RNA, 29 nt, Homo sapiens
  source 1..29: mol_type = unassigned RNA
aatacatgttgattgtagagaaaaaaaat

SEQ ID NO: 8826 - DNA, 29 bp, Homo sapiens
  source 1..29: mol_type = unassigned DNA
aatacatgttgattgtagagaaaaaaaat

SEQ ID NO: 8827 - DNA, 29 bp, Homo sapiens
  source 1..29: mol_type = unassigned DNA
attttttttctctacaatcaacatgtatt

SEQ ID NO: 8828 - RNA, 29 nt, Homo sapiens
  source 1..29: mol_type = unassigned RNA
cctttctgtggctggatggggagacaggt

SEQ ID NO: 8829 - DNA, 29 bp, Homo sapiens
  source 1..29: mol_type = unassigned DNA
cctttctgtggctggatggggagacaggt

SEQ ID NO: 8830 - DNA, 29 bp, Homo sapiens
  source 1..29: mol_type = unassigned DNA
acctgtctccccatccagccacagaaagg

SEQ ID NO: 8831 - RNA, 157 nt, Homo sapiens
  source 1..157: mol_type = unassigned RNA
tttccctgacgtttaggtgatgacttgtttttaattctttaggagtttgacttacaaggaatctggagtagatatcgcagctggaaatatgctggtcaagaaaattcagcctttagcaaaagccacttccagatcaggtcagtgatcctatactttg

SEQ ID NO: 8832 - DNA, 157 bp, Homo sapiens
  source 1..157: mol_type = unassigned DNA
tttccctgacgtttaggtgatgacttgtttttaattctttaggagtttgacttacaaggaatctggagtagatatcgcagctggaaatatgctggtcaagaaaattcagcctttagcaaaagccacttccagatcaggtcagtgatcctatactttg

SEQ ID NO: 8833 - DNA, 157 bp, Homo sapiens
  source 1..157: mol_type = unassigned DNA
caaagtataggatcactgacctgatctggaagtggcttttgctaaaggctgaattttcttgaccagcatatttccagctgcgatatctactccagattccttgtaagtcaaactcctaaagaattaaaaacaagtcatcacctaaacgtcagggaaa

SEQ ID NO: 8834 - RNA, 33 nt, Homo sapiens
  source 1..33: mol_type = unassigned RNA
agtagacatgatggaactgtgacaaaagccaaa

SEQ ID NO: 8835 - DNA, 33 bp, Homo sapiens
  source 1..33: mol_type = unassigned DNA
agtagacatgatggaactgtgacaaaagccaaa

SEQ ID NO: 8836 - DNA, 33 bp, Homo sapiens
  source 1..33: mol_type = unassigned DNA
tttggcttttgtcacagttccatcatgtctact

SEQ ID NO: 8837 - RNA, 52 nt, Homo sapiens
  source 1..52: mol_type = unassigned RNA
aggcttcaggacatgatgaagttataactctgatgactaatgaagtgtgtac

SEQ ID NO: 8838 - DNA, 52 bp, Homo sapiens
  source 1..52: mol_type = unassigned DNA
aggcttcaggacatgatgaagttataactctgatgactaatgaagtgtgtac

SEQ ID NO: 8839 - DNA, 52 bp, Homo sapiens
  source 1..52: mol_type = unassigned DNA
gtacacacttcattagtcatcagagttataacttcatcatgtcctgaagcct

SEQ ID NO: 8840 - RNA, 32 nt, Homo sapiens
  source 1..32: mol_type = unassigned RNA
agagtggcatttctgttgcggttggcagcgtt

SEQ ID NO: 8841 - DNA, 32 bp, Homo sapiens
  source 1..32: mol_type = unassigned DNA
agagtggcatttctgttgcggttggcagcgtt

SEQ ID NO: 8842 - DNA, 32 bp, Homo sapiens
  source 1..32: mol_type = unassigned DNA
aacgctgccaaccgcaacagaaatgccactct

SEQ ID NO: 8843 - RNA, 23 nt, Homo sapiens
  source 1..23: mol_type = unassigned RNA
atctctatcagactattttgaag

SEQ ID NO: 8844 - DNA, 23 bp, Homo sapiens
  source 1..23: mol_type = unassigned DNA
atctctatcagactattttgaag

SEQ ID NO: 8845 - DNA, 23 bp, Homo sapiens
  source 1..23: mol_type = unassigned DNA
cttcaaaatagtctgatagagat

SEQ ID NO: 8846 - RNA, 182 nt, Homo sapiens
  source 1..182: mol_type = unassigned RNA
ttactgaatgaaggaaagctgaagtatctgtagaactggccatttcattctgcatttagagctctgggagctcttgaaatgtctagacaaacatcctcttcagctagaggaagctccttctcccacttactagctatgagatcttgggcagatggcttaacatttctgggcctcagtgacct

SEQ ID NO: 8847 - DNA, 182 bp, Homo sapiens
  source 1..182: mol_type = unassigned DNA
ttactgaatgaaggaaagctgaagtatctgtagaactggccatttcattctgcatttagagctctgggagctcttgaaatgtctagacaaacatcctcttcagctagaggaagctccttctcccacttactagctatgagatcttgggcagatggcttaacatttctgggcctcagtgacct

SEQ ID NO: 8848 - DNA, 182 bp, Homo sapiens
  source 1..182: mol_type = unassigned DNA
aggtcactgaggcccagaaatgttaagccatctgcccaagatctcatagctagtaagtgggagaaggagcttcctctagctgaagaggatgtttgtctagacatttcaagagctcccagagctctaaatgcagaatgaaatggccagttctacagatacttcagctttccttcattcagtaa

SEQ ID NO: 8849 - RNA, 28 nt, Homo sapiens
  source 1..28: mol_type = unassigned RNA
ggagagaaatacctctttgtcagcaaac

SEQ ID NO: 8850 - DNA, 28 bp, Homo sapiens
  source 1..28: mol_type = unassigned DNA
ggagagaaatacctctttgtcagcaaac

SEQ ID NO: 8851 - DNA, 28 bp, Homo sapiens
  source 1..28: mol_type = unassigned DNA
gtttgctgacaaagaggtatttctctcc

SEQ ID NO: 8852 - RNA, 30 nt, Homo sapiens
  source 1..30: mol_type = unassigned RNA
cagtcatgtcagaggtgtcgggcttcccta

SEQ ID NO: 8853 - DNA, 30 bp, Homo sapiens
  source 1..30: mol_type = unassigned DNA
cagtcatgtcagaggtgtcgggcttcccta

SEQ ID NO: 8854 - DNA, 30 bp, Homo sapiens
  source 1..30: mol_type = unassigned DNA
tagggaagcccgacacctctgacatgactg

SEQ ID NO: 8855 - RNA, 196 nt, Homo sapiens
  source 1..196: mol_type = unassigned RNA
ataaatgtaaagagccagttgtagctagtggctactgtactggacagtgaactcttttaaatgtaagcttctcaatctactcgccctggcttgcttagaactgaatctcgtagctaatacttaagggcactataattaaagcagttatccttcaatgaattcttcctgtgcccggataatgagctaagaactttac

SEQ ID NO: 8856 - DNA, 196 bp, Homo sapiens
  source 1..196: mol_type = unassigned DNA
ataaatgtaaagagccagttgtagctagtggctactgtactggacagtgaactcttttaaatgtaagcttctcaatctactcgccctggcttgcttagaactgaatctcgtagctaatacttaagggcactataattaaagcagttatccttcaatgaattcttcctgtgcccggataatgagctaagaactttac

SEQ ID NO: 8857 - DNA, 196 bp, Homo sapiens
  source 1..196: mol_type = unassigned DNA
gtaaagttcttagctcattatccgggcacaggaagaattcattgaaggataactgctttaattatagtgcccttaagtattagctacgagattcagttctaagcaagccagggcgagtagattgagaagcttacatttaaaagagttcactgtccagtacagtagccactagctacaactggctctttacatttat

SEQ ID NO: 8858 - RNA, 30 nt, Homo sapiens
  source 1..30: mol_type = unassigned RNA
agtggagagtattcctttgccagatatgcc

SEQ ID NO: 8859 - DNA, 30 bp, Homo sapiens
  source 1..30: mol_type = unassigned DNA
agtggagagtattcctttgccagatatgcc

SEQ ID NO: 8860 - DNA, 30 bp, Homo sapiens
  source 1..30: mol_type = unassigned DNA
ggcatatctggcaaaggaatactctccact

SEQ ID NO: 8861 - RNA, 30 nt, Homo sapiens
  source 1..30: mol_type = unassigned RNA
tgctcctaatgaccagcctcacgttctcca

SEQ ID NO: 8862 - DNA, 30 bp, Homo sapiens
  source 1..30: mol_type = unassigned DNA
tgctcctaatgaccagcctcacgttctcca

SEQ ID NO: 8863 - DNA, 30 bp, Homo sapiens
  source 1..30: mol_type = unassigned DNA
tggagaacgtgaggctggtcattaggagca

SEQ ID NO: 8864 - RNA, 32 nt, Homo sapiens
  source 1..32: mol_type = unassigned RNA
tttgagagctggccaggactctggactgatta

SEQ ID NO: 8865 - DNA, 32 bp, Homo sapiens
  source 1..32: mol_type = unassigned DNA
tttgagagctggccaggactctggactgatta

SEQ ID NO: 8866 - DNA, 32 bp, Homo sapiens
  source 1..32: mol_type = unassigned DNA
taatcagtccagagtcctggccagctctcaaa

SEQ ID NO: 8867 - RNA, 32 nt, Homo sapiens
  source 1..32: mol_type = unassigned RNA
ataaacctaaggatgtcgtattgttttactct

SEQ ID NO: 8868 - DNA, 32 bp, Homo sapiens
  source 1..32: mol_type = unassigned DNA
ataaacctaaggatgtcgtattgttttactct

SEQ ID NO: 8869 - DNA, 32 bp, Homo sapiens
  source 1..32: mol_type = unassigned DNA
agagtaaaacaatacgacatccttaggtttat

SEQ ID NO: 8870 - RNA, 121 nt, Homo sapiens
  source 1..121: mol_type = unassigned RNA
cacttccttaaaagcgtagacttctgagccacatacagatctggctctcctccttaccagttgcgtggtcctgaatttaatctaccttctccctaggatcttacgactaattgtaaaatga

SEQ ID NO: 8871 - DNA, 121 bp, Homo sapiens
  source 1..121: mol_type = unassigned DNA
cacttccttaaaagcgtagacttctgagccacatacagatctggctctcctccttaccagttgcgtggtcctgaatttaatctaccttctccctaggatcttacgactaattgtaaaatga

SEQ ID NO: 8872 - DNA, 121 bp, Homo sapiens
  source 1..121: mol_type = unassigned DNA
tcattttacaattagtcgtaagatcctagggagaaggtagattaaattcaggaccacgcaactggtaaggaggagagccagatctgtatgtggctcagaagtctacgcttttaaggaagtg

SEQ ID NO: 8873 - RNA, 25 nt, Homo sapiens
  source 1..25: mol_type = unassigned RNA
ttcagggttcagaatgatgttgaat

SEQ ID NO: 8874 - DNA, 25 bp, Homo sapiens
  source 1..25: mol_type = unassigned DNA
ttcagggttcagaatgatgttgaat

SEQ ID NO: 8875 - DNA, 25 bp, Homo sapiens
  source 1..25: mol_type = unassigned DNA
attcaacatcattctgaaccctgaa

SEQ ID NO: 8876 - RNA, 109 nt, Homo sapiens
  source 1..109: mol_type = unassigned RNA
aaaaaaaagtttttgctggctgtgggctgtaaggaacacaagctgaaaatgatttcaacctacgtgcacctgtaccctttggaggctgcagaacttatcattatcaacc

SEQ ID NO: 8877 - DNA, 109 bp, Homo sapiens
  source 1..109: mol_type = unassigned DNA
aaaaaaaagtttttgctggctgtgggctgtaaggaacacaagctgaaaatgatttcaacctacgtgcacctgtaccctttggaggctgcagaacttatcattatcaacc

SEQ ID NO: 8878 - DNA, 109 bp, Homo sapiens
  source 1..109: mol_type = unassigned DNA
ggttgataatgataagttctgcagcctccaaagggtacaggtgcacgtaggttgaaatcattttcagcttgtgttccttacagcccacagccagcaaaaactttttttt

SEQ ID NO: 8879 - RNA, 33 nt, Homo sapiens
  source 1..33: mol_type = unassigned RNA
ccttatgtgcgcgactttgtaatgaacctagtt

SEQ ID NO: 8880 - DNA, 33 bp, Homo sapiens
  source 1..33: mol_type = unassigned DNA
ccttatgtgcgcgactttgtaatgaacctagtt

SEQ ID NO: 8881 - DNA, 33 bp, Homo sapiens
  source 1..33: mol_type = unassigned DNA
aactaggttcattacaaagtcgcgcacataagg

SEQ ID NO: 8882 - RNA, 30 nt, Homo sapiens
  source 1..30: mol_type = unassigned RNA
agtcccgggtcagcctgtggaaatgcacaa

SEQ ID NO: 8883 - DNA, 30 bp, Homo sapiens
  source 1..30: mol_type = unassigned DNA
agtcccgggtcagcctgtggaaatgcacaa

SEQ ID NO: 8884 - DNA, 30 bp, Homo sapiens
  source 1..30: mol_type = unassigned DNA
ttgtgcatttccacaggctgacccgggact

SEQ ID NO: 8885 - RNA, 32 nt, Homo sapiens
  source 1..32: mol_type = unassigned RNA
aatatcagtattccggccaggcctcagagacg

SEQ ID NO: 8886 - DNA, 32 bp, Homo sapiens
  source 1..32: mol_type = unassigned DNA
aatatcagtattccggccaggcctcagagacg

SEQ ID NO: 8887 - DNA, 32 bp, Homo sapiens
  source 1..32: mol_type = unassigned DNA
cgtctctgaggcctggccggaatactgatatt

SEQ ID NO: 8888 - RNA, 31 nt, Homo sapiens
  source 1..31: mol_type = unassigned RNA
aattcactgaccacctcgtcaagacccacac

SEQ ID NO: 8889 - DNA, 31 bp, Homo sapiens
  source 1..31: mol_type = unassigned DNA
aattcactgaccacctcgtcaagacccacac

SEQ ID NO: 8890 - DNA, 31 bp, Homo sapiens
  source 1..31: mol_type = unassigned DNA
gtgtgggtcttgacgaggtggtcagtgaatt

SEQ ID NO: 8891 - RNA, 32 nt, Homo sapiens
  source 1..32: mol_type = unassigned RNA
accaccggtcgatttgcgggcagtctgctttg

SEQ ID NO: 8892 - DNA, 32 bp, Homo sapiens
  source 1..32: mol_type = unassigned DNA
accaccggtcgatttgcgggcagtctgctttg

SEQ ID NO: 8893 - DNA, 32 bp, Homo sapiens
  source 1..32: mol_type = unassigned DNA
caaagcagactgcccgcaaatcgaccggtggt

SEQ ID NO: 8894 - RNA, 30 nt, Homo sapiens
  source 1..30: mol_type = unassigned RNA
agggttgcaaagctagaactcacccgtggg

SEQ ID NO: 8895 - DNA, 30 bp, Homo sapiens
  source 1..30: mol_type = unassigned DNA
agggttgcaaagctagaactcacccgtggg

SEQ ID NO: 8896 - DNA, 30 bp, Homo sapiens
  source 1..30: mol_type = unassigned DNA
cccacgggtgagttctagctttgcaaccct

SEQ ID NO: 8897 - RNA, 181 nt, Homo sapiens
  source 1..181: mol_type = unassigned RNA
gttcatatgtaaaatgaagggtctgtggaaggacatgaataaagcacaggaggttgaagtcagatttgcagctttctaggcaggagataagacaatctgcatcttcacaggagggatggccatgctcctgggggcatcagtgctgattctgtggcttcagccagactgtgagttgtgcatg

SEQ ID NO: 8898 - DNA, 181 bp, Homo sapiens
  source 1..181: mol_type = unassigned DNA
gttcatatgtaaaatgaagggtctgtggaaggacatgaataaagcacaggaggttgaagtcagatttgcagctttctaggcaggagataagacaatctgcatcttcacaggagggatggccatgctcctgggggcatcagtgctgattctgtggcttcagccagactgtgagttgtgcatg

SEQ ID NO: 8899 - DNA, 181 bp, Homo sapiens
  source 1..181: mol_type = unassigned DNA
catgcacaactcacagtctggctgaagccacagaatcagcactgatgcccccaggagcatggccatccctcctgtgaagatgcagattgtcttatctcctgcctagaaagctgcaaatctgacttcaacctcctgtgctttattcatgtccttccacagacccttcattttacatatgaac

SEQ ID NO: 8900 - RNA, 43 nt, Homo sapiens
  source 1..43: mol_type = unassigned RNA
ctgccctctgtgatggagacattctttagtcagactcagtgta

SEQ ID NO: 8901 - DNA, 43 bp, Homo sapiens
  source 1..43: mol_type = unassigned DNA
ctgccctctgtgatggagacattctttagtcagactcagtgta

SEQ ID NO: 8902 - DNA, 43 bp, Homo sapiens
  source 1..43: mol_type = unassigned DNA
tacactgagtctgactaaagaatgtctccatcacagagggcag

SEQ ID NO: 8903 - RNA, 32 nt, Homo sapiens
  source 1..32: mol_type = unassigned RNA
aaactgatttgtttccaatgtcgggttcactt

SEQ ID NO: 8904 - DNA, 32 bp, Homo sapiens
  source 1..32: mol_type = unassigned DNA
aaactgatttgtttccaatgtcgggttcactt

SEQ ID NO: 8905 - DNA, 32 bp, Homo sapiens
  source 1..32: mol_type = unassigned DNA
aagtgaacccgacattggaaacaaatcagttt

SEQ ID NO: 8906 - RNA, 30 nt, Homo sapiens
  source 1..30: mol_type = unassigned RNA
gatttctctggaatacaagctgatattgct

SEQ ID NO: 8907 - DNA, 30 bp, Homo sapiens
  source 1..30: mol_type = unassigned DNA
gatttctctggaatacaagctgatattgct

SEQ ID NO: 8908 - DNA, 30 bp, Homo sapiens
  source 1..30: mol_type = unassigned DNA
agcaatatcagcttgtattccagagaaatc

SEQ ID NO: 8909 - RNA, 28 nt, Homo sapiens
  source 1..28: mol_type = unassigned RNA
gtgtgcaatgtagaactcgcagtcaatg

SEQ ID NO: 8910 - DNA, 28 bp, Homo sapiens
  source 1..28: mol_type = unassigned DNA
gtgtgcaatgtagaactcgcagtcaatg

SEQ ID NO: 8911 - DNA, 28 bp, Homo sapiens
  source 1..28: mol_type = unassigned DNA
cattgactgcgagttctacattgcacac

SEQ ID NO: 8912 - RNA, 41 nt, Homo sapiens
  source 1..41: mol_type = unassigned RNA
agactgcacttcctgcgaggcccctgcagcagcagcggcgt

SEQ ID NO: 8913 - DNA, 41 bp, Homo sapiens
  source 1..41: mol_type = unassigned DNA
agactgcacttcctgcgaggcccctgcagcagcagcggcgt

SEQ ID NO: 8914 - DNA, 41 bp, Homo sapiens
  source 1..41: mol_type = unassigned DNA
acgccgctgctgctgcaggggcctcgcaggaagtgcagtct

SEQ ID NO: 8915 - RNA, 34 nt, Homo sapiens
  source 1..34: mol_type = unassigned RNA
cagaaaaagatgaagaggaagtagagcgagcaca

SEQ ID NO: 8916 - DNA, 34 bp, Homo sapiens
  source 1..34: mol_type = unassigned DNA
cagaaaaagatgaagaggaagtagagcgagcaca

SEQ ID NO: 8917 - DNA, 34 bp, Homo sapiens
  source 1..34: mol_type = unassigned DNA
tgtgctcgctctacttcctcttcatctttttctg

SEQ ID NO: 8918 - RNA, 30 nt, Homo sapiens
  source 1..30: mol_type = unassigned RNA
gacactcgccatcaggactttgcagctctc

SEQ ID NO: 8919 - DNA, 30 bp, Homo sapiens
  source 1..30: mol_type = unassigned DNA
gacactcgccatcaggactttgcagctctc

SEQ ID NO: 8920 - DNA, 30 bp, Homo sapiens
  source 1..30: mol_type = unassigned DNA
gagagctgcaaagtcctgatggcgagtgtc

SEQ ID NO: 8921 - RNA, 31 nt, Homo sapiens
  source 1..31: mol_type = unassigned RNA
ttattaaggtcttctggagagttgtggaagg

SEQ ID NO: 8922 - DNA, 31 bp, Homo sapiens
  source 1..31: mol_type = unassigned DNA
ttattaaggtcttctggagagttgtggaagg

SEQ ID NO: 8923 - DNA, 31 bp, Homo sapiens
  source 1..31: mol_type = unassigned DNA
ccttccacaactctccagaagaccttaataa

SEQ ID NO: 8924 - RNA, 75 nt, Homo sapiens
  source 1..75: mol_type = unassigned RNA
aagatctggagccctcagagagatgctggccatagtgtaactgtgggactggcctcggaaggaggtgggaaacat

SEQ ID NO: 8925 - DNA, 75 bp, Homo sapiens
  source 1..75: mol_type = unassigned DNA
aagatctggagccctcagagagatgctggccatagtgtaactgtgggactggcctcggaaggaggtgggaaacat

SEQ ID NO: 8926 - DNA, 75 bp, Homo sapiens
  source 1..75: mol_type = unassigned DNA
atgtttcccacctccttccgaggccagtcccacagttacactatggccagcatctctctgagggctccagatctt

SEQ ID NO: 8927 - RNA, 28 nt, Homo sapiens
  source 1..28: mol_type = unassigned RNA
tcttcagtggactgtggccaggctcccc

SEQ ID NO: 8928 - DNA, 28 bp, Homo sapiens
  source 1..28: mol_type = unassigned DNA
tcttcagtggactgtggccaggctcccc

SEQ ID NO: 8929 - DNA, 28 bp, Homo sapiens
  source 1..28: mol_type = unassigned DNA
ggggagcctggccacagtccactgaaga

SEQ ID NO: 8930 - RNA, 30 nt, Homo sapiens
  source 1..30: mol_type = unassigned RNA
cctcccagcccccatcgagaaaaccatctc

SEQ ID NO: 8931 - DNA, 30 bp, Homo sapiens
  source 1..30: mol_type = unassigned DNA
cctcccagcccccatcgagaaaaccatctc

SEQ ID NO: 8932 - DNA, 30 bp, Homo sapiens
  source 1..30: mol_type = unassigned DNA
gagatggttttctcgatgggggctgggagg

SEQ ID NO: 8933 - RNA, 160 nt, Homo sapiens
  source 1..160: mol_type = unassigned RNA
tgcttttctgtaaatgcctcctccagcccgacccaatgaatctgcatttaccagactgacgtgggcgagttcacaaaaccgctgtattgtgaattgagtatctgccgagatgagtgtggaaacacccaaggattccttccatcaccgactcactcacaca

SEQ ID NO: 8934 - DNA, 160 bp, Homo sapiens
  source 1..160: mol_type = unassigned DNA
tgcttttctgtaaatgcctcctccagcccgacccaatgaatctgcatttaccagactgacgtgggcgagttcacaaaaccgctgtattgtgaattgagtatctgccgagatgagtgtggaaacacccaaggattccttccatcaccgactcactcacaca

SEQ ID NO: 8935 - DNA, 160 bp, Homo sapiens
  source 1..160: mol_type = unassigned DNA
tgtgtgagtgagtcggtgatggaaggaatccttgggtgtttccacactcatctcggcagatactcaattcacaatacagcggttttgtgaactcgcccacgtcagtctggtaaatgcagattcattgggtcgggctggaggaggcatttacagaaaagca

SEQ ID NO: 8936 - RNA, 53 nt, Homo sapiens
  source 1..53: mol_type = unassigned RNA
acagctctgaggatttatattcctcccgtgtgatgatggaccagagagtctta

SEQ ID NO: 8937 - DNA, 53 bp, Homo sapiens
  source 1..53: mol_type = unassigned DNA
acagctctgaggatttatattcctcccgtgtgatgatggaccagagagtctta

SEQ ID NO: 8938 - DNA, 53 bp, Homo sapiens
  source 1..53: mol_type = unassigned DNA
taagactctctggtccatcatcacacgggaggaatataaatcctcagagctgt

SEQ ID NO: 8939 - RNA, 27 nt, Homo sapiens
  source 1..27: mol_type = unassigned RNA
gggtagttcttggccagatctcccagg

SEQ ID NO: 8940 - DNA, 27 bp, Homo sapiens
  source 1..27: mol_type = unassigned DNA
gggtagttcttggccagatctcccagg

SEQ ID NO: 8941 - DNA, 27 bp, Homo sapiens
  source 1..27: mol_type = unassigned DNA
cctgggagatctggccaagaactaccc

SEQ ID NO: 8942 - RNA, 38 nt, Homo sapiens
  source 1..38: mol_type = unassigned RNA
tcgccacactgtcttccacaatggttgaactaacactc

SEQ ID NO: 8943 - DNA, 38 bp, Homo sapiens
  source 1..38: mol_type = unassigned DNA
tcgccacactgtcttccacaatggttgaactaacactc

SEQ ID NO: 8944 - DNA, 38 bp, Homo sapiens
  source 1..38: mol_type = unassigned DNA
gagtgttagttcaaccattgtggaagacagtgtggcga

SEQ ID NO: 8945 - RNA, 26 nt, Homo sapiens
  source 1..26: mol_type = unassigned RNA
tttgaaaatggtattactcacataag

SEQ ID NO: 8946 - DNA, 26 bp, Homo sapiens
  source 1..26: mol_type = unassigned DNA
tttgaaaatggtattactcacataag

SEQ ID NO: 8947 - DNA, 26 bp, Homo sapiens
  source 1..26: mol_type = unassigned DNA
cttatgtgagtaataccattttcaaa

SEQ ID NO: 8948 - RNA, 32 nt, Homo sapiens
  source 1..32: mol_type = unassigned RNA
gtgcattagaaatttcagttggctgtaaaaat

SEQ ID NO: 8949 - DNA, 32 bp, Homo sapiens
  source 1..32: mol_type = unassigned DNA
gtgcattagaaatttcagttggctgtaaaaat

SEQ ID NO: 8950 - DNA, 32 bp, Homo sapiens
  source 1..32: mol_type = unassigned DNA
atttttacagccaactgaaatttctaatgcac

SEQ ID NO: 8951 - RNA, 55 nt, Homo sapiens
  source 1..55: mol_type = unassigned RNA
aaaagattgtaaagacaaggagagaggatgtgatgactcatgaatgaactggccc

SEQ ID NO: 8952 - DNA, 55 bp, Homo sapiens
  source 1..55: mol_type = unassigned DNA
aaaagattgtaaagacaaggagagaggatgtgatgactcatgaatgaactggccc

SEQ ID NO: 8953 - DNA, 55 bp, Homo sapiens
  source 1..55: mol_type = unassigned DNA
gggccagttcattcatgagtcatcacatcctctctccttgtctttacaatctttt

SEQ ID NO: 8954 - RNA, 127 nt, Homo sapiens
  source 1..127: mol_type = unassigned RNA
gctgctccaggagagtgggagtggccttcggatcagttgctttcttctcactcttcactgtctgcagccctgcctgcactaaggacttctgcacaggctgcgtcaatttgagcaaagctaagtcccc

SEQ ID NO: 8955 - DNA, 127 bp, Homo sapiens
  source 1..127: mol_type = unassigned DNA
gctgctccaggagagtgggagtggccttcggatcagttgctttcttctcactcttcactgtctgcagccctgcctgcactaaggacttctgcacaggctgcgtcaatttgagcaaagctaagtcccc

SEQ ID NO: 8956 - DNA, 127 bp, Homo sapiens
  source 1..127: mol_type = unassigned DNA
ggggacttagctttgctcaaattgacgcagcctgtgcagaagtccttagtgcaggcagggctgcagacagtgaagagtgagaagaaagcaactgatccgaaggccactcccactctcctggagcagc

SEQ ID NO: 8957 - RNA, 33 nt, Homo sapiens
  source 1..33: mol_type = unassigned RNA
agcagggttttgaggatccttgtcccagcccca

SEQ ID NO: 8958 - DNA, 33 bp, Homo sapiens
  source 1..33: mol_type = unassigned DNA
agcagggttttgaggatccttgtcccagcccca

SEQ ID NO: 8959 - DNA, 33 bp, Homo sapiens
  source 1..33: mol_type = unassigned DNA
tggggctgggacaaggatcctcaaaaccctgct

SEQ ID NO: 8960 - RNA, 33 nt, Homo sapiens
  source 1..33: mol_type = unassigned RNA
ggtgacgtgcagctgtttgatctccagaaaagc

SEQ ID NO: 8961 - DNA, 33 bp, Homo sapiens
  source 1..33: mol_type = unassigned DNA
ggtgacgtgcagctgtttgatctccagaaaagc

SEQ ID NO: 8962 - DNA, 33 bp, Homo sapiens
  source 1..33: mol_type = unassigned DNA
gcttttctggagatcaaacagctgcacgtcacc

SEQ ID NO: 8963 - RNA, 30 nt, Homo sapiens
  source 1..30: mol_type = unassigned RNA
cacttactgatactcctgacactacagcaa

SEQ ID NO: 8964 - DNA, 30 bp, Homo sapiens
  source 1..30: mol_type = unassigned DNA
cacttactgatactcctgacactacagcaa

SEQ ID NO: 8965 - DNA, 30 bp, Homo sapiens
  source 1..30: mol_type = unassigned DNA
ttgctgtagtgtcaggagtatcagtaagtg

SEQ ID NO: 8966 - RNA, 30 nt, Homo sapiens
  source 1..30: mol_type = unassigned RNA
aaacttcaaaaatggtagaacacacacgta

SEQ ID NO: 8967 - DNA, 30 bp, Homo sapiens
  source 1..30: mol_type = unassigned DNA
aaacttcaaaaatggtagaacacacacgta

SEQ ID NO: 8968 - DNA, 30 bp, Homo sapiens
  source 1..30: mol_type = unassigned DNA
tacgtgtgtgttctaccatttttgaagttt

SEQ ID NO: 8969 - RNA, 32 nt, Homo sapiens
  source 1..32: mol_type = unassigned RNA
gtactgagtttgagccagagggacttccagaa

SEQ ID NO: 8970 - DNA, 32 bp, Homo sapiens
  source 1..32: mol_type = unassigned DNA
gtactgagtttgagccagagggacttccagaa

SEQ ID NO: 8971 - DNA, 32 bp, Homo sapiens
  source 1..32: mol_type = unassigned DNA
ttctggaagtccctctggctcaaactcagtac

SEQ ID NO: 8972 - RNA, 50 nt, Homo sapiens
  source 1..50: mol_type = unassigned RNA
aaagcatgcccaagctgttagaattcactgtggtttcaggagtatcaatc

SEQ ID NO: 8973 - DNA, 50 bp, Homo sapiens
  source 1..50: mol_type = unassigned DNA
aaagcatgcccaagctgttagaattcactgtggtttcaggagtatcaatc

SEQ ID NO: 8974 - DNA, 50 bp, Homo sapiens
  source 1..50: mol_type = unassigned DNA
gattgatactcctgaaaccacagtgaattctaacagcttgggcatgcttt

SEQ ID NO: 8975 - RNA, 83 nt, Homo sapiens
  source 1..83: mol_type = unassigned RNA
gcctcaggtcaatgatgagctgacatgtattctgaatctaaagttgattattagtactttagttctagaattactgagacatg

SEQ ID NO: 8976 - DNA, 83 bp, Homo sapiens
  source 1..83: mol_type = unassigned DNA
gcctcaggtcaatgatgagctgacatgtattctgaatctaaagttgattattagtactttagttctagaattactgagacatg

SEQ ID NO: 8977 - DNA, 83 bp, Homo sapiens
  source 1..83: mol_type = unassigned DNA
catgtctcagtaattctagaactaaagtactaataatcaactttagattcagaatacatgtcagctcatcattgacctgaggc

SEQ ID NO: 8978 - RNA, 99 nt, Homo sapiens
  source 1..99: mol_type = unassigned RNA
attaagagtcactctccattttctcctacttccttctctacccccagtcatctgctagtcggctttctgtctctatagatttgcctgctctggatattt

SEQ ID NO: 8979 - DNA, 99 bp, Homo sapiens
  source 1..99: mol_type = unassigned DNA
attaagagtcactctccattttctcctacttccttctctacccccagtcatctgctagtcggctttctgtctctatagatttgcctgctctggatattt

SEQ ID NO: 8980 - DNA, 99 bp, Homo sapiens
  source 1..99: mol_type = unassigned DNA
aaatatccagagcaggcaaatctatagagacagaaagccgactagcagatgactgggggtagagaaggaagtaggagaaaatggagagtgactcttaat

SEQ ID NO: 8981 - RNA, 190 nt, Homo sapiens
  source 1..190: mol_type = unassigned RNA
caattttatcattgtagccaaaaaatgttcaacagcatgagaaggttcagaaagccagtacagagggagtcgccattcagggtcaacagggaactcgacttcttcctgaacagctcattaaagaagcctttattctcagtgacctttttgatattggagaattggcagctgttgagcttcttcttgctgg

SEQ ID NO: 8982 - DNA, 190 bp, Homo sapiens
  source 1..190: mol_type = unassigned DNA
caattttatcattgtagccaaaaaatgttcaacagcatgagaaggttcagaaagccagtacagagggagtcgccattcagggtcaacagggaactcgacttcttcctgaacagctcattaaagaagcctttattctcagtgacctttttgatattggagaattggcagctgttgagcttcttcttgctgg

SEQ ID NO: 8983 - DNA, 190 bp, Homo sapiens
  source 1..190: mol_type = unassigned DNA
ccagcaagaagaagctcaacagctgccaattctccaatatcaaaaaggtcactgagaataaaggcttctttaatgagctgttcaggaagaagtcgagttccctgttgaccctgaatggcgactccctctgtactggctttctgaaccttctcatgctgttgaacattttttggctacaatgataaaattg

SEQ ID NO: 8984 - RNA, 26 nt, Homo sapiens
  source 1..26: mol_type = unassigned RNA
cttattcctgttcctgcaggtagata

SEQ ID NO: 8985 - DNA, 26 bp, Homo sapiens
  source 1..26: mol_type = unassigned DNA
cttattcctgttcctgcaggtagata

SEQ ID NO: 8986 - DNA, 26 bp, Homo sapiens
  source 1..26: mol_type = unassigned DNA
tatctacctgcaggaacaggaataag

SEQ ID NO: 8987 - RNA, 31 nt, Homo sapiens
  source 1..31: mol_type = unassigned RNA
ctgattctgtcctctttcctcccagttccct

SEQ ID NO: 8988 - DNA, 31 bp, Homo sapiens
  source 1..31: mol_type = unassigned DNA
ctgattctgtcctctttcctcccagttccct

SEQ ID NO: 8989 - DNA, 31 bp, Homo sapiens
  source 1..31: mol_type = unassigned DNA
agggaactgggaggaaagaggacagaatcag

SEQ ID NO: 8990 - RNA, 31 nt, Homo sapiens
  source 1..31: mol_type = unassigned RNA
ggtaaagaatgtgacccagattgaacctttc

SEQ ID NO: 8991 - DNA, 31 bp, Homo sapiens
  source 1..31: mol_type = unassigned DNA
ggtaaagaatgtgacccagattgaacctttc

SEQ ID NO: 8992 - DNA, 31 bp, Homo sapiens
  source 1..31: mol_type = unassigned DNA
gaaaggttcaatctgggtcacattctttacc

SEQ ID NO: 8993 - RNA, 28 nt, Homo sapiens
  source 1..28: mol_type = unassigned RNA
taccattttgaggatctggactccgttt

SEQ ID NO: 8994 - DNA, 28 bp, Homo sapiens
  source 1..28: mol_type = unassigned DNA
taccattttgaggatctggactccgttt

SEQ ID NO: 8995 - DNA, 28 bp, Homo sapiens
  source 1..28: mol_type = unassigned DNA
aaacggagtccagatcctcaaaatggta

SEQ ID NO: 8996 - RNA, 58 nt, Homo sapiens
  source 1..58: mol_type = unassigned RNA
aaacaaacaaacaaacagtgaaagggaccagtagagaaatggaacatcttttattgac

SEQ ID NO: 8997 - DNA, 58 bp, Homo sapiens
  source 1..58: mol_type = unassigned DNA
aaacaaacaaacaaacagtgaaagggaccagtagagaaatggaacatcttttattgac

SEQ ID NO: 8998 - DNA, 58 bp, Homo sapiens
  source 1..58: mol_type = unassigned DNA
gtcaataaaagatgttccatttctctactggtccctttcactgtttgtttgtttgttt

SEQ ID NO: 8999 - RNA, 31 nt, Homo sapiens
  source 1..31: mol_type = unassigned RNA
tgtgaagctttgttgcacaggtaaactcacg

SEQ ID NO: 9000 - DNA, 31 bp, Homo sapiens
  source 1..31: mol_type = unassigned DNA
tgtgaagctttgttgcacaggtaaactcacg

SEQ ID NO: 9001 - DNA, 31 bp, Homo sapiens
  source 1..31: mol_type = unassigned DNA
cgtgagtttacctgtgcaacaaagcttcaca

SEQ ID NO: 9002 - RNA, 27 nt, Homo sapiens
  source 1..27: mol_type = unassigned RNA
gacccaggatctgtttgggcgagtgcc

SEQ ID NO: 9003 - DNA, 27 bp, Homo sapiens
  source 1..27: mol_type = unassigned DNA
gacccaggatctgtttgggcgagtgcc

SEQ ID NO: 9004 - DNA, 27 bp, Homo sapiens
  source 1..27: mol_type = unassigned DNA
ggcactcgcccaaacagatcctgggtc

SEQ ID NO: 9005 - RNA, 172 nt, Homo sapiens
  source 1..172: mol_type = unassigned RNA
caggggttcgggtgtgagaaacgtcctgcctaaccacctgaccacaaggcagacaaaggcctaaccaaagacacatctctatcatatcatgctggacaaagatccgaggaacaccacaacgaaatcccactggaacaagggccagaaccatctcatcacgggaacatcttat

SEQ ID NO: 9006 - DNA, 172 bp, Homo sapiens
  source 1..172: mol_type = unassigned DNA
caggggttcgggtgtgagaaacgtcctgcctaaccacctgaccacaaggcagacaaaggcctaaccaaagacacatctctatcatatcatgctggacaaagatccgaggaacaccacaacgaaatcccactggaacaagggccagaaccatctcatcacgggaacatcttat

SEQ ID NO: 9007 - DNA, 172 bp, Homo sapiens
  source 1..172: mol_type = unassigned DNA
ataagatgttcccgtgatgagatggttctggcccttgttccagtgggatttcgttgtggtgttcctcggatctttgtccagcatgatatgatagagatgtgtctttggttaggcctttgtctgccttgtggtcaggtggttaggcaggacgtttctcacacccgaacccctg

SEQ ID NO: 9008 - RNA, 41 nt, Homo sapiens
  source 1..41: mol_type = unassigned RNA
ctgcctcagcctccggagcaactgggactacaggcgcccgc

SEQ ID NO: 9009 - DNA, 41 bp, Homo sapiens
  source 1..41: mol_type = unassigned DNA
ctgcctcagcctccggagcaactgggactacaggcgcccgc

SEQ ID NO: 9010 - DNA, 41 bp, Homo sapiens
  source 1..41: mol_type = unassigned DNA
gcgggcgcctgtagtcccagttgctccggaggctgaggcag

SEQ ID NO: 9011 - RNA, 135 nt, Homo sapiens
  source 1..135: mol_type = unassigned RNA
cagttaaagcttttctctgccaacacaatatgaagttaataccagtgtgagacaggcacagtcagtgtcacttcagtaaccagaaaatagctactttgaaccttattactcgtttatgcctcctatattaaaatg

SEQ ID NO: 9012 - DNA, 135 bp, Homo sapiens
  source 1..135: mol_type = unassigned DNA
cagttaaagcttttctctgccaacacaatatgaagttaataccagtgtgagacaggcacagtcagtgtcacttcagtaaccagaaaatagctactttgaaccttattactcgtttatgcctcctatattaaaatg

SEQ ID NO: 9013 - DNA, 135 bp, Homo sapiens
  source 1..135: mol_type = unassigned DNA
cattttaatataggaggcataaacgagtaataaggttcaaagtagctattttctggttactgaagtgacactgactgtgcctgtctcacactggtattaacttcatattgtgttggcagagaaaagctttaactg

SEQ ID NO: 9014 - RNA, 27 nt, Homo sapiens
  source 1..27: mol_type = unassigned RNA
ttgttagtgatgcttttaaatttaaat

SEQ ID NO: 9015 - DNA, 27 bp, Homo sapiens
  source 1..27: mol_type = unassigned DNA
ttgttagtgatgcttttaaatttaaat

SEQ ID NO: 9016 - DNA, 27 bp, Homo sapiens
  source 1..27: mol_type = unassigned DNA
atttaaatttaaaagcatcactaacaa

SEQ ID NO: 9017 - RNA, 26 nt, Homo sapiens
  source 1..26: mol_type = unassigned RNA
atatatgtttaactggctctgataaa

SEQ ID NO: 9018 - DNA, 26 bp, Homo sapiens
  source 1..26: mol_type = unassigned DNA
atatatgtttaactggctctgataaa

SEQ ID NO: 9019 - DNA, 26 bp, Homo sapiens
  source 1..26: mol_type = unassigned DNA
tttatcagagccagttaaacatatat

SEQ ID NO: 9020 - RNA, 84 nt, Homo sapiens
  source 1..84: mol_type = unassigned RNA
tgcaggtctggcattcctccaggttatctggccagtgtagactcctccatctgaatatgaacctccagggtaagaattttccag

SEQ ID NO: 9021 - DNA, 84 bp, Homo sapiens
  source 1..84: mol_type = unassigned DNA
tgcaggtctggcattcctccaggttatctggccagtgtagactcctccatctgaatatgaacctccagggtaagaattttccag

SEQ ID NO: 9022 - DNA, 84 bp, Homo sapiens
  source 1..84: mol_type = unassigned DNA
ctggaaaattcttaccctggaggttcatattcagatggaggagtctacactggccagataacctggaggaatgccagacctgca

SEQ ID NO: 9023 - RNA, 39 nt, Homo sapiens
  source 1..39: mol_type = unassigned RNA
aatggcactggagagaattccctgaggtcaatggcaagc

SEQ ID NO: 9024 - DNA, 39 bp, Homo sapiens
  source 1..39: mol_type = unassigned DNA
aatggcactggagagaattccctgaggtcaatggcaagc

SEQ ID NO: 9025 - DNA, 39 bp, Homo sapiens
  source 1..39: mol_type = unassigned DNA
gcttgccattgacctcagggaattctctccagtgccatt

SEQ ID NO: 9026 - RNA, 30 nt, Homo sapiens
  source 1..30: mol_type = unassigned RNA
ccgcctctttaacctggcaggggcggttca

SEQ ID NO: 9027 - DNA, 30 bp, Homo sapiens
  source 1..30: mol_type = unassigned DNA
ccgcctctttaacctggcaggggcggttca

SEQ ID NO: 9028 - DNA, 30 bp, Homo sapiens
  source 1..30: mol_type = unassigned DNA
tgaaccgcccctgccaggttaaagaggcgg

SEQ ID NO: 9029 - RNA, 30 nt, Homo sapiens
  source 1..30: mol_type = unassigned RNA
cttcctggtaatcctctggcccagcctcat

SEQ ID NO: 9030 - DNA, 30 bp, Homo sapiens
  source 1..30: mol_type = unassigned DNA
cttcctggtaatcctctggcccagcctcat

SEQ ID NO: 9031 - DNA, 30 bp, Homo sapiens
  source 1..30: mol_type = unassigned DNA
atgaggctgggccagaggattaccaggaag

SEQ ID NO: 9032 - RNA, 108 nt, Homo sapiens
  source 1..108: mol_type = unassigned RNA
ggattttatagatgagcttgaggaggcgtgtctgattcacgtagggccagagagattggtcggaccaggcgtgacacttgcatcacgcacaaagaagctggccatccc

SEQ ID NO: 9033 - DNA, 108 bp, Homo sapiens
  source 1..108: mol_type = unassigned DNA
ggattttatagatgagcttgaggaggcgtgtctgattcacgtagggccagagagattggtcggaccaggcgtgacacttgcatcacgcacaaagaagctggccatccc

SEQ ID NO: 9034 - DNA, 108 bp, Homo sapiens
  source 1..108: mol_type = unassigned DNA
gggatggccagcttctttgtgcgtgatgcaagtgtcacgcctggtccgaccaatctctctggccctacgtgaatcagacacgcctcctcaagctcatctataaaatcc

SEQ ID NO: 9035 - RNA, 26 nt, Homo sapiens
  source 1..26: mol_type = unassigned RNA
tctacaagaccctgataatgaggtga

SEQ ID NO: 9036 - DNA, 26 bp, Homo sapiens
  source 1..26: mol_type = unassigned DNA
tctacaagaccctgataatgaggtga

SEQ ID NO: 9037 - DNA, 26 bp, Homo sapiens
  source 1..26: mol_type = unassigned DNA
tcacctcattatcagggtcttgtaga

SEQ ID NO: 9038 - RNA, 31 nt, Homo sapiens
  source 1..31: mol_type = unassigned RNA
actttttctggaccctggtgtctacgatttc

SEQ ID NO: 9039 - DNA, 31 bp, Homo sapiens
  source 1..31: mol_type = unassigned DNA
actttttctggaccctggtgtctacgatttc

SEQ ID NO: 9040 - DNA, 31 bp, Homo sapiens
  source 1..31: mol_type = unassigned DNA
gaaatcgtagacaccagggtccagaaaaagt

SEQ ID NO: 9041 - RNA, 30 nt, Homo sapiens
  source 1..30: mol_type = unassigned RNA
tgagcttctgaacatttcttctcagactaa

SEQ ID NO: 9042 - DNA, 30 bp, Homo sapiens
  source 1..30: mol_type = unassigned DNA
tgagcttctgaacatttcttctcagactaa

SEQ ID NO: 9043 - DNA, 30 bp, Homo sapiens
  source 1..30: mol_type = unassigned DNA
ttagtctgagaagaaatgttcagaagctca

SEQ ID NO: 9044 - RNA, 32 nt, Homo sapiens
  source 1..32: mol_type = unassigned RNA
ctcaagttcagattcgtattttggatgtcaat

SEQ ID NO: 9045 - DNA, 32 bp, Homo sapiens
  source 1..32: mol_type = unassigned DNA
ctcaagttcagattcgtattttggatgtcaat

SEQ ID NO: 9046 - DNA, 32 bp, Homo sapiens
  source 1..32: mol_type = unassigned DNA
attgacatccaaaatacgaatctgaacttgag

SEQ ID NO: 9047 - RNA, 29 nt, Homo sapiens
  source 1..29: mol_type = unassigned RNA
tattcctcgccgcctgagttgcctgcaga

SEQ ID NO: 9048 - DNA, 29 bp, Homo sapiens
  source 1..29: mol_type = unassigned DNA
tattcctcgccgcctgagttgcctgcaga

SEQ ID NO: 9049 - DNA, 29 bp, Homo sapiens
  source 1..29: mol_type = unassigned DNA
tctgcaggcaactcaggcggcgaggaata

SEQ ID NO: 9050 - RNA, 33 nt, Homo sapiens
  source 1..33: mol_type = unassigned RNA
tttatgtatacatctgaatgaaaagcaaagcta

SEQ ID NO: 9051 - DNA, 33 bp, Homo sapiens
  source 1..33: mol_type = unassigned DNA
tttatgtatacatctgaatgaaaagcaaagcta

SEQ ID NO: 9052 - DNA, 33 bp, Homo sapiens
  source 1..33: mol_type = unassigned DNA
tagctttgcttttcattcagatgtatacataaa

SEQ ID NO: 9053 - RNA, 170 nt, Homo sapiens
  source 1..170: mol_type = unassigned RNA
gaggctaacaaggggaagtggctcagatagtgagaagcttaaaggaatccagtagtatgctctgaatctgcccacttctgagtcatcacccttttgttcactccaccagcaccttcttattaaacactttctgtgtgccaagtactgtactggaaacacaaagacagatg

SEQ ID NO: 9054 - DNA, 170 bp, Homo sapiens
  source 1..170: mol_type = unassigned DNA
gaggctaacaaggggaagtggctcagatagtgagaagcttaaaggaatccagtagtatgctctgaatctgcccacttctgagtcatcacccttttgttcactccaccagcaccttcttattaaacactttctgtgtgccaagtactgtactggaaacacaaagacagatg

SEQ ID NO: 9055 - DNA, 170 bp, Homo sapiens
  source 1..170: mol_type = unassigned DNA
catctgtctttgtgtttccagtacagtacttggcacacagaaagtgtttaataagaaggtgctggtggagtgaacaaaagggtgatgactcagaagtgggcagattcagagcatactactggattcctttaagcttctcactatctgagccacttccccttgttagcctc

SEQ ID NO: 9056 - RNA, 32 nt, Homo sapiens
  source 1..32: mol_type = unassigned RNA
gtgcagtgtcagactgtgcctactctgatggt

SEQ ID NO: 9057 - DNA, 32 bp, Homo sapiens
  source 1..32: mol_type = unassigned DNA
gtgcagtgtcagactgtgcctactctgatggt

SEQ ID NO: 9058 - DNA, 32 bp, Homo sapiens
  source 1..32: mol_type = unassigned DNA
accatcagagtaggcacagtctgacactgcac

SEQ ID NO: 9059 - RNA, 48 nt, Homo sapiens
  source 1..48: mol_type = unassigned RNA
atacaaaaaatttgtcgggcgtggtggcggtcgcctgtagtcccagct

SEQ ID NO: 9060 - DNA, 48 bp, Homo sapiens
  source 1..48: mol_type = unassigned DNA
atacaaaaaatttgtcgggcgtggtggcggtcgcctgtagtcccagct

SEQ ID NO: 9061 - DNA, 48 bp, Homo sapiens
  source 1..48: mol_type = unassigned DNA
agctgggactacaggcgaccgccaccacgcccgacaaattttttgtat

SEQ ID NO: 9062 - RNA, 46 nt, Homo sapiens
  source 1..46: mol_type = unassigned RNA
taccttagcaggctgatgcttgtccccagatccccaagacaacagt

SEQ ID NO: 9063 - DNA, 46 bp, Homo sapiens
  source 1..46: mol_type = unassigned DNA
taccttagcaggctgatgcttgtccccagatccccaagacaacagt

SEQ ID NO: 9064 - DNA, 46 bp, Homo sapiens
  source 1..46: mol_type = unassigned DNA
actgttgtcttggggatctggggacaagcatcagcctgctaaggta

SEQ ID NO: 9065 - RNA, 31 nt, Homo sapiens
  source 1..31: mol_type = unassigned RNA
cgttgtcgaacatgtcctcggactgcgggtc

SEQ ID NO: 9066 - DNA, 31 bp, Homo sapiens
  source 1..31: mol_type = unassigned DNA
cgttgtcgaacatgtcctcggactgcgggtc

SEQ ID NO: 9067 - DNA, 31 bp, Homo sapiens
  source 1..31: mol_type = unassigned DNA
gacccgcagtccgaggacatgttcgacaacg

SEQ ID NO: 9068 - RNA, 57 nt, Homo sapiens
  source 1..57: mol_type = unassigned RNA
tccacctgcctgcagacagaccggcagggcaggctggctccgggaagtgaggcacag

SEQ ID NO: 9069 - DNA, 57 bp, Homo sapiens
  source 1..57: mol_type = unassigned DNA
tccacctgcctgcagacagaccggcagggcaggctggctccgggaagtgaggcacag

SEQ ID NO: 9070 - DNA, 57 bp, Homo sapiens
  source 1..57: mol_type = unassigned DNA
ctgtgcctcacttcccggagccagcctgccctgccggtctgtctgcaggcaggtgga

SEQ ID NO: 9071 - RNA, 59 nt, Homo sapiens
  source 1..59: mol_type = unassigned RNA
ggaattcactgaccacctcgtcaagacccacaccagagtctcggtgcagcggacccagg

SEQ ID NO: 9072 - DNA, 59 bp, Homo sapiens
  source 1..59: mol_type = unassigned DNA
ggaattcactgaccacctcgtcaagacccacaccagagtctcggtgcagcggacccagg

SEQ ID NO: 9073 - DNA, 59 bp, Homo sapiens
  source 1..59: mol_type = unassigned DNA
cctgggtccgctgcaccgagactctggtgtgggtcttgacgaggtggtcagtgaattcc

SEQ ID NO: 9074 - RNA, 47 nt, Homo sapiens
  source 1..47: mol_type = unassigned RNA
ctgctgatccctgatctagaagcttagcaggctgtgctgacaatctc

SEQ ID NO: 9075 - DNA, 47 bp, Homo sapiens
  source 1..47: mol_type = unassigned DNA
ctgctgatccctgatctagaagcttagcaggctgtgctgacaatctc

SEQ ID NO: 9076 - DNA, 47 bp, Homo sapiens
  source 1..47: mol_type = unassigned DNA
gagattgtcagcacagcctgctaagcttctagatcagggatcagcag

SEQ ID NO: 9077 - RNA, 28 nt, Homo sapiens
  source 1..28: mol_type = unassigned RNA
gttttccctgagaacgtaaaacagcagg

SEQ ID NO: 9078 - DNA, 28 bp, Homo sapiens
  source 1..28: mol_type = unassigned DNA
gttttccctgagaacgtaaaacagcagg

SEQ ID NO: 9079 - DNA, 28 bp, Homo sapiens
  source 1..28: mol_type = unassigned DNA
cctgctgttttacgttctcagggaaaac

SEQ ID NO: 9080 - RNA, 107 nt, Homo sapiens
  source 1..107: mol_type = unassigned RNA
ctggtggtctaggactgaagctttgccccctgtggtggtatattgtgaccagaccccgggagtggcccatgtagagagacagacctcaccctgtcatgcctgcaagt

SEQ ID NO: 9081 - DNA, 107 bp, Homo sapiens
  source 1..107: mol_type = unassigned DNA
ctggtggtctaggactgaagctttgccccctgtggtggtatattgtgaccagaccccgggagtggcccatgtagagagacagacctcaccctgtcatgcctgcaagt

SEQ ID NO: 9082 - DNA, 107 bp, Homo sapiens
  source 1..107: mol_type = unassigned DNA
acttgcaggcatgacagggtgaggtctgtctctctacatgggccactcccggggtctggtcacaatataccaccacagggggcaaagcttcagtcctagaccaccag

SEQ ID NO: 9083 - RNA, 50 nt, Homo sapiens
  source 1..50: mol_type = unassigned RNA
ttttgctcttctaaaactcaaacttctagcaatggcagtactaacaaagc

SEQ ID NO: 9084 - DNA, 50 bp, Homo sapiens
  source 1..50: mol_type = unassigned DNA
ttttgctcttctaaaactcaaacttctagcaatggcagtactaacaaagc

SEQ ID NO: 9085 - DNA, 50 bp, Homo sapiens
  source 1..50: mol_type = unassigned DNA
gctttgttagtactgccattgctagaagtttgagttttagaagagcaaaa

SEQ ID NO: 9086 - RNA, 30 nt, Homo sapiens
  source 1..30: mol_type = unassigned RNA
gaagtgattgcactcttcgaccagacccgc

SEQ ID NO: 9087 - DNA, 30 bp, Homo sapiens
  source 1..30: mol_type = unassigned DNA
gaagtgattgcactcttcgaccagacccgc

SEQ ID NO: 9088 - DNA, 30 bp, Homo sapiens
  source 1..30: mol_type = unassigned DNA
gcgggtctggtcgaagagtgcaatcacttc

SEQ ID NO: 9089 - RNA, 43 nt, Homo sapiens
  source 1..43: mol_type = unassigned RNA
ttttgcaatgatagaaccacttcagtctttgcagtaattacag

SEQ ID NO: 9090 - DNA, 43 bp, Homo sapiens
  source 1..43: mol_type = unassigned DNA
ttttgcaatgatagaaccacttcagtctttgcagtaattacag

SEQ ID NO: 9091 - DNA, 43 bp, Homo sapiens
  source 1..43: mol_type = unassigned DNA
ctgtaattactgcaaagactgaagtggttctatcattgcaaaa

SEQ ID NO: 9092 - RNA, 33 nt, Homo sapiens
  source 1..33: mol_type = unassigned RNA
ttaaaagttgtgggatttgtaagaagaaccatg

SEQ ID NO: 9093 - DNA, 33 bp, Homo sapiens
  source 1..33: mol_type = unassigned DNA
ttaaaagttgtgggatttgtaagaagaaccatg

SEQ ID NO: 9094 - DNA, 33 bp, Homo sapiens
  source 1..33: mol_type = unassigned DNA
catggttcttcttacaaatcccacaacttttaa

SEQ ID NO: 9095 - RNA, 24 nt, Homo sapiens
  source 1..24: mol_type = unassigned RNA
ttccttgtccttcataactttggc

SEQ ID NO: 9096 - DNA, 24 bp, Homo sapiens
  source 1..24: mol_type = unassigned DNA
ttccttgtccttcataactttggc

SEQ ID NO: 9097 - DNA, 24 bp, Homo sapiens
  source 1..24: mol_type = unassigned DNA
gccaaagttatgaaggacaaggaa

SEQ ID NO: 9098 - RNA, 24 nt, Homo sapiens
  source 1..24: mol_type = unassigned RNA
atttgataatggtagaaatcaacc

SEQ ID NO: 9099 - DNA, 24 bp, Homo sapiens
  source 1..24: mol_type = unassigned DNA
atttgataatggtagaaatcaacc

SEQ ID NO: 9100 - DNA, 24 bp, Homo sapiens
  source 1..24: mol_type = unassigned DNA
ggttgatttctaccattatcaaat

SEQ ID NO: 9101 - RNA, 52 nt, Homo sapiens
  source 1..52: mol_type = unassigned RNA
ttctatattgatcactaggttaggtttctcatactgggtgcttagtcttcca

SEQ ID NO: 9102 - DNA, 52 bp, Homo sapiens
  source 1..52: mol_type = unassigned DNA
ttctatattgatcactaggttaggtttctcatactgggtgcttagtcttcca

SEQ ID NO: 9103 - DNA, 52 bp, Homo sapiens
  source 1..52: mol_type = unassigned DNA
tggaagactaagcacccagtatgagaaacctaacctagtgatcaatatagaa

SEQ ID NO: 9104 - RNA, 34 nt, Homo sapiens
  source 1..34: mol_type = unassigned RNA
acggtaattgagattgtctgtctgatatcctacc

SEQ ID NO: 9105 - DNA, 34 bp, Homo sapiens
  source 1..34: mol_type = unassigned DNA
acggtaattgagattgtctgtctgatatcctacc

SEQ ID NO: 9106 - DNA, 34 bp, Homo sapiens
  source 1..34: mol_type = unassigned DNA
ggtaggatatcagacagacaatctcaattaccgt

SEQ ID NO: 9107 - RNA, 50 nt, Homo sapiens
  source 1..50: mol_type = unassigned RNA
tttcttcccaggatggagaccggcgcgggctgggccgggaagcagccccc

SEQ ID NO: 9108 - DNA, 50 bp, Homo sapiens
  source 1..50: mol_type = unassigned DNA
tttcttcccaggatggagaccggcgcgggctgggccgggaagcagccccc

SEQ ID NO: 9109 - DNA, 50 bp, Homo sapiens
  source 1..50: mol_type = unassigned DNA
gggggctgcttcccggcccagcccgcgccggtctccatcctgggaagaaa

SEQ ID NO: 9110 - RNA, 93 nt, Homo sapiens
  source 1..93: mol_type = unassigned RNA
aactagggaactttcctcctctccccagagaggatttgtttagattgcagagtaagagtctctccctctttgtctctggggcagaaaaagggc

SEQ ID NO: 9111 - DNA, 93 bp, Homo sapiens
  source 1..93: mol_type = unassigned DNA
aactagggaactttcctcctctccccagagaggatttgtttagattgcagagtaagagtctctccctctttgtctctggggcagaaaaagggc

SEQ ID NO: 9112 - DNA, 93 bp, Homo sapiens
  source 1..93: mol_type = unassigned DNA
gccctttttctgccccagagacaaagagggagagactcttactctgcaatctaaacaaatcctctctggggagaggaggaaagttccctagtt

SEQ ID NO: 9113 - RNA, 48 nt, Homo sapiens
  source 1..48: mol_type = unassigned RNA
attgcttttggcactggtcaaacttaaaagtcacgtggacaggtatgg

SEQ ID NO: 9114 - DNA, 48 bp, Homo sapiens
  source 1..48: mol_type = unassigned DNA
attgcttttggcactggtcaaacttaaaagtcacgtggacaggtatgg

SEQ ID NO: 9115 - DNA, 48 bp, Homo sapiens
  source 1..48: mol_type = unassigned DNA
ccatacctgtccacgtgacttttaagtttgaccagtgccaaaagcaat

SEQ ID NO: 9116 - RNA, 125 nt, Homo sapiens
  source 1..125: mol_type = unassigned RNA
agaaagaaaaaaaataccaggcgcgaggccctcgcctgtatttggcggactgacagcagaaggaacacttgagtcccaggaatttgagatttcagtgagccatgacctcgccactgcactccagc

SEQ ID NO: 9117 - DNA, 125 bp, Homo sapiens
  source 1..125: mol_type = unassigned DNA
agaaagaaaaaaaataccaggcgcgaggccctcgcctgtatttggcggactgacagcagaaggaacacttgagtcccaggaatttgagatttcagtgagccatgacctcgccactgcactccagc

SEQ ID NO: 9118 - DNA, 125 bp, Homo sapiens
  source 1..125: mol_type = unassigned DNA
gctggagtgcagtggcgaggtcatggctcactgaaatctcaaattcctgggactcaagtgttccttctgctgtcagtccgccaaatacaggcgagggcctcgcgcctggtattttttttctttct

SEQ ID NO: 9119 - RNA, 100 nt, Homo sapiens
  source 1..100: mol_type = unassigned RNA
acttccagactcattcaggttgttggcagagttgatttcttatgatggtaggactgaggctgccatttccctgttggccttcaggcaggaactcctttca

SEQ ID NO: 9120 - DNA, 100 bp, Homo sapiens
  source 1..100: mol_type = unassigned DNA
acttccagactcattcaggttgttggcagagttgatttcttatgatggtaggactgaggctgccatttccctgttggccttcaggcaggaactcctttca

SEQ ID NO: 9121 - DNA, 100 bp, Homo sapiens
  source 1..100: mol_type = unassigned DNA
tgaaaggagttcctgcctgaaggccaacagggaaatggcagcctcagtcctaccatcataagaaatcaactctgccaacaacctgaatgagtctggaagt

SEQ ID NO: 9122 - RNA, 67 nt, Homo sapiens
  source 1..67: mol_type = unassigned RNA
agagggacatgaagtgagcacatgctgttggaaaaatggcactgatagaattgcttgatgcagggtt

SEQ ID NO: 9123 - DNA, 67 bp, Homo sapiens
  source 1..67: mol_type = unassigned DNA
agagggacatgaagtgagcacatgctgttggaaaaatggcactgatagaattgcttgatgcagggtt

SEQ ID NO: 9124 - DNA, 67 bp, Homo sapiens
  source 1..67: mol_type = unassigned DNA
aaccctgcatcaagcaattctatcagtgccatttttccaacagcatgtgctcacttcatgtccctct

SEQ ID NO: 9125 - RNA, 200 nt, Homo sapiens
  source 1..200: mol_type = unassigned RNA
attgtatggaaaaataattgtatacatttttcttttttgtttagatatggagtatgaaacaagacaattgtgtccatgatttgcaagcacataataaagaaatttatactatcaaatggagtccaacaggaccagggactaataatccaaatgccaaccttatgttagcaaggtgatacttctgtttcatttttcctttt

SEQ ID NO: 9126 - DNA, 200 bp, Homo sapiens
  source 1..200: mol_type = unassigned DNA
attgtatggaaaaataattgtatacatttttcttttttgtttagatatggagtatgaaacaagacaattgtgtccatgatttgcaagcacataataaagaaatttatactatcaaatggagtccaacaggaccagggactaataatccaaatgccaaccttatgttagcaaggtgatacttctgtttcatttttcctttt

SEQ ID NO: 9127 - DNA, 200 bp, Homo sapiens
  source 1..200: mol_type = unassigned DNA
aaaaggaaaaatgaaacagaagtatcaccttgctaacataaggttggcatttggattattagtccctggtcctgttggactccatttgatagtataaatttctttattatgtgcttgcaaatcatggacacaattgtcttgtttcatactccatatctaaacaaaaaagaaaaatgtatacaattatttttccatacaat

SEQ ID NO: 9128 - RNA, 29 nt, Homo sapiens
  source 1..29: mol_type = unassigned RNA
tggaaggctcagttgtcggaaagacaaaa

SEQ ID NO: 9129 - DNA, 29 bp, Homo sapiens
  source 1..29: mol_type = unassigned DNA
tggaaggctcagttgtcggaaagacaaaa

SEQ ID NO: 9130 - DNA, 29 bp, Homo sapiens
  source 1..29: mol_type = unassigned DNA
ttttgtctttccgacaactgagccttcca

SEQ ID NO: 9131 - RNA, 160 nt, Homo sapiens
  source 1..160: mol_type = unassigned RNA
gaaatctactttcttcaatgtgttaaccaatagtcaggcttcagcagaaaacttcccgttctgcactattgatcctaatgagagcagagtacctgtgccagatgaaaggtttgactttctttgtcaataccacaaaccagcaaggtaagagatattttat

SEQ ID NO: 9132 - DNA, 160 bp, Homo sapiens
  source 1..160: mol_type = unassigned DNA
gaaatctactttcttcaatgtgttaaccaatagtcaggcttcagcagaaaacttcccgttctgcactattgatcctaatgagagcagagtacctgtgccagatgaaaggtttgactttctttgtcaataccacaaaccagcaaggtaagagatattttat

SEQ ID NO: 9133 - DNA, 160 bp, Homo sapiens
  source 1..160: mol_type = unassigned DNA
ataaaatatctcttaccttgctggtttgtggtattgacaaagaaagtcaaacctttcatctggcacaggtactctgctctcattaggatcaatagtgcagaacgggaagttttctgctgaagcctgactattggttaacacattgaagaaagtagatttc

SEQ ID NO: 9134 - RNA, 28 nt, Homo sapiens
  source 1..28: mol_type = unassigned RNA
aaaaccctgaaagtagatgaagaaacag

SEQ ID NO: 9135 - DNA, 28 bp, Homo sapiens
  source 1..28: mol_type = unassigned DNA
aaaaccctgaaagtagatgaagaaacag

SEQ ID NO: 9136 - DNA, 28 bp, Homo sapiens
  source 1..28: mol_type = unassigned DNA
ctgtttcttcatctactttcagggtttt

SEQ ID NO: 9137 - RNA, 31 nt, Homo sapiens
  source 1..31: mol_type = unassigned RNA
tctgctctcccagctagggactgaggaaagc

SEQ ID NO: 9138 - DNA, 31 bp, Homo sapiens
  source 1..31: mol_type = unassigned DNA
tctgctctcccagctagggactgaggaaagc

SEQ ID NO: 9139 - DNA, 31 bp, Homo sapiens
  source 1..31: mol_type = unassigned DNA
gctttcctcagtccctagctgggagagcaga

SEQ ID NO: 9140 - RNA, 32 nt, Homo sapiens
  source 1..32: mol_type = unassigned RNA
tggcttctgagcagtcaggttgggccagctgt

SEQ ID NO: 9141 - DNA, 32 bp, Homo sapiens
  source 1..32: mol_type = unassigned DNA
tggcttctgagcagtcaggttgggccagctgt

SEQ ID NO: 9142 - DNA, 32 bp, Homo sapiens
  source 1..32: mol_type = unassigned DNA
acagctggcccaacctgactgctcagaagcca

SEQ ID NO: 9143 - RNA, 31 nt, Homo sapiens
  source 1..31: mol_type = unassigned RNA
gagacacctgctgctgacctcgtggaaaact

SEQ ID NO: 9144 - DNA, 31 bp, Homo sapiens
  source 1..31: mol_type = unassigned DNA
gagacacctgctgctgacctcgtggaaaact

SEQ ID NO: 9145 - DNA, 31 bp, Homo sapiens
  source 1..31: mol_type = unassigned DNA
agttttccacgaggtcagcagcaggtgtctc

SEQ ID NO: 9146 - RNA, 37 nt, Homo sapiens
  source 1..37: mol_type = unassigned RNA
atttatgatgctgagtagcacccccactatcctgggc

SEQ ID NO: 9147 - DNA, 37 bp, Homo sapiens
  source 1..37: mol_type = unassigned DNA
atttatgatgctgagtagcacccccactatcctgggc

SEQ ID NO: 9148 - DNA, 37 bp, Homo sapiens
  source 1..37: mol_type = unassigned DNA
gcccaggatagtgggggtgctactcagcatcataaat

SEQ ID NO: 9149 - RNA, 31 nt, Homo sapiens
  source 1..31: mol_type = unassigned RNA
gacacactggacaggggctgtagctgtcaaa

SEQ ID NO: 9150 - DNA, 31 bp, Homo sapiens
  source 1..31: mol_type = unassigned DNA
gacacactggacaggggctgtagctgtcaaa

SEQ ID NO: 9151 - DNA, 31 bp, Homo sapiens
  source 1..31: mol_type = unassigned DNA
tttgacagctacagcccctgtccagtgtgtc

SEQ ID NO: 9152 - RNA, 30 nt, Homo sapiens
  source 1..30: mol_type = unassigned RNA
gtccctgagtaggtgaggaggtgggtagga

SEQ ID NO: 9153 - DNA, 30 bp, Homo sapiens
  source 1..30: mol_type = unassigned DNA
gtccctgagtaggtgaggaggtgggtagga

SEQ ID NO: 9154 - DNA, 30 bp, Homo sapiens
  source 1..30: mol_type = unassigned DNA
tcctacccacctcctcacctactcagggac

SEQ ID NO: 9155 - RNA, 33 nt, Homo sapiens
  source 1..33: mol_type = unassigned RNA
cgcagaaagagcttcctgagccagggccggtgg

SEQ ID NO: 9156 - DNA, 33 bp, Homo sapiens
  source 1..33: mol_type = unassigned DNA
cgcagaaagagcttcctgagccagggccggtgg

SEQ ID NO: 9157 - DNA, 33 bp, Homo sapiens
  source 1..33: mol_type = unassigned DNA
ccaccggccctggctcaggaagctctttctgcg

SEQ ID NO: 9158 - RNA, 53 nt, Homo sapiens
  source 1..53: mol_type = unassigned RNA
aaaatcagaactcagagtctctgactccagggagggtacagttcctcttttaa

SEQ ID NO: 9159 - DNA, 53 bp, Homo sapiens
  source 1..53: mol_type = unassigned DNA
aaaatcagaactcagagtctctgactccagggagggtacagttcctcttttaa

SEQ ID NO: 9160 - DNA, 53 bp, Homo sapiens
  source 1..53: mol_type = unassigned DNA
ttaaaagaggaactgtaccctccctggagtcagagactctgagttctgatttt

SEQ ID NO: 9161 - RNA, 182 nt, Homo sapiens
  source 1..182: mol_type = unassigned RNA
ccctaaggtgcctcagagagtcaaatgccagcctctcaatttccagcacatgctgggctcatgaactcctgttctgaggagctaacgctgtttcctccctctaggtgcctgactgacagaagttcttgcccccggggagctggtgtggacagaggaggggtgagtgttctggaggcacagac

SEQ ID NO: 9162 - DNA, 182 bp, Homo sapiens
  source 1..182: mol_type = unassigned DNA
ccctaaggtgcctcagagagtcaaatgccagcctctcaatttccagcacatgctgggctcatgaactcctgttctgaggagctaacgctgtttcctccctctaggtgcctgactgacagaagttcttgcccccggggagctggtgtggacagaggaggggtgagtgttctggaggcacagac

SEQ ID NO: 9163 - DNA, 182 bp, Homo sapiens
  source 1..182: mol_type = unassigned DNA
gtctgtgcctccagaacactcacccctcctctgtccacaccagctccccgggggcaagaacttctgtcagtcaggcacctagagggaggaaacagcgttagctcctcagaacaggagttcatgagcccagcatgtgctggaaattgagaggctggcatttgactctctgaggcaccttaggg

SEQ ID NO: 9164 - RNA, 50 nt, Homo sapiens
  source 1..50: mol_type = unassigned RNA
gtcccacccaggcgcctcggccccgcgcggaggccgggtctgcagcggtc

SEQ ID NO: 9165 - DNA, 50 bp, Homo sapiens
  source 1..50: mol_type = unassigned DNA
gtcccacccaggcgcctcggccccgcgcggaggccgggtctgcagcggtc

SEQ ID NO: 9166 - DNA, 50 bp, Homo sapiens
  source 1..50: mol_type = unassigned DNA
gaccgctgcagacccggcctccgcgcggggccgaggcgcctgggtgggac

SEQ ID NO: 9167 - RNA, 39 nt, Homo sapiens
  source 1..39: mol_type = unassigned RNA
ctggcagaatgatgacagagtggcgattttctgttttct

SEQ ID NO: 9168 - DNA, 39 bp, Homo sapiens
  source 1..39: mol_type = unassigned DNA
ctggcagaatgatgacagagtggcgattttctgttttct

SEQ ID NO: 9169 - DNA, 39 bp, Homo sapiens
  source 1..39: mol_type = unassigned DNA
agaaaacagaaaatcgccactctgtcatcattctgccag

SEQ ID NO: 9170 - RNA, 120 nt, Homo sapiens
  source 1..120: mol_type = unassigned RNA
ctgctttcatcttctctgcccactcagacatagggatttgagttgcaaatattgccaggttcacatagttcaattacacctccttaacaatcacaagaatgtagaatacacagtttagga

SEQ ID NO: 9171 - DNA, 120 bp, Homo sapiens
  source 1..120: mol_type = unassigned DNA
ctgctttcatcttctctgcccactcagacatagggatttgagttgcaaatattgccaggttcacatagttcaattacacctccttaacaatcacaagaatgtagaatacacagtttagga

SEQ ID NO: 9172 - DNA, 120 bp, Homo sapiens
  source 1..120: mol_type = unassigned DNA
tcctaaactgtgtattctacattcttgtgattgttaaggaggtgtaattgaactatgtgaacctggcaatatttgcaactcaaatccctatgtctgagtgggcagagaagatgaaagcag

SEQ ID NO: 9173 - RNA, 27 nt, Homo sapiens
  source 1..27: mol_type = unassigned RNA
ccacgtgtcagctggacgtggacgaat

SEQ ID NO: 9174 - DNA, 27 bp, Homo sapiens
  source 1..27: mol_type = unassigned DNA
ccacgtgtcagctggacgtggacgaat

SEQ ID NO: 9175 - DNA, 27 bp, Homo sapiens
  source 1..27: mol_type = unassigned DNA
attcgtccacgtccagctgacacgtgg

SEQ ID NO: 9176 - RNA, 29 nt, Homo sapiens
  source 1..29: mol_type = unassigned RNA
catctgaactggtccagatctcactctta

SEQ ID NO: 9177 - DNA, 29 bp, Homo sapiens
  source 1..29: mol_type = unassigned DNA
catctgaactggtccagatctcactctta

SEQ ID NO: 9178 - DNA, 29 bp, Homo sapiens
  source 1..29: mol_type = unassigned DNA
taagagtgagatctggaccagttcagatg

SEQ ID NO: 9179 - RNA, 66 nt, Homo sapiens
  source 1..66: mol_type = unassigned RNA
ctacagtgctgaactcttatctgatccagactctttctcagacctggtatgtggcttattgtagaa

SEQ ID NO: 9180 - DNA, 66 bp, Homo sapiens
  source 1..66: mol_type = unassigned DNA
ctacagtgctgaactcttatctgatccagactctttctcagacctggtatgtggcttattgtagaa

SEQ ID NO: 9181 - DNA, 66 bp, Homo sapiens
  source 1..66: mol_type = unassigned DNA
ttctacaataagccacataccaggtctgagaaagagtctggatcagataagagttcagcactgtag

SEQ ID NO: 9182 - RNA, 132 nt, Homo sapiens
  source 1..132: mol_type = unassigned RNA
cacctgggaggagggaagagaggatcaagtcaggttggtggacgaatagcagatggcctgtccttcctcccccagtggcctggtgagcaggtacttggacccgggccaagaccagggttactccaaaagttt

SEQ ID NO: 9183 - DNA, 132 bp, Homo sapiens
  source 1..132: mol_type = unassigned DNA
cacctgggaggagggaagagaggatcaagtcaggttggtggacgaatagcagatggcctgtccttcctcccccagtggcctggtgagcaggtacttggacccgggccaagaccagggttactccaaaagttt

SEQ ID NO: 9184 - DNA, 132 bp, Homo sapiens
  source 1..132: mol_type = unassigned DNA
aaacttttggagtaaccctggtcttggcccgggtccaagtacctgctcaccaggccactgggggaggaaggacaggccatctgctattcgtccaccaacctgacttgatcctctcttccctcctcccaggtg

SEQ ID NO: 9185 - RNA, 143 nt, Homo sapiens
  source 1..143: mol_type = unassigned RNA
ctttacgtgctgggcaatgtgctaagcgtttgacatatgttcccttgcctaatactcagaagaatcctcctagccacaggtagaattactgacctgaccagttttcagatgggaatctggatagtaacctgccttttaaacat

SEQ ID NO: 9186 - DNA, 143 bp, Homo sapiens
  source 1..143: mol_type = unassigned DNA
ctttacgtgctgggcaatgtgctaagcgtttgacatatgttcccttgcctaatactcagaagaatcctcctagccacaggtagaattactgacctgaccagttttcagatgggaatctggatagtaacctgccttttaaacat

SEQ ID NO: 9187 - DNA, 143 bp, Homo sapiens
  source 1..143: mol_type = unassigned DNA
atgtttaaaaggcaggttactatccagattcccatctgaaaactggtcaggtcagtaattctacctgtggctaggaggattcttctgagtattaggcaagggaacatatgtcaaacgcttagcacattgcccagcacgtaaag

SEQ ID NO: 9188 - RNA, 31 nt, Homo sapiens
  source 1..31: mol_type = unassigned RNA
gcccacttgccagggttgggaacagagagga

SEQ ID NO: 9189 - DNA, 31 bp, Homo sapiens
  source 1..31: mol_type = unassigned DNA
gcccacttgccagggttgggaacagagagga

SEQ ID NO: 9190 - DNA, 31 bp, Homo sapiens
  source 1..31: mol_type = unassigned DNA
tcctctctgttcccaaccctggcaagtgggc

SEQ ID NO: 9191 - RNA, 44 nt, Homo sapiens
  source 1..44: mol_type = unassigned RNA
gaagtcagatctggacagaaaacacgggctgggaactcaggatg

SEQ ID NO: 9192 - DNA, 44 bp, Homo sapiens
  source 1..44: mol_type = unassigned DNA
gaagtcagatctggacagaaaacacgggctgggaactcaggatg

SEQ ID NO: 9193 - DNA, 44 bp, Homo sapiens
  source 1..44: mol_type = unassigned DNA
catcctgagttcccagcccgtgttttctgtccagatctgacttc

SEQ ID NO: 9194 - RNA, 30 nt, Homo sapiens
  source 1..30: mol_type = unassigned RNA
cactcaacccagctcctgactcgcgatttc

SEQ ID NO: 9195 - DNA, 30 bp, Homo sapiens
  source 1..30: mol_type = unassigned DNA
cactcaacccagctcctgactcgcgatttc

SEQ ID NO: 9196 - DNA, 30 bp, Homo sapiens
  source 1..30: mol_type = unassigned DNA
gaaatcgcgagtcaggagctgggttgagtg

SEQ ID NO: 9197 - RNA, 75 nt, Homo sapiens
  source 1..75: mol_type = unassigned RNA
ttttttccccctttccctaagccccattttaaatagtttccttcccgcaagctgatgtgtccacattcaaagagt

SEQ ID NO: 9198 - DNA, 75 bp, Homo sapiens
  source 1..75: mol_type = unassigned DNA
ttttttccccctttccctaagccccattttaaatagtttccttcccgcaagctgatgtgtccacattcaaagagt

SEQ ID NO: 9199 - DNA, 75 bp, Homo sapiens
  source 1..75: mol_type = unassigned DNA
actctttgaatgtggacacatcagcttgcgggaaggaaactatttaaaatggggcttagggaaagggggaaaaaa

SEQ ID NO: 9200 - RNA, 30 nt, Homo sapiens
  source 1..30: mol_type = unassigned RNA
tttcatggtactgtagaggccaggctgaaa

SEQ ID NO: 9201 - DNA, 30 bp, Homo sapiens
  source 1..30: mol_type = unassigned DNA
tttcatggtactgtagaggccaggctgaaa

SEQ ID NO: 9202 - DNA, 30 bp, Homo sapiens
  source 1..30: mol_type = unassigned DNA
tttcagcctggcctctacagtaccatgaaa

SEQ ID NO: 9203 - RNA, 142 nt, Homo sapiens
  source 1..142: mol_type = unassigned RNA
ctttttctgcacagagatcaggataagaaaaggaaaaacatcccaaggcctaacagtgaaggcatctgttgctgaccacactgagggctgtggcttctcttcagacctggactggtgaggtctgcaggcctctgggctgagc

SEQ ID NO: 9204 - DNA, 142 bp, Homo sapiens
  source 1..142: mol_type = unassigned DNA
ctttttctgcacagagatcaggataagaaaaggaaaaacatcccaaggcctaacagtgaaggcatctgttgctgaccacactgagggctgtggcttctcttcagacctggactggtgaggtctgcaggcctctgggctgagc

SEQ ID NO: 9205 - DNA, 142 bp, Homo sapiens
  source 1..142: mol_type = unassigned DNA
gctcagcccagaggcctgcagacctcaccagtccaggtctgaagagaagccacagccctcagtgtggtcagcaacagatgccttcactgttaggccttgggatgtttttccttttcttatcctgatctctgtgcagaaaaag

SEQ ID NO: 9206 - RNA, 24 nt, Homo sapiens
  source 1..24: mol_type = unassigned RNA
accttgcactccatcactgtgtca

SEQ ID NO: 9207 - DNA, 24 bp, Homo sapiens
  source 1..24: mol_type = unassigned DNA
accttgcactccatcactgtgtca

SEQ ID NO: 9208 - DNA, 24 bp, Homo sapiens
  source 1..24: mol_type = unassigned DNA
tgacacagtgatggagtgcaaggt

SEQ ID NO: 9209 - RNA, 32 nt, Homo sapiens
  source 1..32: mol_type = unassigned RNA
tcccacataccaggaactattggacatttatt

SEQ ID NO: 9210 - DNA, 32 bp, Homo sapiens
  source 1..32: mol_type = unassigned DNA
tcccacataccaggaactattggacatttatt

SEQ ID NO: 9211 - DNA, 32 bp, Homo sapiens
  source 1..32: mol_type = unassigned DNA
aataaatgtccaatagttcctggtatgtggga

SEQ ID NO: 9212 - RNA, 27 nt, Homo sapiens
  source 1..27: mol_type = unassigned RNA
ggaagcgggcagcctctgaactcaccc

SEQ ID NO: 9213 - DNA, 27 bp, Homo sapiens
  source 1..27: mol_type = unassigned DNA
ggaagcgggcagcctctgaactcaccc

SEQ ID NO: 9214 - DNA, 27 bp, Homo sapiens
  source 1..27: mol_type = unassigned DNA
gggtgagttcagaggctgcccgcttcc

SEQ ID NO: 9215 - RNA, 185 nt, Homo sapiens
  source 1..185: mol_type = unassigned RNA
gcgagtgtcattgctttgaagcatggataaagtgtattttgcattcatttattttgtttttcattcaaattcacattccagggccccccaggccctcccggtccccctggtacatctggtcatcctggttcccctgtaagtatagccattggtggtgttttcttcctcatttttagaaaaatcaa

SEQ ID NO: 9216 - DNA, 185 bp, Homo sapiens
  source 1..185: mol_type = unassigned DNA
gcgagtgtcattgctttgaagcatggataaagtgtattttgcattcatttattttgtttttcattcaaattcacattccagggccccccaggccctcccggtccccctggtacatctggtcatcctggttcccctgtaagtatagccattggtggtgttttcttcctcatttttagaaaaatcaa

SEQ ID NO: 9217 - DNA, 185 bp, Homo sapiens
  source 1..185: mol_type = unassigned DNA
ttgatttttctaaaaatgaggaagaaaacaccaccaatggctatacttacaggggaaccaggatgaccagatgtaccagggggaccgggagggcctggggggccctggaatgtgaatttgaatgaaaaacaaaataaatgaatgcaaaatacactttatccatgcttcaaagcaatgacactcgc

SEQ ID NO: 9218 - RNA, 180 nt, Homo sapiens
  source 1..180: mol_type = unassigned RNA
tcacagtatttaaaaagacatgtttgcattgagaaattaaccctaaagggttttcaatagggtgtagacctccagtacctttgtaactaaagtctgtctagtcattgtaaatatttatctgtcagttttgacagattggggccagcttgatgttttaaatcttcagcccggtatgaaaac

SEQ ID NO: 9219 - DNA, 180 bp, Homo sapiens
  source 1..180: mol_type = unassigned DNA
tcacagtatttaaaaagacatgtttgcattgagaaattaaccctaaagggttttcaatagggtgtagacctccagtacctttgtaactaaagtctgtctagtcattgtaaatatttatctgtcagttttgacagattggggccagcttgatgttttaaatcttcagcccggtatgaaaac

SEQ ID NO: 9220 - DNA, 180 bp, Homo sapiens
  source 1..180: mol_type = unassigned DNA
gttttcataccgggctgaagatttaaaacatcaagctggccccaatctgtcaaaactgacagataaatatttacaatgactagacagactttagttacaaaggtactggaggtctacaccctattgaaaaccctttagggttaatttctcaatgcaaacatgtctttttaaatactgtga

SEQ ID NO: 9221 - RNA, 22 nt, Homo sapiens
  source 1..22: mol_type = unassigned RNA
ttttggaatgtaaaactcgcat

SEQ ID NO: 9222 - DNA, 22 bp, Homo sapiens
  source 1..22: mol_type = unassigned DNA
ttttggaatgtaaaactcgcat

SEQ ID NO: 9223 - DNA, 22 bp, Homo sapiens
  source 1..22: mol_type = unassigned DNA
atgcgagttttacattccaaaa

SEQ ID NO: 9224 - RNA, 51 nt, Homo sapiens
  source 1..51: mol_type = unassigned RNA
atcaaggtcatagaaagtgaagattatggccaacagttagaaatcgtaaga

SEQ ID NO: 9225 - DNA, 51 bp, Homo sapiens
  source 1..51: mol_type = unassigned DNA
atcaaggtcatagaaagtgaagattatggccaacagttagaaatcgtaaga

SEQ ID NO: 9226 - DNA, 51 bp, Homo sapiens
  source 1..51: mol_type = unassigned DNA
tcttacgatttctaactgttggccataatcttcactttctatgaccttgat

SEQ ID NO: 9227 - RNA, 31 nt, Homo sapiens
  source 1..31: mol_type = unassigned RNA
aaagagactgaatggtgaacctctggataat

SEQ ID NO: 9228 - DNA, 31 bp, Homo sapiens
  source 1..31: mol_type = unassigned DNA
aaagagactgaatggtgaacctctggataat

SEQ ID NO: 9229 - DNA, 31 bp, Homo sapiens
  source 1..31: mol_type = unassigned DNA
attatccagaggttcaccattcagtctcttt

SEQ ID NO: 9230 - RNA, 30 nt, Homo sapiens
  source 1..30: mol_type = unassigned RNA
acggcgttaagtagaacccccagaggcccc

SEQ ID NO: 9231 - DNA, 30 bp, Homo sapiens
  source 1..30: mol_type = unassigned DNA
acggcgttaagtagaacccccagaggcccc

SEQ ID NO: 9232 - DNA, 30 bp, Homo sapiens
  source 1..30: mol_type = unassigned DNA
ggggcctctgggggttctacttaacgccgt

SEQ ID NO: 9233 - RNA, 151 nt, Homo sapiens
  source 1..151: mol_type = unassigned RNA
ctgtgattggctgaagctgggctgcagaggggctgagactcagctgtttgttattctcccaagttaggttttcagtttatgtgctaagttaggttgcggttcattacctaggaactgagagtacagagacagcctcaggtcaggggccttt

SEQ ID NO: 9234 - DNA, 151 bp, Homo sapiens
  source 1..151: mol_type = unassigned DNA
ctgtgattggctgaagctgggctgcagaggggctgagactcagctgtttgttattctcccaagttaggttttcagtttatgtgctaagttaggttgcggttcattacctaggaactgagagtacagagacagcctcaggtcaggggccttt

SEQ ID NO: 9235 - DNA, 151 bp, Homo sapiens
  source 1..151: mol_type = unassigned DNA
aaaggcccctgacctgaggctgtctctgtactctcagttcctaggtaatgaaccgcaacctaacttagcacataaactgaaaacctaacttgggagaataacaaacagctgagtctcagcccctctgcagcccagcttcagccaatcacag

SEQ ID NO: 9236 - RNA, 58 nt, Homo sapiens
  source 1..58: mol_type = unassigned RNA
ttgctgtattttgttcactctgaaaaagcagaaatgtgactggtggaatccacttggt

SEQ ID NO: 9237 - DNA, 58 bp, Homo sapiens
  source 1..58: mol_type = unassigned DNA
ttgctgtattttgttcactctgaaaaagcagaaatgtgactggtggaatccacttggt

SEQ ID NO: 9238 - DNA, 58 bp, Homo sapiens
  source 1..58: mol_type = unassigned DNA
accaagtggattccaccagtcacatttctgctttttcagagtgaacaaaatacagcaa

SEQ ID NO: 9239 - RNA, 25 nt, Homo sapiens
  source 1..25: mol_type = unassigned RNA
tggtcgcttctgtagctccgagggc

SEQ ID NO: 9240 - DNA, 25 bp, Homo sapiens
  source 1..25: mol_type = unassigned DNA
tggtcgcttctgtagctccgagggc

SEQ ID NO: 9241 - DNA, 25 bp, Homo sapiens
  source 1..25: mol_type = unassigned DNA
gccctcggagctacagaagcgacca

SEQ ID NO: 9242 - RNA, 31 nt, Homo sapiens
  source 1..31: mol_type = unassigned RNA
tcttaggtttgctaaatactgtagggaaaaa

SEQ ID NO: 9243 - DNA, 31 bp, Homo sapiens
  source 1..31: mol_type = unassigned DNA
tcttaggtttgctaaatactgtagggaaaaa

SEQ ID NO: 9244 - DNA, 31 bp, Homo sapiens
  source 1..31: mol_type = unassigned DNA
tttttccctacagtatttagcaaacctaaga

SEQ ID NO: 9245 - RNA, 138 nt, Homo sapiens
  source 1..138: mol_type = unassigned RNA
aagtccccaccagactcagaaacccagttggcttctcccattaatttctgaactggggctgcagtatagagttgcttgctagtcccacgtaatgagcctgcattgctcagctctggggtggtgaacggccctgggtgc

SEQ ID NO: 9246 - DNA, 138 bp, Homo sapiens
  source 1..138: mol_type = unassigned DNA
aagtccccaccagactcagaaacccagttggcttctcccattaatttctgaactggggctgcagtatagagttgcttgctagtcccacgtaatgagcctgcattgctcagctctggggtggtgaacggccctgggtgc

SEQ ID NO: 9247 - DNA, 138 bp, Homo sapiens
  source 1..138: mol_type = unassigned DNA
gcacccagggccgttcaccaccccagagctgagcaatgcaggctcattacgtgggactagcaagcaactctatactgcagccccagttcagaaattaatgggagaagccaactgggtttctgagtctggtggggactt

SEQ ID NO: 9248 - RNA, 82 nt, Homo sapiens
  source 1..82: mol_type = unassigned RNA
ttcaccacttgtcactgctataattccctgtttagaactctcagtgagtgtcagatcaacacattcatccaccatatcccgt

SEQ ID NO: 9249 - DNA, 82 bp, Homo sapiens
  source 1..82: mol_type = unassigned DNA
ttcaccacttgtcactgctataattccctgtttagaactctcagtgagtgtcagatcaacacattcatccaccatatcccgt

SEQ ID NO: 9250 - DNA, 82 bp, Homo sapiens
  source 1..82: mol_type = unassigned DNA
acgggatatggtggatgaatgtgttgatctgacactcactgagagttctaaacagggaattatagcagtgacaagtggtgaa

SEQ ID NO: 9251 - RNA, 31 nt, Homo sapiens
  source 1..31: mol_type = unassigned RNA
agcagaactcctaaaaaatgcagatgaatta

SEQ ID NO: 9252 - DNA, 31 bp, Homo sapiens
  source 1..31: mol_type = unassigned DNA
agcagaactcctaaaaaatgcagatgaatta

SEQ ID NO: 9253 - DNA, 31 bp, Homo sapiens
  source 1..31: mol_type = unassigned DNA
taattcatctgcattttttaggagttctgct

SEQ ID NO: 9254 - RNA, 59 nt, Homo sapiens
  source 1..59: mol_type = unassigned RNA
ccccaagcccttcacaggccattccctgtgccgcgaccccccccccgcccctcccccca

SEQ ID NO: 9255 - DNA, 59 bp, Homo sapiens
  source 1..59: mol_type = unassigned DNA
ccccaagcccttcacaggccattccctgtgccgcgaccccccccccgcccctcccccca

SEQ ID NO: 9256 - DNA, 59 bp, Homo sapiens
  source 1..59: mol_type = unassigned DNA
tggggggaggggcggggggggggtcgcggcacagggaatggcctgtgaagggcttgggg

SEQ ID NO: 9257 - RNA, 23 nt, Homo sapiens
  source 1..23: mol_type = unassigned RNA
actctcacaggtagaattcaata

SEQ ID NO: 9258 - DNA, 23 bp, Homo sapiens
  source 1..23: mol_type = unassigned DNA
actctcacaggtagaattcaata

SEQ ID NO: 9259 - DNA, 23 bp, Homo sapiens
  source 1..23: mol_type = unassigned DNA
tattgaattctacctgtgagagt

SEQ ID NO: 9260 - RNA, 54 nt, Homo sapiens
  source 1..54: mol_type = unassigned RNA
cagtcctgtgcggaaatctgaagaaaaaacagatacaaagcgaactgtgattaa

SEQ ID NO: 9261 - DNA, 54 bp, Homo sapiens
  source 1..54: mol_type = unassigned DNA
cagtcctgtgcggaaatctgaagaaaaaacagatacaaagcgaactgtgattaa

SEQ ID NO: 9262 - DNA, 54 bp, Homo sapiens
  source 1..54: mol_type = unassigned DNA
ttaatcacagttcgctttgtatctgttttttcttcagatttccgcacaggactg

SEQ ID NO: 9263 - RNA, 44 nt, Homo sapiens
  source 1..44: mol_type = unassigned RNA
ctgcctcagcctccggagcaactgggactacaggcgcccgccac

SEQ ID NO: 9264 - DNA, 44 bp, Homo sapiens
  source 1..44: mol_type = unassigned DNA
ctgcctcagcctccggagcaactgggactacaggcgcccgccac

SEQ ID NO: 9265 - DNA, 44 bp, Homo sapiens
  source 1..44: mol_type = unassigned DNA
gtggcgggcgcctgtagtcccagttgctccggaggctgaggcag

SEQ ID NO: 9266 - RNA, 135 nt, Homo sapiens
  source 1..135: mol_type = unassigned RNA
cccccagcctccctgcaagcttactccctttcttctagaagagatggggccagacctcgaccagcagccctggcctggacatgactgtgctcatgcaggtattgaggctgagatgccccggcatcacattttttt

SEQ ID NO: 9267 - DNA, 135 bp, Homo sapiens
  source 1..135: mol_type = unassigned DNA
cccccagcctccctgcaagcttactccctttcttctagaagagatggggccagacctcgaccagcagccctggcctggacatgactgtgctcatgcaggtattgaggctgagatgccccggcatcacattttttt

SEQ ID NO: 9268 - DNA, 135 bp, Homo sapiens
  source 1..135: mol_type = unassigned DNA
aaaaaaatgtgatgccggggcatctcagcctcaatacctgcatgagcacagtcatgtccaggccagggctgctggtcgaggtctggccccatctcttctagaagaaagggagtaagcttgcagggaggctggggg

SEQ ID NO: 9269 - RNA, 46 nt, Homo sapiens
  source 1..46: mol_type = unassigned RNA
ccacagtgaatgtgtctggacctcatgttgttgaggctgtcacagt

SEQ ID NO: 9270 - DNA, 46 bp, Homo sapiens
  source 1..46: mol_type = unassigned DNA
ccacagtgaatgtgtctggacctcatgttgttgaggctgtcacagt

SEQ ID NO: 9271 - DNA, 46 bp, Homo sapiens
  source 1..46: mol_type = unassigned DNA
actgtgacagcctcaacaacatgaggtccagacacattcactgtgg

SEQ ID NO: 9272 - RNA, 29 nt, Homo sapiens
  source 1..29: mol_type = unassigned RNA
caggtgacaaggcaactgtatgagccact

SEQ ID NO: 9273 - DNA, 29 bp, Homo sapiens
  source 1..29: mol_type = unassigned DNA
caggtgacaaggcaactgtatgagccact

SEQ ID NO: 9274 - DNA, 29 bp, Homo sapiens
  source 1..29: mol_type = unassigned DNA
agtggctcatacagttgccttgtcacctg

SEQ ID NO: 9275 - RNA, 25 nt, Homo sapiens
  source 1..25: mol_type = unassigned RNA
agtcctaggaaccagagctggaagc

SEQ ID NO: 9276 - DNA, 25 bp, Homo sapiens
  source 1..25: mol_type = unassigned DNA
agtcctaggaaccagagctggaagc

SEQ ID NO: 9277 - DNA, 25 bp, Homo sapiens
  source 1..25: mol_type = unassigned DNA
gcttccagctctggttcctaggact

SEQ ID NO: 9278 - RNA, 30 nt, Homo sapiens
  source 1..30: mol_type = unassigned RNA
ccctttttacagactattgctcacaatctc

SEQ ID NO: 9279 - DNA, 30 bp, Homo sapiens
  source 1..30: mol_type = unassigned DNA
ccctttttacagactattgctcacaatctc

SEQ ID NO: 9280 - DNA, 30 bp, Homo sapiens
  source 1..30: mol_type = unassigned DNA
gagattgtgagcaatagtctgtaaaaaggg

SEQ ID NO: 9281 - RNA, 32 nt, Homo sapiens
  source 1..32: mol_type = unassigned RNA
ttgctggtgctgtctctcgaacaagcactgcc

SEQ ID NO: 9282 - DNA, 32 bp, Homo sapiens
  source 1..32: mol_type = unassigned DNA
ttgctggtgctgtctctcgaacaagcactgcc

SEQ ID NO: 9283 - DNA, 32 bp, Homo sapiens
  source 1..32: mol_type = unassigned DNA
ggcagtgcttgttcgagagacagcaccagcaa

SEQ ID NO: 9284 - RNA, 34 nt, Homo sapiens
  source 1..34: mol_type = unassigned RNA
gactttctctgagaacgtggacctcacagagccc

SEQ ID NO: 9285 - DNA, 34 bp, Homo sapiens
  source 1..34: mol_type = unassigned DNA
gactttctctgagaacgtggacctcacagagccc

SEQ ID NO: 9286 - DNA, 34 bp, Homo sapiens
  source 1..34: mol_type = unassigned DNA
gggctctgtgaggtccacgttctcagagaaagtc

SEQ ID NO: 9287 - RNA, 124 nt, Homo sapiens
  source 1..124: mol_type = unassigned RNA
gtgccacctcccttcccgccaggtaaatattgcttagacacccagcttctgattaaagccacatgatggaacttgtcctaaggatgcaactgatggcccgtgtcagcttgttggagttaaaaaa

SEQ ID NO: 9288 - DNA, 124 bp, Homo sapiens
  source 1..124: mol_type = unassigned DNA
gtgccacctcccttcccgccaggtaaatattgcttagacacccagcttctgattaaagccacatgatggaacttgtcctaaggatgcaactgatggcccgtgtcagcttgttggagttaaaaaa

SEQ ID NO: 9289 - DNA, 124 bp, Homo sapiens
  source 1..124: mol_type = unassigned DNA
ttttttaactccaacaagctgacacgggccatcagttgcatccttaggacaagttccatcatgtggctttaatcagaagctgggtgtctaagcaatatttacctggcgggaagggaggtggcac

SEQ ID NO: 9290 - RNA, 48 nt, Homo sapiens
  source 1..48: mol_type = unassigned RNA
cattgctgagtctgtctggaaggaccaaaatattagtattcttaccag

SEQ ID NO: 9291 - DNA, 48 bp, Homo sapiens
  source 1..48: mol_type = unassigned DNA
cattgctgagtctgtctggaaggaccaaaatattagtattcttaccag

SEQ ID NO: 9292 - DNA, 48 bp, Homo sapiens
  source 1..48: mol_type = unassigned DNA
ctggtaagaatactaatattttggtccttccagacagactcagcaatg

SEQ ID NO: 9293 - RNA, 29 nt, Homo sapiens
  source 1..29: mol_type = unassigned RNA
acaatctctggtcccccgtagacgccgcc

SEQ ID NO: 9294 - DNA, 29 bp, Homo sapiens
  source 1..29: mol_type = unassigned DNA
acaatctctggtcccccgtagacgccgcc

SEQ ID NO: 9295 - DNA, 29 bp, Homo sapiens
  source 1..29: mol_type = unassigned DNA
ggcggcgtctacgggggaccagagattgt

SEQ ID NO: 9296 - RNA, 51 nt, Homo sapiens
  source 1..51: mol_type = unassigned RNA
gatttccactgctagaatgcactgtgaactggtagaatggaggtagaaaaa

SEQ ID NO: 9297 - DNA, 51 bp, Homo sapiens
  source 1..51: mol_type = unassigned DNA
gatttccactgctagaatgcactgtgaactggtagaatggaggtagaaaaa

SEQ ID NO: 9298 - DNA, 51 bp, Homo sapiens
  source 1..51: mol_type = unassigned DNA
tttttctacctccattctaccagttcacagtgcattctagcagtggaaatc

SEQ ID NO: 9299 - RNA, 138 nt, Homo sapiens
  source 1..138: mol_type = unassigned RNA
cttttttcacaaggtgaatgagcggctttccaagcctaatattttcattctcaataatcgttgggatgcctctgcatcagagccagaatatatggaagacgtaagttgttatttttttttttgtaggttttgaaatac

SEQ ID NO: 9300 - DNA, 138 bp, Homo sapiens
  source 1..138: mol_type = unassigned DNA
cttttttcacaaggtgaatgagcggctttccaagcctaatattttcattctcaataatcgttgggatgcctctgcatcagagccagaatatatggaagacgtaagttgttatttttttttttgtaggttttgaaatac

SEQ ID NO: 9301 - DNA, 138 bp, Homo sapiens
  source 1..138: mol_type = unassigned DNA
gtatttcaaaacctacaaaaaaaaaaataacaacttacgtcttccatatattctggctctgatgcagaggcatcccaacgattattgagaatgaaaatattaggcttggaaagccgctcattcaccttgtgaaaaaag

SEQ ID NO: 9302 - RNA, 152 nt, Homo sapiens
  source 1..152: mol_type = unassigned RNA
atttagactgaattatttgcctagagatgaactcagattatagatttttaaagcattattggacatcctcatacaactctgtttactttagattgcacagccaggagcagcatatttttatgttgaacttgacacaggagaaaagcttttcc

SEQ ID NO: 9303 - DNA, 152 bp, Homo sapiens
  source 1..152: mol_type = unassigned DNA
atttagactgaattatttgcctagagatgaactcagattatagatttttaaagcattattggacatcctcatacaactctgtttactttagattgcacagccaggagcagcatatttttatgttgaacttgacacaggagaaaagcttttcc

SEQ ID NO: 9304 - DNA, 152 bp, Homo sapiens
  source 1..152: mol_type = unassigned DNA
ggaaaagcttttctcctgtgtcaagttcaacataaaaatatgctgctcctggctgtgcaatctaaagtaaacagagttgtatgaggatgtccaataatgctttaaaaatctataatctgagttcatctctaggcaaataattcagtctaaat

SEQ ID NO: 9305 - RNA, 30 nt, Homo sapiens
  source 1..30: mol_type = unassigned RNA
gctattctgtagaaatttatgaagaatgtt

SEQ ID NO: 9306 - DNA, 30 bp, Homo sapiens
  source 1..30: mol_type = unassigned DNA
gctattctgtagaaatttatgaagaatgtt

SEQ ID NO: 9307 - DNA, 30 bp, Homo sapiens
  source 1..30: mol_type = unassigned DNA
aacattcttcataaatttctacagaatagc

SEQ ID NO: 9308 - RNA, 28 nt, Homo sapiens
  source 1..28: mol_type = unassigned RNA
gcagcggcctgagaagcctggccacgcc

SEQ ID NO: 9309 - DNA, 28 bp, Homo sapiens
  source 1..28: mol_type = unassigned DNA
gcagcggcctgagaagcctggccacgcc

SEQ ID NO: 9310 - DNA, 28 bp, Homo sapiens
  source 1..28: mol_type = unassigned DNA
ggcgtggccaggcttctcaggccgctgc

SEQ ID NO: 9311 - RNA, 29 nt, Homo sapiens
  source 1..29: mol_type = unassigned RNA
gtcgaagcatgccggaaactgtagtctct

SEQ ID NO: 9312 - DNA, 29 bp, Homo sapiens
  source 1..29: mol_type = unassigned DNA
gtcgaagcatgccggaaactgtagtctct

SEQ ID NO: 9313 - DNA, 29 bp, Homo sapiens
  source 1..29: mol_type = unassigned DNA
agagactacagtttccggcatgcttcgac

SEQ ID NO: 9314 - RNA, 52 nt, Homo sapiens
  source 1..52: mol_type = unassigned RNA
tggaaaactcaagcatagtcaagatccaggaactcatgtcgtgccccatttt

SEQ ID NO: 9315 - DNA, 52 bp, Homo sapiens
  source 1..52: mol_type = unassigned DNA
tggaaaactcaagcatagtcaagatccaggaactcatgtcgtgccccatttt

SEQ ID NO: 9316 - DNA, 52 bp, Homo sapiens
  source 1..52: mol_type = unassigned DNA
aaaatggggcacgacatgagttcctggatcttgactatgcttgagttttcca

SEQ ID NO: 9317 - RNA, 26 nt, Homo sapiens
  source 1..26: mol_type = unassigned RNA
tgtatggcactggtacaaaacagaca

SEQ ID NO: 9318 - DNA, 26 bp, Homo sapiens
  source 1..26: mol_type = unassigned DNA
tgtatggcactggtacaaaacagaca

SEQ ID NO: 9319 - DNA, 26 bp, Homo sapiens
  source 1..26: mol_type = unassigned DNA
tgtctgttttgtaccagtgccataca

SEQ ID NO: 9320 - RNA, 28 nt, Homo sapiens
  source 1..28: mol_type = unassigned RNA
ggcaacagaacgtgggatgctggaggca

SEQ ID NO: 9321 - DNA, 28 bp, Homo sapiens
  source 1..28: mol_type = unassigned DNA
ggcaacagaacgtgggatgctggaggca

SEQ ID NO: 9322 - DNA, 28 bp, Homo sapiens
  source 1..28: mol_type = unassigned DNA
tgcctccagcatcccacgttctgttgcc

SEQ ID NO: 9323 - RNA, 173 nt, Homo sapiens
  source 1..173: mol_type = unassigned RNA
gagggaatgcccttcttttgccctcccttcctcccagtctgtgtgtctctagaaggttgctgctccgcccacagtggaggacacgtgaagaactggagtccttttctggggcagactccaatactgggacagagaaactcttctgccacgaccatggaactgggaggtcccag

SEQ ID NO: 9324 - DNA, 173 bp, Homo sapiens
  source 1..173: mol_type = unassigned DNA
gagggaatgcccttcttttgccctcccttcctcccagtctgtgtgtctctagaaggttgctgctccgcccacagtggaggacacgtgaagaactggagtccttttctggggcagactccaatactgggacagagaaactcttctgccacgaccatggaactgggaggtcccag

SEQ ID NO: 9325 - DNA, 173 bp, Homo sapiens
  source 1..173: mol_type = unassigned DNA
ctgggacctcccagttccatggtcgtggcagaagagtttctctgtcccagtattggagtctgccccagaaaaggactccagttcttcacgtgtcctccactgtgggcggagcagcaaccttctagagacacacagactgggaggaagggagggcaaaagaagggcattccctc

SEQ ID NO: 9326 - RNA, 19 nt, Homo sapiens
  source 1..19: mol_type = unassigned RNA
gtatgcaatgagaactcac

SEQ ID NO: 9327 - DNA, 19 bp, Homo sapiens
  source 1..19: mol_type = unassigned DNA
gtatgcaatgagaactcac

SEQ ID NO: 9328 - DNA, 19 bp, Homo sapiens
  source 1..19: mol_type = unassigned DNA
gtgagttctcattgcatac

SEQ ID NO: 9329 - RNA, 34 nt, Homo sapiens
  source 1..34: mol_type = unassigned RNA
atccagatttaaacctaccagtttgtcctacccc

SEQ ID NO: 9330 - DNA, 34 bp, Homo sapiens
  source 1..34: mol_type = unassigned DNA
atccagatttaaacctaccagtttgtcctacccc

SEQ ID NO: 9331 - DNA, 34 bp, Homo sapiens
  source 1..34: mol_type = unassigned DNA
ggggtaggacaaactggtaggtttaaatctggat

SEQ ID NO: 9332 - RNA, 32 nt, Homo sapiens
  source 1..32: mol_type = unassigned RNA
atgatgctggtgcttgaccatgaaaggaaagt

SEQ ID NO: 9333 - DNA, 32 bp, Homo sapiens
  source 1..32: mol_type = unassigned DNA
atgatgctggtgcttgaccatgaaaggaaagt

SEQ ID NO: 9334 - DNA, 32 bp, Homo sapiens
  source 1..32: mol_type = unassigned DNA
actttcctttcatggtcaagcaccagcatcat

SEQ ID NO: 9335 - RNA, 81 nt, Homo sapiens
  source 1..81: mol_type = unassigned RNA
atcagtgctctggctctgagacacaggggtggtgggagtaggagagtgattggatgatgaatctgtagctgcagaggcatc

SEQ ID NO: 9336 - DNA, 81 bp, Homo sapiens
  source 1..81: mol_type = unassigned DNA
atcagtgctctggctctgagacacaggggtggtgggagtaggagagtgattggatgatgaatctgtagctgcagaggcatc

SEQ ID NO: 9337 - DNA, 81 bp, Homo sapiens
  source 1..81: mol_type = unassigned DNA
gatgcctctgcagctacagattcatcatccaatcactctcctactcccaccacccctgtgtctcagagccagagcactgat

SEQ ID NO: 9338 - RNA, 30 nt, Homo sapiens
  source 1..30: mol_type = unassigned RNA
cccccaggaggctgaccagtgtgtggcctg

SEQ ID NO: 9339 - DNA, 30 bp, Homo sapiens
  source 1..30: mol_type = unassigned DNA
cccccaggaggctgaccagtgtgtggcctg

SEQ ID NO: 9340 - DNA, 30 bp, Homo sapiens
  source 1..30: mol_type = unassigned DNA
caggccacacactggtcagcctcctggggg

SEQ ID NO: 9341 - RNA, 54 nt, Homo sapiens
  source 1..54: mol_type = unassigned RNA
cccccgtgcatagaagattaaaagtgttaaaatcgtatgcctcttctcttgtta

SEQ ID NO: 9342 - DNA, 54 bp, Homo sapiens
  source 1..54: mol_type = unassigned DNA
cccccgtgcatagaagattaaaagtgttaaaatcgtatgcctcttctcttgtta

SEQ ID NO: 9343 - DNA, 54 bp, Homo sapiens
  source 1..54: mol_type = unassigned DNA
taacaagagaagaggcatacgattttaacacttttaatcttctatgcacggggg

SEQ ID NO: 9344 - RNA, 34 nt, Homo sapiens
  source 1..34: mol_type = unassigned RNA
ggaggtgaagatccatgactggtaccagaagcag

SEQ ID NO: 9345 - DNA, 34 bp, Homo sapiens
  source 1..34: mol_type = unassigned DNA
ggaggtgaagatccatgactggtaccagaagcag

SEQ ID NO: 9346 - DNA, 34 bp, Homo sapiens
  source 1..34: mol_type = unassigned DNA
ctgcttctggtaccagtcatggatcttcacctcc

SEQ ID NO: 9347 - RNA, 29 nt, Homo sapiens
  source 1..29: mol_type = unassigned RNA
gtctccactgaggatgtgagcctgattat

SEQ ID NO: 9348 - DNA, 29 bp, Homo sapiens
  source 1..29: mol_type = unassigned DNA
gtctccactgaggatgtgagcctgattat

SEQ ID NO: 9349 - DNA, 29 bp, Homo sapiens
  source 1..29: mol_type = unassigned DNA
ataatcaggctcacatcctcagtggagac

SEQ ID NO: 9350 - RNA, 125 nt, Homo sapiens
  source 1..125: mol_type = unassigned RNA
acattttagttcaggctttcagaaggagaggcagtgagtgtgctatactgtatagcatgtgggctcttgaaccagcctctccactcacctctccacctgctgtgtgaccttggcatttgattttt

SEQ ID NO: 9351 - DNA, 125 bp, Homo sapiens
  source 1..125: mol_type = unassigned DNA
acattttagttcaggctttcagaaggagaggcagtgagtgtgctatactgtatagcatgtgggctcttgaaccagcctctccactcacctctccacctgctgtgtgaccttggcatttgattttt

SEQ ID NO: 9352 - DNA, 125 bp, Homo sapiens
  source 1..125: mol_type = unassigned DNA
aaaaatcaaatgccaaggtcacacagcaggtggagaggtgagtggagaggctggttcaagagcccacatgctatacagtatagcacactcactgcctctccttctgaaagcctgaactaaaatgt

SEQ ID NO: 9353 - RNA, 178 nt, Homo sapiens
  source 1..178: mol_type = unassigned RNA
ctgcatgtctaattttaatatgtttcattttaatgttttctttcattaggctctatgtaaggacaacatctacccagctttccagatgtttgctaaaggttatgggaaaaataatgaacctcttcgtggctacatcttaacattcttaattgcacttggattcatcttaattggttag

SEQ ID NO: 9354 - DNA, 178 bp, Homo sapiens
  source 1..178: mol_type = unassigned DNA
ctgcatgtctaattttaatatgtttcattttaatgttttctttcattaggctctatgtaaggacaacatctacccagctttccagatgtttgctaaaggttatgggaaaaataatgaacctcttcgtggctacatcttaacattcttaattgcacttggattcatcttaattggttag

SEQ ID NO: 9355 - DNA, 178 bp, Homo sapiens
  source 1..178: mol_type = unassigned DNA
ctaaccaattaagatgaatccaagtgcaattaagaatgttaagatgtagccacgaagaggttcattatttttcccataacctttagcaaacatctggaaagctgggtagatgttgtccttacatagagcctaatgaaagaaaacattaaaatgaaacatattaaaattagacatgcag

SEQ ID NO: 9356 - RNA, 31 nt, Homo sapiens
  source 1..31: mol_type = unassigned RNA
ggtggccatggtaccggggacttgggagagt

SEQ ID NO: 9357 - DNA, 31 bp, Homo sapiens
  source 1..31: mol_type = unassigned DNA
ggtggccatggtaccggggacttgggagagt

SEQ ID NO: 9358 - DNA, 31 bp, Homo sapiens
  source 1..31: mol_type = unassigned DNA
actctcccaagtccccggtaccatggccacc

SEQ ID NO: 9359 - RNA, 26 nt, Homo sapiens
  source 1..26: mol_type = unassigned RNA
tctcccccacaacctcttcactagtt

SEQ ID NO: 9360 - DNA, 26 bp, Homo sapiens
  source 1..26: mol_type = unassigned DNA
tctcccccacaacctcttcactagtt

SEQ ID NO: 9361 - DNA, 26 bp, Homo sapiens
  source 1..26: mol_type = unassigned DNA
aactagtgaagaggttgtgggggaga

SEQ ID NO: 9362 - RNA, 31 nt, Homo sapiens
  source 1..31: mol_type = unassigned RNA
actccacaaggtcgttggaatgaattttgaa

SEQ ID NO: 9363 - DNA, 31 bp, Homo sapiens
  source 1..31: mol_type = unassigned DNA
actccacaaggtcgttggaatgaattttgaa

SEQ ID NO: 9364 - DNA, 31 bp, Homo sapiens
  source 1..31: mol_type = unassigned DNA
ttcaaaattcattccaacgaccttgtggagt

SEQ ID NO: 9365 - RNA, 29 nt, Homo sapiens
  source 1..29: mol_type = unassigned RNA
gaacacttcatgaaccagaagtgagagct

SEQ ID NO: 9366 - DNA, 29 bp, Homo sapiens
  source 1..29: mol_type = unassigned DNA
gaacacttcatgaaccagaagtgagagct

SEQ ID NO: 9367 - DNA, 29 bp, Homo sapiens
  source 1..29: mol_type = unassigned DNA
agctctcacttctggttcatgaagtgttc

SEQ ID NO: 9368 - RNA, 30 nt, Homo sapiens
  source 1..30: mol_type = unassigned RNA
actcatgaatcgttgactgcccttgaaatt

SEQ ID NO: 9369 - DNA, 30 bp, Homo sapiens
  source 1..30: mol_type = unassigned DNA
actcatgaatcgttgactgcccttgaaatt

SEQ ID NO: 9370 - DNA, 30 bp, Homo sapiens
  source 1..30: mol_type = unassigned DNA
aatttcaagggcagtcaacgattcatgagt

SEQ ID NO: 9371 - RNA, 34 nt, Homo sapiens
  source 1..34: mol_type = unassigned RNA
cactcactggctgtgtgactttgggcaagataac

SEQ ID NO: 9372 - DNA, 34 bp, Homo sapiens
  source 1..34: mol_type = unassigned DNA
cactcactggctgtgtgactttgggcaagataac

SEQ ID NO: 9373 - DNA, 34 bp, Homo sapiens
  source 1..34: mol_type = unassigned DNA
gttatcttgcccaaagtcacacagccagtgagtg

SEQ ID NO: 9374 - RNA, 86 nt, Homo sapiens
  source 1..86: mol_type = unassigned RNA
ttcttatacaaaggggtactggtaggaacgaagatgggcaggagaaggagagggaataggtggcctgcggcctggcggttcgttgt

SEQ ID NO: 9375 - DNA, 86 bp, Homo sapiens
  source 1..86: mol_type = unassigned DNA
ttcttatacaaaggggtactggtaggaacgaagatgggcaggagaaggagagggaataggtggcctgcggcctggcggttcgttgt

SEQ ID NO: 9376 - DNA, 86 bp, Homo sapiens
  source 1..86: mol_type = unassigned DNA
acaacgaaccgccaggccgcaggccacctattccctctccttctcctgcccatcttcgttcctaccagtacccctttgtataagaa

SEQ ID NO: 9377 - RNA, 86 nt, Homo sapiens
  source 1..86: mol_type = unassigned RNA
agtcttagacatactctgtccttgctctgcccacatcctctgcttcatggactgtgcctgacagtttcatttttgctttcaaccat

SEQ ID NO: 9378 - DNA, 86 bp, Homo sapiens
  source 1..86: mol_type = unassigned DNA
agtcttagacatactctgtccttgctctgcccacatcctctgcttcatggactgtgcctgacagtttcatttttgctttcaaccat

SEQ ID NO: 9379 - DNA, 86 bp, Homo sapiens
  source 1..86: mol_type = unassigned DNA
atggttgaaagcaaaaatgaaactgtcaggcacagtccatgaagcagaggatgtgggcagagcaaggacagagtatgtctaagact

SEQ ID NO: 9380 - RNA, 30 nt, Homo sapiens
  source 1..30: mol_type = unassigned RNA
gtcccgcgttcctgtgaggcctccgcgccg

SEQ ID NO: 9381 - DNA, 30 bp, Homo sapiens
  source 1..30: mol_type = unassigned DNA
gtcccgcgttcctgtgaggcctccgcgccg

SEQ ID NO: 9382 - DNA, 30 bp, Homo sapiens
  source 1..30: mol_type = unassigned DNA
cggcgcggaggcctcacaggaacgcgggac

SEQ ID NO: 9383 - RNA, 168 nt, Homo sapiens
  source 1..168: mol_type = unassigned RNA
gtttatttgttttttaatacagaaatcctaaatggtggagtctatgtagaccagaacaaattcctttgttatgcagacaccattcattggcaagatattgttcggaacccatggccttccaacttgactcttgtgtcaacaaatggtagttcaggatgtaagtagaat

SEQ ID NO: 9384 - DNA, 168 bp, Homo sapiens
  source 1..168: mol_type = unassigned DNA
gtttatttgttttttaatacagaaatcctaaatggtggagtctatgtagaccagaacaaattcctttgttatgcagacaccattcattggcaagatattgttcggaacccatggccttccaacttgactcttgtgtcaacaaatggtagttcaggatgtaagtagaat

SEQ ID NO: 9385 - DNA, 168 bp, Homo sapiens
  source 1..168: mol_type = unassigned DNA
attctacttacatcctgaactaccatttgttgacacaagagtcaagttggaaggccatgggttccgaacaatatcttgccaatgaatggtgtctgcataacaaaggaatttgttctggtctacatagactccaccatttaggatttctgtattaaaaaacaaataaac

SEQ ID NO: 9386 - RNA, 29 nt, Homo sapiens
  source 1..29: mol_type = unassigned RNA
ttcttctgacttgagagctcccccagtca

SEQ ID NO: 9387 - DNA, 29 bp, Homo sapiens
  source 1..29: mol_type = unassigned DNA
ttcttctgacttgagagctcccccagtca

SEQ ID NO: 9388 - DNA, 29 bp, Homo sapiens
  source 1..29: mol_type = unassigned DNA
tgactgggggagctctcaagtcagaagaa

SEQ ID NO: 9389 - RNA, 42 nt, Homo sapiens
  source 1..42: mol_type = unassigned RNA
tgttgccatggggttggatctatgtagtatctgttcagggat

SEQ ID NO: 9390 - DNA, 42 bp, Homo sapiens
  source 1..42: mol_type = unassigned DNA
tgttgccatggggttggatctatgtagtatctgttcagggat

SEQ ID NO: 9391 - DNA, 42 bp, Homo sapiens
  source 1..42: mol_type = unassigned DNA
atccctgaacagatactacatagatccaaccccatggcaaca

SEQ ID NO: 9392 - RNA, 49 nt, Homo sapiens
  source 1..49: mol_type = unassigned RNA
acttaatgatgaggaaactgaggtgaagggaggcagagaaaccttccca

SEQ ID NO: 9393 - DNA, 49 bp, Homo sapiens
  source 1..49: mol_type = unassigned DNA
acttaatgatgaggaaactgaggtgaagggaggcagagaaaccttccca

SEQ ID NO: 9394 - DNA, 49 bp, Homo sapiens
  source 1..49: mol_type = unassigned DNA
tgggaaggtttctctgcctcccttcacctcagtttcctcatcattaagt

SEQ ID NO: 9395 - RNA, 31 nt, Homo sapiens
  source 1..31: mol_type = unassigned RNA
cttcaattattgtcatctgtagccaccagca

SEQ ID NO: 9396 - DNA, 31 bp, Homo sapiens
  source 1..31: mol_type = unassigned DNA
cttcaattattgtcatctgtagccaccagca

SEQ ID NO: 9397 - DNA, 31 bp, Homo sapiens
  source 1..31: mol_type = unassigned DNA
tgctggtggctacagatgacaataattgaag

SEQ ID NO: 9398 - RNA, 125 nt, Homo sapiens
  source 1..125: mol_type = unassigned RNA
atggcgggcgcccctcccccagcctcgctgccaccttgcatttgatctcagactgctgtgctagcaatcagcgagactccgtgggcgtaggaccctcccagccaggtgtgggatataatctcgtg

SEQ ID NO: 9399 - DNA, 125 bp, Homo sapiens
  source 1..125: mol_type = unassigned DNA
atggcgggcgcccctcccccagcctcgctgccaccttgcatttgatctcagactgctgtgctagcaatcagcgagactccgtgggcgtaggaccctcccagccaggtgtgggatataatctcgtg

SEQ ID NO: 9400 - DNA, 125 bp, Homo sapiens
  source 1..125: mol_type = unassigned DNA
cacgagattatatcccacacctggctgggagggtcctacgcccacggagtctcgctgattgctagcacagcagtctgagatcaaatgcaaggtggcagcgaggctgggggaggggcgcccgccat

SEQ ID NO: 9401 - RNA, 24 nt, Homo sapiens
  source 1..24: mol_type = unassigned RNA
tttggcagtgtaaaactcaaaccg

SEQ ID NO: 9402 - DNA, 24 bp, Homo sapiens
  source 1..24: mol_type = unassigned DNA
tttggcagtgtaaaactcaaaccg

SEQ ID NO: 9403 - DNA, 24 bp, Homo sapiens
  source 1..24: mol_type = unassigned DNA
cggtttgagttttacactgccaaa

SEQ ID NO: 9404 - RNA, 46 nt, Homo sapiens
  source 1..46: mol_type = unassigned RNA
ttacttctcagatagctgttctgcatgtagaatttttttttaaatg

SEQ ID NO: 9405 - DNA, 46 bp, Homo sapiens
  source 1..46: mol_type = unassigned DNA
ttacttctcagatagctgttctgcatgtagaatttttttttaaatg

SEQ ID NO: 9406 - DNA, 46 bp, Homo sapiens
  source 1..46: mol_type = unassigned DNA
catttaaaaaaaaattctacatgcagaacagctatctgagaagtaa

SEQ ID NO: 9407 - RNA, 31 nt, Homo sapiens
  source 1..31: mol_type = unassigned RNA
aggccaagaccaaggacctccagaacgtgta

SEQ ID NO: 9408 - DNA, 31 bp, Homo sapiens
  source 1..31: mol_type = unassigned DNA
aggccaagaccaaggacctccagaacgtgta

SEQ ID NO: 9409 - DNA, 31 bp, Homo sapiens
  source 1..31: mol_type = unassigned DNA
tacacgttctggaggtccttggtcttggcct

SEQ ID NO: 9410 - RNA, 24 nt, Homo sapiens
  source 1..24: mol_type = unassigned RNA
ttttgcacttgcagagctcacagt

SEQ ID NO: 9411 - DNA, 24 bp, Homo sapiens
  source 1..24: mol_type = unassigned DNA
ttttgcacttgcagagctcacagt

SEQ ID NO: 9412 - DNA, 24 bp, Homo sapiens
  source 1..24: mol_type = unassigned DNA
actgtgagctctgcaagtgcaaaa

SEQ ID NO: 9413 - RNA, 28 nt, Homo sapiens
  source 1..28: mol_type = unassigned RNA
cggccgcggtgacctctggagccagaaa

SEQ ID NO: 9414 - DNA, 28 bp, Homo sapiens
  source 1..28: mol_type = unassigned DNA
cggccgcggtgacctctggagccagaaa

SEQ ID NO: 9415 - DNA, 28 bp, Homo sapiens
  source 1..28: mol_type = unassigned DNA
tttctggctccagaggtcaccgcggccg

SEQ ID NO: 9416 - RNA, 26 nt, Homo sapiens
  source 1..26: mol_type = unassigned RNA
gggccagtgctctgagccggaggtgc

SEQ ID NO: 9417 - DNA, 26 bp, Homo sapiens
  source 1..26: mol_type = unassigned DNA
gggccagtgctctgagccggaggtgc

SEQ ID NO: 9418 - DNA, 26 bp, Homo sapiens
  source 1..26: mol_type = unassigned DNA
gcacctccggctcagagcactggccc

SEQ ID NO: 9419 - RNA, 24 nt, Homo sapiens
  source 1..24: mol_type = unassigned RNA
aaatccactggtaaattcactggt

SEQ ID NO: 9420 - DNA, 24 bp, Homo sapiens
  source 1..24: mol_type = unassigned DNA
aaatccactggtaaattcactggt

SEQ ID NO: 9421 - DNA, 24 bp, Homo sapiens
  source 1..24: mol_type = unassigned DNA
accagtgaatttaccagtggattt

SEQ ID NO: 9422 - RNA, 30 nt, Homo sapiens
  source 1..30: mol_type = unassigned RNA
agagccatccccactgcctggccagagcca

SEQ ID NO: 9423 - DNA, 30 bp, Homo sapiens
  source 1..30: mol_type = unassigned DNA
agagccatccccactgcctggccagagcca

SEQ ID NO: 9424 - DNA, 30 bp, Homo sapiens
  source 1..30: mol_type = unassigned DNA
tggctctggccaggcagtggggatggctct

SEQ ID NO: 9425 - RNA, 36 nt, Homo sapiens
  source 1..36: mol_type = unassigned RNA
atactgctgcagggtgatggtggaggaagtggggat

SEQ ID NO: 9426 - DNA, 36 bp, Homo sapiens
  source 1..36: mol_type = unassigned DNA
atactgctgcagggtgatggtggaggaagtggggat

SEQ ID NO: 9427 - DNA, 36 bp, Homo sapiens
  source 1..36: mol_type = unassigned DNA
atccccacttcctccaccatcaccctgcagcagtat

SEQ ID NO: 9428 - RNA, 23 nt, Homo sapiens
  source 1..23: mol_type = unassigned RNA
cacatcacaggtagacttcactc

SEQ ID NO: 9429 - DNA, 23 bp, Homo sapiens
  source 1..23: mol_type = unassigned DNA
cacatcacaggtagacttcactc

SEQ ID NO: 9430 - DNA, 23 bp, Homo sapiens
  source 1..23: mol_type = unassigned DNA
gagtgaagtctacctgtgatgtg

SEQ ID NO: 9431 - RNA, 29 nt, Homo sapiens
  source 1..29: mol_type = unassigned RNA
ctctccaggggtcgccgtggccggcatta

SEQ ID NO: 9432 - DNA, 29 bp, Homo sapiens
  source 1..29: mol_type = unassigned DNA
ctctccaggggtcgccgtggccggcatta

SEQ ID NO: 9433 - DNA, 29 bp, Homo sapiens
  source 1..29: mol_type = unassigned DNA
taatgccggccacggcgacccctggagag

SEQ ID NO: 9434 - RNA, 31 nt, Homo sapiens
  source 1..31: mol_type = unassigned RNA
atttcaatcgaccaagttccaaggacctatg

SEQ ID NO: 9435 - DNA, 31 bp, Homo sapiens
  source 1..31: mol_type = unassigned DNA
atttcaatcgaccaagttccaaggacctatg

SEQ ID NO: 9436 - DNA, 31 bp, Homo sapiens
  source 1..31: mol_type = unassigned DNA
cataggtccttggaacttggtcgattgaaat

SEQ ID NO: 9437 - RNA, 37 nt, Homo sapiens
  source 1..37: mol_type = unassigned RNA
tggttcagtggcctggctgttggcaggaactccaagt

SEQ ID NO: 9438 - DNA, 37 bp, Homo sapiens
  source 1..37: mol_type = unassigned DNA
tggttcagtggcctggctgttggcaggaactccaagt

SEQ ID NO: 9439 - DNA, 37 bp, Homo sapiens
  source 1..37: mol_type = unassigned DNA
acttggagttcctgccaacagccaggccactgaacca

SEQ ID NO: 9440 - RNA, 30 nt, Homo sapiens
  source 1..30: mol_type = unassigned RNA
tttcctgctgggccagacttaggaggaggt

SEQ ID NO: 9441 - DNA, 30 bp, Homo sapiens
  source 1..30: mol_type = unassigned DNA
tttcctgctgggccagacttaggaggaggt

SEQ ID NO: 9442 - DNA, 30 bp, Homo sapiens
  source 1..30: mol_type = unassigned DNA
acctcctcctaagtctggcccagcaggaaa

SEQ ID NO: 9443 - RNA, 32 nt, Homo sapiens
  source 1..32: mol_type = unassigned RNA
atggtctctgtgctactccatcactggaaggc

SEQ ID NO: 9444 - DNA, 32 bp, Homo sapiens
  source 1..32: mol_type = unassigned DNA
atggtctctgtgctactccatcactggaaggc

SEQ ID NO: 9445 - DNA, 32 bp, Homo sapiens
  source 1..32: mol_type = unassigned DNA
gccttccagtgatggagtagcacagagaccat

SEQ ID NO: 9446 - RNA, 82 nt, Homo sapiens
  source 1..82: mol_type = unassigned RNA
ctactctggaggctgcggtgggaggattgcttgagaccaggaactggaggctgcagtgagctatgattgtgccacttcaccc

SEQ ID NO: 9447 - DNA, 82 bp, Homo sapiens
  source 1..82: mol_type = unassigned DNA
ctactctggaggctgcggtgggaggattgcttgagaccaggaactggaggctgcagtgagctatgattgtgccacttcaccc

SEQ ID NO: 9448 - DNA, 82 bp, Homo sapiens
  source 1..82: mol_type = unassigned DNA
gggtgaagtggcacaatcatagctcactgcagcctccagttcctggtctcaagcaatcctcccaccgcagcctccagagtag

SEQ ID NO: 9449 - RNA, 29 nt, Homo sapiens
  source 1..29: mol_type = unassigned RNA
ggaacaagattgcagggtatgtaggctgt

SEQ ID NO: 9450 - DNA, 29 bp, Homo sapiens
  source 1..29: mol_type = unassigned DNA
ggaacaagattgcagggtatgtaggctgt

SEQ ID NO: 9451 - DNA, 29 bp, Homo sapiens
  source 1..29: mol_type = unassigned DNA
acagcctacataccctgcaatcttgttcc

SEQ ID NO: 9452 - RNA, 132 nt, Homo sapiens
  source 1..132: mol_type = unassigned RNA
cagtgccctgtggaggaggcgcctgcacgcccagccttgtcctgccgcacccaacacggcctctgtcagctctgcagagcccaagaacctgttaatagagcaggactgagtgcaggagtgtgtgtgtgcacg

SEQ ID NO: 9453 - DNA, 132 bp, Homo sapiens
  source 1..132: mol_type = unassigned DNA
cagtgccctgtggaggaggcgcctgcacgcccagccttgtcctgccgcacccaacacggcctctgtcagctctgcagagcccaagaacctgttaatagagcaggactgagtgcaggagtgtgtgtgtgcacg

SEQ ID NO: 9454 - DNA, 132 bp, Homo sapiens
  source 1..132: mol_type = unassigned DNA
cgtgcacacacacactcctgcactcagtcctgctctattaacaggttcttgggctctgcagagctgacagaggccgtgttgggtgcggcaggacaaggctgggcgtgcaggcgcctcctccacagggcactg

SEQ ID NO: 9455 - RNA, 32 nt, Homo sapiens
  source 1..32: mol_type = unassigned RNA
tgcacacatataaaagttgatactgtggcagt

SEQ ID NO: 9456 - DNA, 32 bp, Homo sapiens
  source 1..32: mol_type = unassigned DNA
tgcacacatataaaagttgatactgtggcagt

SEQ ID NO: 9457 - DNA, 32 bp, Homo sapiens
  source 1..32: mol_type = unassigned DNA
actgccacagtatcaacttttatatgtgtgca

SEQ ID NO: 9458 - RNA, 28 nt, Homo sapiens
  source 1..28: mol_type = unassigned RNA
tgaagagaatgaagatcaagacgggcaa

SEQ ID NO: 9459 - DNA, 28 bp, Homo sapiens
  source 1..28: mol_type = unassigned DNA
tgaagagaatgaagatcaagacgggcaa

SEQ ID NO: 9460 - DNA, 28 bp, Homo sapiens
  source 1..28: mol_type = unassigned DNA
ttgcccgtcttgatcttcattctcttca

SEQ ID NO: 9461 - RNA, 32 nt, Homo sapiens
  source 1..32: mol_type = unassigned RNA
agtcaaatgtagtgaccaaattgtggaagaga

SEQ ID NO: 9462 - DNA, 32 bp, Homo sapiens
  source 1..32: mol_type = unassigned DNA
agtcaaatgtagtgaccaaattgtggaagaga

SEQ ID NO: 9463 - DNA, 32 bp, Homo sapiens
  source 1..32: mol_type = unassigned DNA
tctcttccacaatttggtcactacatttgact

SEQ ID NO: 9464 - RNA, 31 nt, Homo sapiens
  source 1..31: mol_type = unassigned RNA
tctcaactctgacacctcctgacgaccaaat

SEQ ID NO: 9465 - DNA, 31 bp, Homo sapiens
  source 1..31: mol_type = unassigned DNA
tctcaactctgacacctcctgacgaccaaat

SEQ ID NO: 9466 - DNA, 31 bp, Homo sapiens
  source 1..31: mol_type = unassigned DNA
atttggtcgtcaggaggtgtcagagttgaga

SEQ ID NO: 9467 - RNA, 31 nt, Homo sapiens
  source 1..31: mol_type = unassigned RNA
tttttcacatggtagaaatcgcacagtttcc

SEQ ID NO: 9468 - DNA, 31 bp, Homo sapiens
  source 1..31: mol_type = unassigned DNA
tttttcacatggtagaaatcgcacagtttcc

SEQ ID NO: 9469 - DNA, 31 bp, Homo sapiens
  source 1..31: mol_type = unassigned DNA
ggaaactgtgcgatttctaccatgtgaaaaa

SEQ ID NO: 9470 - RNA, 29 nt, Homo sapiens
  source 1..29: mol_type = unassigned RNA
aagagggggtcccagttcttgaccttgac

SEQ ID NO: 9471 - DNA, 29 bp, Homo sapiens
  source 1..29: mol_type = unassigned DNA
aagagggggtcccagttcttgaccttgac

SEQ ID NO: 9472 - DNA, 29 bp, Homo sapiens
  source 1..29: mol_type = unassigned DNA
gtcaaggtcaagaactgggaccccctctt

SEQ ID NO: 9473 - RNA, 31 nt, Homo sapiens
  source 1..31: mol_type = unassigned RNA
gggcaatgagtcagggctgaggaccaggaca

SEQ ID NO: 9474 - DNA, 31 bp, Homo sapiens
  source 1..31: mol_type = unassigned DNA
gggcaatgagtcagggctgaggaccaggaca

SEQ ID NO: 9475 - DNA, 31 bp, Homo sapiens
  source 1..31: mol_type = unassigned DNA
tgtcctggtcctcagccctgactcattgccc

SEQ ID NO: 9476 - RNA, 61 nt, Homo sapiens
  source 1..61: mol_type = unassigned RNA
ggattgctgatgtctgggaacctgatcaccagcttctctggaggccgtaaagatggatttc

SEQ ID NO: 9477 - DNA, 61 bp, Homo sapiens
  source 1..61: mol_type = unassigned DNA
ggattgctgatgtctgggaacctgatcaccagcttctctggaggccgtaaagatggatttc

SEQ ID NO: 9478 - DNA, 61 bp, Homo sapiens
  source 1..61: mol_type = unassigned DNA
gaaatccatctttacggcctccagagaagctggtgatcaggttcccagacatcagcaatcc

SEQ ID NO: 9479 - RNA, 140 nt, Homo sapiens
  source 1..140: mol_type = unassigned RNA
ctcaggctaaaaggaatagatagtagtttcataaaggactgatataactgtagagtcttcagaactggccactacagccagcacattttctctacagacgtaagtatgtctattaataccagccagcttggtgagttaga

SEQ ID NO: 9480 - DNA, 140 bp, Homo sapiens
  source 1..140: mol_type = unassigned DNA
ctcaggctaaaaggaatagatagtagtttcataaaggactgatataactgtagagtcttcagaactggccactacagccagcacattttctctacagacgtaagtatgtctattaataccagccagcttggtgagttaga

SEQ ID NO: 9481 - DNA, 140 bp, Homo sapiens
  source 1..140: mol_type = unassigned DNA
tctaactcaccaagctggctggtattaatagacatacttacgtctgtagagaaaatgtgctggctgtagtggccagttctgaagactctacagttatatcagtcctttatgaaactactatctattccttttagcctgag

SEQ ID NO: 9482 - RNA, 30 nt, Homo sapiens
  source 1..30: mol_type = unassigned RNA
tttacccataaaagtgaccaggtagaccct

SEQ ID NO: 9483 - DNA, 30 bp, Homo sapiens
  source 1..30: mol_type = unassigned DNA
tttacccataaaagtgaccaggtagaccct

SEQ ID NO: 9484 - DNA, 30 bp, Homo sapiens
  source 1..30: mol_type = unassigned DNA
agggtctacctggtcacttttatgggtaaa

SEQ ID NO: 9485 - RNA, 155 nt, Homo sapiens
  source 1..155: mol_type = unassigned RNA
agcttcagaaagtaagcttttagaaatacagactgaaaagaacaaacagaagattgatttggacagtatggaaaactcagagaggataaagatcatacgacaaaacctacagatggagataaaaattactactgttattcaacatgtgttccagg

SEQ ID NO: 9486 - DNA, 155 bp, Homo sapiens
  source 1..155: mol_type = unassigned DNA
agcttcagaaagtaagcttttagaaatacagactgaaaagaacaaacagaagattgatttggacagtatggaaaactcagagaggataaagatcatacgacaaaacctacagatggagataaaaattactactgttattcaacatgtgttccagg

SEQ ID NO: 9487 - DNA, 155 bp, Homo sapiens
  source 1..155: mol_type = unassigned DNA
cctggaacacatgttgaataacagtagtaatttttatctccatctgtaggttttgtcgtatgatctttatcctctctgagttttccatactgtccaaatcaatcttctgtttgttcttttcagtctgtatttctaaaagcttactttctgaagct

SEQ ID NO: 9488 - RNA, 171 nt, Homo sapiens
  source 1..171: mol_type = unassigned RNA
acaacccgccccctcaggccctgagtgacagatgtgctcaggtgctgggctgaaggaagacagagttaaacctaagcagcagccttttccagaagggcttcctccctgagctgagtcaggcccaccccagagggcatttgcatttaaccttgtgtataaggtcgtatgcat

SEQ ID NO: 9489 - DNA, 171 bp, Homo sapiens
  source 1..171: mol_type = unassigned DNA
acaacccgccccctcaggccctgagtgacagatgtgctcaggtgctgggctgaaggaagacagagttaaacctaagcagcagccttttccagaagggcttcctccctgagctgagtcaggcccaccccagagggcatttgcatttaaccttgtgtataaggtcgtatgcat

SEQ ID NO: 9490 - DNA, 171 bp, Homo sapiens
  source 1..171: mol_type = unassigned DNA
atgcatacgaccttatacacaaggttaaatgcaaatgccctctggggtgggcctgactcagctcagggaggaagcccttctggaaaaggctgctgcttaggtttaactctgtcttccttcagcccagcacctgagcacatctgtcactcagggcctgagggggcgggttgt

SEQ ID NO: 9491 - RNA, 29 nt, Homo sapiens
  source 1..29: mol_type = unassigned RNA
cagaaacaagtctgaccagtcgccgtcac

SEQ ID NO: 9492 - DNA, 29 bp, Homo sapiens
  source 1..29: mol_type = unassigned DNA
cagaaacaagtctgaccagtcgccgtcac

SEQ ID NO: 9493 - DNA, 29 bp, Homo sapiens
  source 1..29: mol_type = unassigned DNA
gtgacggcgactggtcagacttgtttctg

SEQ ID NO: 9494 - RNA, 31 nt, Homo sapiens
  source 1..31: mol_type = unassigned RNA
atgggagcatcagcctggatgggctctgaaa

SEQ ID NO: 9495 - DNA, 31 bp, Homo sapiens
  source 1..31: mol_type = unassigned DNA
atgggagcatcagcctggatgggctctgaaa

SEQ ID NO: 9496 - DNA, 31 bp, Homo sapiens
  source 1..31: mol_type = unassigned DNA
tttcagagcccatccaggctgatgctcccat

SEQ ID NO: 9497 - RNA, 38 nt, Homo sapiens
  source 1..38: mol_type = unassigned RNA
taaaactgacatttactcttgacaaataaaacatatat

SEQ ID NO: 9498 - DNA, 38 bp, Homo sapiens
  source 1..38: mol_type = unassigned DNA
taaaactgacatttactcttgacaaataaaacatatat

SEQ ID NO: 9499 - DNA, 38 bp, Homo sapiens
  source 1..38: mol_type = unassigned DNA
atatatgttttatttgtcaagagtaaatgtcagtttta

SEQ ID NO: 9500 - RNA, 46 nt, Homo sapiens
  source 1..46: mol_type = unassigned RNA
gcttttattgtttcggcttgcctgattgctcagccaggacttcaaa

SEQ ID NO: 9501 - DNA, 46 bp, Homo sapiens
  source 1..46: mol_type = unassigned DNA
gcttttattgtttcggcttgcctgattgctcagccaggacttcaaa

SEQ ID NO: 9502 - DNA, 46 bp, Homo sapiens
  source 1..46: mol_type = unassigned DNA
tttgaagtcctggctgagcaatcaggcaagccgaaacaataaaagc

SEQ ID NO: 9503 - RNA, 58 nt, Homo sapiens
  source 1..58: mol_type = unassigned RNA
tcttttactttcatggcatttgtagaattcatggattttcctttagtgtcaggtttct

SEQ ID NO: 9504 - DNA, 58 bp, Homo sapiens
  source 1..58: mol_type = unassigned DNA
tcttttactttcatggcatttgtagaattcatggattttcctttagtgtcaggtttct

SEQ ID NO: 9505 - DNA, 58 bp, Homo sapiens
  source 1..58: mol_type = unassigned DNA
agaaacctgacactaaaggaaaatccatgaattctacaaatgccatgaaagtaaaaga

SEQ ID NO: 9506 - RNA, 77 nt, Homo sapiens
  source 1..77: mol_type = unassigned RNA
ataggtagtaggtgtactttgaccctgcttcaccctacttgcctcctgatgtttacagcttaggtatgtttgttgga

SEQ ID NO: 9507 - DNA, 77 bp, Homo sapiens
  source 1..77: mol_type = unassigned DNA
ataggtagtaggtgtactttgaccctgcttcaccctacttgcctcctgatgtttacagcttaggtatgtttgttgga

SEQ ID NO: 9508 - DNA, 77 bp, Homo sapiens
  source 1..77: mol_type = unassigned DNA
tccaacaaacatacctaagctgtaaacatcaggaggcaagtagggtgaagcagggtcaaagtacacctactacctat

SEQ ID NO: 9509 - RNA, 31 nt, Homo sapiens
  source 1..31: mol_type = unassigned RNA
ttaatagaacttgaccagtacctggataaag

SEQ ID NO: 9510 - DNA, 31 bp, Homo sapiens
  source 1..31: mol_type = unassigned DNA
ttaatagaacttgaccagtacctggataaag

SEQ ID NO: 9511 - DNA, 31 bp, Homo sapiens
  source 1..31: mol_type = unassigned DNA
ctttatccaggtactggtcaagttctattaa

SEQ ID NO: 9512 - RNA, 94 nt, Homo sapiens
  source 1..94: mol_type = unassigned RNA
catacatatgggagagctggaccaagaacagcagagctgcccatctgatccccagctaaggcatcagtaagcctagccaagactggagactgaa

SEQ ID NO: 9513 - DNA, 94 bp, Homo sapiens
  source 1..94: mol_type = unassigned DNA
catacatatgggagagctggaccaagaacagcagagctgcccatctgatccccagctaaggcatcagtaagcctagccaagactggagactgaa

SEQ ID NO: 9514 - DNA, 94 bp, Homo sapiens
  source 1..94: mol_type = unassigned DNA
ttcagtctccagtcttggctaggcttactgatgccttagctggggatcagatgggcagctctgctgttcttggtccagctctcccatatgtatg

SEQ ID NO: 9515 - RNA, 42 nt, Homo sapiens
  source 1..42: mol_type = unassigned RNA
ccttcagtgatgtcccagatttctgaccatgagcctgcacgc

SEQ ID NO: 9516 - DNA, 42 bp, Homo sapiens
  source 1..42: mol_type = unassigned DNA
ccttcagtgatgtcccagatttctgaccatgagcctgcacgc

SEQ ID NO: 9517 - DNA, 42 bp, Homo sapiens
  source 1..42: mol_type = unassigned DNA
gcgtgcaggctcatggtcagaaatctgggacatcactgaagg

SEQ ID NO: 9518 - RNA, 60 nt, Homo sapiens
  source 1..60: mol_type = unassigned RNA
agcaacacccaggtagttttgctgtcagctacaatgccttctgatgtgcttgaggtgatc

SEQ ID NO: 9519 - DNA, 60 bp, Homo sapiens
  source 1..60: mol_type = unassigned DNA
agcaacacccaggtagttttgctgtcagctacaatgccttctgatgtgcttgaggtgatc

SEQ ID NO: 9520 - DNA, 60 bp, Homo sapiens
  source 1..60: mol_type = unassigned DNA
gatcacctcaagcacatcagaaggcattgtagctgacagcaaaactacctgggtgttgct

SEQ ID NO: 9521 - RNA, 57 nt, Homo sapiens
  source 1..57: mol_type = unassigned RNA
cctcttctgggtattgtgggtccagtcaccagcttgtagaaccagatcactcttcag

SEQ ID NO: 9522 - DNA, 57 bp, Homo sapiens
  source 1..57: mol_type = unassigned DNA
cctcttctgggtattgtgggtccagtcaccagcttgtagaaccagatcactcttcag

SEQ ID NO: 9523 - DNA, 57 bp, Homo sapiens
  source 1..57: mol_type = unassigned DNA
ctgaagagtgatctggttctacaagctggtgactggacccacaatacccagaagagg

SEQ ID NO: 9524 - RNA, 31 nt, Homo sapiens
  source 1..31: mol_type = unassigned RNA
ccaccaagatcgagtgtgactggaagaggct

SEQ ID NO: 9525 - DNA, 31 bp, Homo sapiens
  source 1..31: mol_type = unassigned DNA
ccaccaagatcgagtgtgactggaagaggct

SEQ ID NO: 9526 - DNA, 31 bp, Homo sapiens
  source 1..31: mol_type = unassigned DNA
agcctcttccagtcacactcgatcttggtgg

SEQ ID NO: 9527 - RNA, 33 nt, Homo sapiens
  source 1..33: mol_type = unassigned RNA
tcttgaaggaatttattgaccagatgttggtaa

SEQ ID NO: 9528 - DNA, 33 bp, Homo sapiens
  source 1..33: mol_type = unassigned DNA
tcttgaaggaatttattgaccagatgttggtaa

SEQ ID NO: 9529 - DNA, 33 bp, Homo sapiens
  source 1..33: mol_type = unassigned DNA
ttaccaacatctggtcaataaattccttcaaga

SEQ ID NO: 9530 - RNA, 30 nt, Homo sapiens
  source 1..30: mol_type = unassigned RNA
tattcacaacttgaccagattagctgtcct

SEQ ID NO: 9531 - DNA, 30 bp, Homo sapiens
  source 1..30: mol_type = unassigned DNA
tattcacaacttgaccagattagctgtcct

SEQ ID NO: 9532 - DNA, 30 bp, Homo sapiens
  source 1..30: mol_type = unassigned DNA
aggacagctaatctggtcaagttgtgaata

SEQ ID NO: 9533 - RNA, 52 nt, Homo sapiens
  source 1..52: mol_type = unassigned RNA
aaacactgtggcactggtagaaaaatagacacatagatcaatggaacagaat

SEQ ID NO: 9534 - DNA, 52 bp, Homo sapiens
  source 1..52: mol_type = unassigned DNA
aaacactgtggcactggtagaaaaatagacacatagatcaatggaacagaat

SEQ ID NO: 9535 - DNA, 52 bp, Homo sapiens
  source 1..52: mol_type = unassigned DNA
attctgttccattgatctatgtgtctatttttctaccagtgccacagtgttt

SEQ ID NO: 9536 - RNA, 33 nt, Homo sapiens
  source 1..33: mol_type = unassigned RNA
aggctgtcatgaaggatgtagttctgattcgaa

SEQ ID NO: 9537 - DNA, 33 bp, Homo sapiens
  source 1..33: mol_type = unassigned DNA
aggctgtcatgaaggatgtagttctgattcgaa

SEQ ID NO: 9538 - DNA, 33 bp, Homo sapiens
  source 1..33: mol_type = unassigned DNA
ttcgaatcagaactacatccttcatgacagcct

SEQ ID NO: 9539 - RNA, 30 nt, Homo sapiens
  source 1..30: mol_type = unassigned RNA
tgctccagccagagctcgaggttagctctt

SEQ ID NO: 9540 - DNA, 30 bp, Homo sapiens
  source 1..30: mol_type = unassigned DNA
tgctccagccagagctcgaggttagctctt

SEQ ID NO: 9541 - DNA, 30 bp, Homo sapiens
  source 1..30: mol_type = unassigned DNA
aagagctaacctcgagctctggctggagca

SEQ ID NO: 9542 - RNA, 48 nt, Homo sapiens
  source 1..48: mol_type = unassigned RNA
gtgcaccactggaagatattcaaacttgagaagttgacagaaagcaaa

SEQ ID NO: 9543 - DNA, 48 bp, Homo sapiens
  source 1..48: mol_type = unassigned DNA
gtgcaccactggaagatattcaaacttgagaagttgacagaaagcaaa

SEQ ID NO: 9544 - DNA, 48 bp, Homo sapiens
  source 1..48: mol_type = unassigned DNA
tttgctttctgtcaacttctcaagtttgaatatcttccagtggtgcac

SEQ ID NO: 9545 - RNA, 36 nt, Homo sapiens
  source 1..36: mol_type = unassigned RNA
gaattatcctgttctgcttgttgaacagagaaaatg

SEQ ID NO: 9546 - DNA, 36 bp, Homo sapiens
  source 1..36: mol_type = unassigned DNA
gaattatcctgttctgcttgttgaacagagaaaatg

SEQ ID NO: 9547 - DNA, 36 bp, Homo sapiens
  source 1..36: mol_type = unassigned DNA
cattttctctgttcaacaagcagaacaggataattc

SEQ ID NO: 9548 - RNA, 42 nt, Homo sapiens
  source 1..42: mol_type = unassigned RNA
ggcagtgaactgcagtctctgccctgcgcgcagagccctcca

SEQ ID NO: 9549 - DNA, 42 bp, Homo sapiens
  source 1..42: mol_type = unassigned DNA
ggcagtgaactgcagtctctgccctgcgcgcagagccctcca

SEQ ID NO: 9550 - DNA, 42 bp, Homo sapiens
  source 1..42: mol_type = unassigned DNA
tggagggctctgcgcgcagggcagagactgcagttcactgcc

SEQ ID NO: 9551 - RNA, 30 nt, Homo sapiens
  source 1..30: mol_type = unassigned RNA
tcgggacctttcccagatccgaggagatgg

SEQ ID NO: 9552 - DNA, 30 bp, Homo sapiens
  source 1..30: mol_type = unassigned DNA
tcgggacctttcccagatccgaggagatgg

SEQ ID NO: 9553 - DNA, 30 bp, Homo sapiens
  source 1..30: mol_type = unassigned DNA
ccatctcctcggatctgggaaaggtcccga

SEQ ID NO: 9554 - RNA, 58 nt, Homo sapiens
  source 1..58: mol_type = unassigned RNA
tggattttcaggttccccagtgaggatatgtgtttgaaggtagactttccccctctca

SEQ ID NO: 9555 - DNA, 58 bp, Homo sapiens
  source 1..58: mol_type = unassigned DNA
tggattttcaggttccccagtgaggatatgtgtttgaaggtagactttccccctctca

SEQ ID NO: 9556 - DNA, 58 bp, Homo sapiens
  source 1..58: mol_type = unassigned DNA
tgagagggggaaagtctaccttcaaacacatatcctcactggggaacctgaaaatcca

SEQ ID NO: 9557 - RNA, 34 nt, Homo sapiens
  source 1..34: mol_type = unassigned RNA
cccatcgcccaggatgagaggactgaggcatcag

SEQ ID NO: 9558 - DNA, 34 bp, Homo sapiens
  source 1..34: mol_type = unassigned DNA
cccatcgcccaggatgagaggactgaggcatcag

SEQ ID NO: 9559 - DNA, 34 bp, Homo sapiens
  source 1..34: mol_type = unassigned DNA
ctgatgcctcagtcctctcatcctgggcgatggg

SEQ ID NO: 9560 - RNA, 73 nt, Homo sapiens
  source 1..73: mol_type = unassigned RNA
tactcttcctggtgatgctgatttctttcagcaggagcagcagttgctccaaccatcaccaagagtgataggc

SEQ ID NO: 9561 - DNA, 73 bp, Homo sapiens
  source 1..73: mol_type = unassigned DNA
tactcttcctggtgatgctgatttctttcagcaggagcagcagttgctccaaccatcaccaagagtgataggc

SEQ ID NO: 9562 - DNA, 73 bp, Homo sapiens
  source 1..73: mol_type = unassigned DNA
gcctatcactcttggtgatggttggagcaactgctgctcctgctgaaagaaatcagcatcaccaggaagagta

SEQ ID NO: 9563 - RNA, 31 nt, Homo sapiens
  source 1..31: mol_type = unassigned RNA
gtgcttgctgggctcaggacctggagctgct

SEQ ID NO: 9564 - DNA, 31 bp, Homo sapiens
  source 1..31: mol_type = unassigned DNA
gtgcttgctgggctcaggacctggagctgct

SEQ ID NO: 9565 - DNA, 31 bp, Homo sapiens
  source 1..31: mol_type = unassigned DNA
agcagctccaggtcctgagcccagcaagcac

SEQ ID NO: 9566 - RNA, 32 nt, Homo sapiens
  source 1..32: mol_type = unassigned RNA
cctaccgcgcgcggcccggagctctgttccct

SEQ ID NO: 9567 - DNA, 32 bp, Homo sapiens
  source 1..32: mol_type = unassigned DNA
cctaccgcgcgcggcccggagctctgttccct

SEQ ID NO: 9568 - DNA, 32 bp, Homo sapiens
  source 1..32: mol_type = unassigned DNA
agggaacagagctccgggccgcgcgcggtagg

SEQ ID NO: 9569 - RNA, 34 nt, Homo sapiens
  source 1..34: mol_type = unassigned RNA
taccttgcaaaatgaagttgaatgctcaatattt

SEQ ID NO: 9570 - DNA, 34 bp, Homo sapiens
  source 1..34: mol_type = unassigned DNA
taccttgcaaaatgaagttgaatgctcaatattt

SEQ ID NO: 9571 - DNA, 34 bp, Homo sapiens
  source 1..34: mol_type = unassigned DNA
aaatattgagcattcaacttcattttgcaaggta

SEQ ID NO: 9572 - RNA, 78 nt, Homo sapiens
  source 1..78: mol_type = unassigned RNA
cttggctggctgccctgaaaagggactgggacttggctctgggaaagacatggctccctttcaggctgagtgaaaccc

SEQ ID NO: 9573 - DNA, 78 bp, Homo sapiens
  source 1..78: mol_type = unassigned DNA
cttggctggctgccctgaaaagggactgggacttggctctgggaaagacatggctccctttcaggctgagtgaaaccc

SEQ ID NO: 9574 - DNA, 78 bp, Homo sapiens
  source 1..78: mol_type = unassigned DNA
gggtttcactcagcctgaaagggagccatgtctttcccagagccaagtcccagtcccttttcagggcagccagccaag

SEQ ID NO: 9575 - RNA, 75 nt, Homo sapiens
  source 1..75: mol_type = unassigned RNA
ttttataggagctttatgaacatatgaatagttccttgggaggtgcttcattagaaggatcccaagtatatcttg

SEQ ID NO: 9576 - DNA, 75 bp, Homo sapiens
  source 1..75: mol_type = unassigned DNA
ttttataggagctttatgaacatatgaatagttccttgggaggtgcttcattagaaggatcccaagtatatcttg

SEQ ID NO: 9577 - DNA, 75 bp, Homo sapiens
  source 1..75: mol_type = unassigned DNA
caagatatacttgggatccttctaatgaagcacctcccaaggaactattcatatgttcataaagctcctataaaa

SEQ ID NO: 9578 - RNA, 23 nt, Homo sapiens
  source 1..23: mol_type = unassigned RNA
ttactcaatagagaactcacaca

SEQ ID NO: 9579 - DNA, 23 bp, Homo sapiens
  source 1..23: mol_type = unassigned DNA
ttactcaatagagaactcacaca

SEQ ID NO: 9580 - DNA, 23 bp, Homo sapiens
  source 1..23: mol_type = unassigned DNA
tgtgtgagttctctattgagtaa

SEQ ID NO: 9581 - RNA, 31 nt, Homo sapiens
  source 1..31: mol_type = unassigned RNA
cagacatgctgcggccagatcccagggatac

SEQ ID NO: 9582 - DNA, 31 bp, Homo sapiens
  source 1..31: mol_type = unassigned DNA
cagacatgctgcggccagatcccagggatac

SEQ ID NO: 9583 - DNA, 31 bp, Homo sapiens
  source 1..31: mol_type = unassigned DNA
gtatccctgggatctggccgcagcatgtctg

SEQ ID NO: 9584 - RNA, 31 nt, Homo sapiens
  source 1..31: mol_type = unassigned RNA
cagtccccaaaggatcaggtctcagaaccaa

SEQ ID NO: 9585 - DNA, 31 bp, Homo sapiens
  source 1..31: mol_type = unassigned DNA
cagtccccaaaggatcaggtctcagaaccaa

SEQ ID NO: 9586 - DNA, 31 bp, Homo sapiens
  source 1..31: mol_type = unassigned DNA
ttggttctgagacctgatcctttggggactg

SEQ ID NO: 9587 - RNA, 40 nt, Homo sapiens
  source 1..40: mol_type = unassigned RNA
attgtgtcccctttaagaaaaaggtaacactgaagttcta

SEQ ID NO: 9588 - DNA, 40 bp, Homo sapiens
  source 1..40: mol_type = unassigned DNA
attgtgtcccctttaagaaaaaggtaacactgaagttcta

SEQ ID NO: 9589 - DNA, 40 bp, Homo sapiens
  source 1..40: mol_type = unassigned DNA
tagaacttcagtgttacctttttcttaaaggggacacaat

SEQ ID NO: 9590 - RNA, 47 nt, Homo sapiens
  source 1..47: mol_type = unassigned RNA
catgtgacagagatggtgctggcttggcgctttacccttgaccaggg

SEQ ID NO: 9591 - DNA, 47 bp, Homo sapiens
  source 1..47: mol_type = unassigned DNA
catgtgacagagatggtgctggcttggcgctttacccttgaccaggg

SEQ ID NO: 9592 - DNA, 47 bp, Homo sapiens
  source 1..47: mol_type = unassigned DNA
ccctggtcaagggtaaagcgccaagccagcaccatctctgtcacatg

SEQ ID NO: 9593 - RNA, 33 nt, Homo sapiens
  source 1..33: mol_type = unassigned RNA
tttttaaattgtagagctcacacctaaggaagc

SEQ ID NO: 9594 - DNA, 33 bp, Homo sapiens
  source 1..33: mol_type = unassigned DNA
tttttaaattgtagagctcacacctaaggaagc

SEQ ID NO: 9595 - DNA, 33 bp, Homo sapiens
  source 1..33: mol_type = unassigned DNA
gcttccttaggtgtgagctctacaatttaaaaa

SEQ ID NO: 9596 - RNA, 32 nt, Homo sapiens
  source 1..32: mol_type = unassigned RNA
tcttacatgatccaggcccagaacccaaactc

SEQ ID NO: 9597 - DNA, 32 bp, Homo sapiens
  source 1..32: mol_type = unassigned DNA
tcttacatgatccaggcccagaacccaaactc

SEQ ID NO: 9598 - DNA, 32 bp, Homo sapiens
  source 1..32: mol_type = unassigned DNA
gagtttgggttctgggcctggatcatgtaaga

SEQ ID NO: 9599 - RNA, 30 nt, Homo sapiens
  source 1..30: mol_type = unassigned RNA
agcgctggctggaaaggacactggagcagg

SEQ ID NO: 9600 - DNA, 30 bp, Homo sapiens
  source 1..30: mol_type = unassigned DNA
agcgctggctggaaaggacactggagcagg

SEQ ID NO: 9601 - DNA, 30 bp, Homo sapiens
  source 1..30: mol_type = unassigned DNA
cctgctccagtgtcctttccagccagcgct

SEQ ID NO: 9602 - RNA, 171 nt, Homo sapiens
  source 1..171: mol_type = unassigned RNA
ttttataggtccagcatgtctggcttgcacctagtaaagcagggccgagacagaaagaaaatagattctcaacgagatttcactgtggcttctccagcagaatttgttactcgctttgggggaaataaagtgattgagaaggtaagttgtaacttgctgaattattttgtc

SEQ ID NO: 9603 - DNA, 171 bp, Homo sapiens
  source 1..171: mol_type = unassigned DNA
ttttataggtccagcatgtctggcttgcacctagtaaagcagggccgagacagaaagaaaatagattctcaacgagatttcactgtggcttctccagcagaatttgttactcgctttgggggaaataaagtgattgagaaggtaagttgtaacttgctgaattattttgtc

SEQ ID NO: 9604 - DNA, 171 bp, Homo sapiens
  source 1..171: mol_type = unassigned DNA
gacaaaataattcagcaagttacaacttaccttctcaatcactttatttcccccaaagcgagtaacaaattctgctggagaagccacagtgaaatctcgttgagaatctattttctttctgtctcggccctgctttactaggtgcaagccagacatgctggacctataaaa

SEQ ID NO: 9605 - RNA, 170 nt, Homo sapiens
  source 1..170: mol_type = unassigned RNA
attcttacataatttccttccatttcatatagggtcctcctggtccccaaggtgtcaaaggtgaacgtggcagtcctggtggacctgtaagtattgatcctcttaactattattgaaaagcattaattgatatcaacctgtataaaagctgcatttgagacactagttcc

SEQ ID NO: 9606 - DNA, 170 bp, Homo sapiens
  source 1..170: mol_type = unassigned DNA
attcttacataatttccttccatttcatatagggtcctcctggtccccaaggtgtcaaaggtgaacgtggcagtcctggtggacctgtaagtattgatcctcttaactattattgaaaagcattaattgatatcaacctgtataaaagctgcatttgagacactagttcc

SEQ ID NO: 9607 - DNA, 170 bp, Homo sapiens
  source 1..170: mol_type = unassigned DNA
ggaactagtgtctcaaatgcagcttttatacaggttgatatcaattaatgcttttcaataatagttaagaggatcaatacttacaggtccaccaggactgccacgttcacctttgacaccttggggaccaggaggaccctatatgaaatggaaggaaattatgtaagaat

SEQ ID NO: 9608 - RNA, 26 nt, Homo sapiens
  source 1..26: mol_type = unassigned RNA
ttaggttttcagaattctgttgactt

SEQ ID NO: 9609 - DNA, 26 bp, Homo sapiens
  source 1..26: mol_type = unassigned DNA
ttaggttttcagaattctgttgactt

SEQ ID NO: 9610 - DNA, 26 bp, Homo sapiens
  source 1..26: mol_type = unassigned DNA
aagtcaacagaattctgaaaacctaa

SEQ ID NO: 9611 - RNA, 175 nt, Homo sapiens
  source 1..175: mol_type = unassigned RNA
gaggagttgtcaggaaagctacaggttactttgagacagtcgtcccaagtgcattagaggaactgtaaaaatctgtcacagaaggaacgatgatccataatcagaaaagttactgcagcttaaacaggaaacccttcttgttcaggactgtcatagccacagtttgcaggaagtg

SEQ ID NO: 9612 - DNA, 175 bp, Homo sapiens
  source 1..175: mol_type = unassigned DNA
gaggagttgtcaggaaagctacaggttactttgagacagtcgtcccaagtgcattagaggaactgtaaaaatctgtcacagaaggaacgatgatccataatcagaaaagttactgcagcttaaacaggaaacccttcttgttcaggactgtcatagccacagtttgcaggaagtg

SEQ ID NO: 9613 - DNA, 175 bp, Homo sapiens
  source 1..175: mol_type = unassigned DNA
cacttcctgcaaactgtggctatgacagtcctgaacaagaagggtttcctgtttaagctgcagtaacttttctgattatggatcatcgttccttctgtgacagatttttacagttcctctaatgcacttgggacgactgtctcaaagtaacctgtagctttcctgacaactcctc

SEQ ID NO: 9614 - RNA, 36 nt, Homo sapiens
  source 1..36: mol_type = unassigned RNA
tccaaacatactttctttgaaacactgatgttcaaa

SEQ ID NO: 9615 - DNA, 36 bp, Homo sapiens
  source 1..36: mol_type = unassigned DNA
tccaaacatactttctttgaaacactgatgttcaaa

SEQ ID NO: 9616 - DNA, 36 bp, Homo sapiens
  source 1..36: mol_type = unassigned DNA
tttgaacatcagtgtttcaaagaaagtatgtttgga

SEQ ID NO: 9617 - RNA, 30 nt, Homo sapiens
  source 1..30: mol_type = unassigned RNA
aacgttaagattatgagaatgatgttaaga

SEQ ID NO: 9618 - DNA, 30 bp, Homo sapiens
  source 1..30: mol_type = unassigned DNA
aacgttaagattatgagaatgatgttaaga

SEQ ID NO: 9619 - DNA, 30 bp, Homo sapiens
  source 1..30: mol_type = unassigned DNA
tcttaacatcattctcataatcttaacgtt

SEQ ID NO: 9620 - RNA, 30 nt, Homo sapiens
  source 1..30: mol_type = unassigned RNA
caacttattgaattgaccaggactaatgaa

SEQ ID NO: 9621 - DNA, 30 bp, Homo sapiens
  source 1..30: mol_type = unassigned DNA
caacttattgaattgaccaggactaatgaa

SEQ ID NO: 9622 - DNA, 30 bp, Homo sapiens
  source 1..30: mol_type = unassigned DNA
ttcattagtcctggtcaattcaataagttg

SEQ ID NO: 9623 - RNA, 30 nt, Homo sapiens
  source 1..30: mol_type = unassigned RNA
cagtctcatccagtctgaccagtagctaag

SEQ ID NO: 9624 - DNA, 30 bp, Homo sapiens
  source 1..30: mol_type = unassigned DNA
cagtctcatccagtctgaccagtagctaag

SEQ ID NO: 9625 - DNA, 30 bp, Homo sapiens
  source 1..30: mol_type = unassigned DNA
cttagctactggtcagactggatgagactg

SEQ ID NO: 9626 - RNA, 44 nt, Homo sapiens
  source 1..44: mol_type = unassigned RNA
ctgatgtggtagttggtgtggcatagatgtttgcactctgactg

SEQ ID NO: 9627 - DNA, 44 bp, Homo sapiens
  source 1..44: mol_type = unassigned DNA
ctgatgtggtagttggtgtggcatagatgtttgcactctgactg

SEQ ID NO: 9628 - DNA, 44 bp, Homo sapiens
  source 1..44: mol_type = unassigned DNA
cagtcagagtgcaaacatctatgccacaccaactaccacatcag

SEQ ID NO: 9629 - RNA, 132 nt, Homo sapiens
  source 1..132: mol_type = unassigned RNA
ctcagcaatggcagacgcccctcccccagcctcgctgctgccttgcagtttgatctcagactgctgtggtagcagtgagccaggctccgtgggcgtgggaccctctgagccagtcacgggatataatcttct

SEQ ID NO: 9630 - DNA, 132 bp, Homo sapiens
  source 1..132: mol_type = unassigned DNA
ctcagcaatggcagacgcccctcccccagcctcgctgctgccttgcagtttgatctcagactgctgtggtagcagtgagccaggctccgtgggcgtgggaccctctgagccagtcacgggatataatcttct

SEQ ID NO: 9631 - DNA, 132 bp, Homo sapiens
  source 1..132: mol_type = unassigned DNA
agaagattatatcccgtgactggctcagagggtcccacgcccacggagcctggctcactgctaccacagcagtctgagatcaaactgcaaggcagcagcgaggctgggggaggggcgtctgccattgctgag

SEQ ID NO: 9632 - RNA, 30 nt, Homo sapiens
  source 1..30: mol_type = unassigned RNA
ccctctctgcgctctctccttcggtctccc

SEQ ID NO: 9633 - DNA, 30 bp, Homo sapiens
  source 1..30: mol_type = unassigned DNA
ccctctctgcgctctctccttcggtctccc

SEQ ID NO: 9634 - DNA, 30 bp, Homo sapiens
  source 1..30: mol_type = unassigned DNA
gggagaccgaaggagagagcgcagagaggg

SEQ ID NO: 9635 - RNA, 31 nt, Homo sapiens
  source 1..31: mol_type = unassigned RNA
gtcagctctgtggactggagagttatgcagc

SEQ ID NO: 9636 - DNA, 31 bp, Homo sapiens
  source 1..31: mol_type = unassigned DNA
gtcagctctgtggactggagagttatgcagc

SEQ ID NO: 9637 - DNA, 31 bp, Homo sapiens
  source 1..31: mol_type = unassigned DNA
gctgcataactctccagtccacagagctgac

SEQ ID NO: 9638 - RNA, 30 nt, Homo sapiens
  source 1..30: mol_type = unassigned RNA
agagccagaaatcgaaggtcacaggaagtt

SEQ ID NO: 9639 - DNA, 30 bp, Homo sapiens
  source 1..30: mol_type = unassigned DNA
agagccagaaatcgaaggtcacaggaagtt

SEQ ID NO: 9640 - DNA, 30 bp, Homo sapiens
  source 1..30: mol_type = unassigned DNA
aacttcctgtgaccttcgatttctggctct

SEQ ID NO: 9641 - RNA, 32 nt, Homo sapiens
  source 1..32: mol_type = unassigned RNA
ttcgacttgcgtgtgatgttgatcaggtaagg

SEQ ID NO: 9642 - DNA, 32 bp, Homo sapiens
  source 1..32: mol_type = unassigned DNA
ttcgacttgcgtgtgatgttgatcaggtaagg

SEQ ID NO: 9643 - DNA, 32 bp, Homo sapiens
  source 1..32: mol_type = unassigned DNA
ccttacctgatcaacatcacacgcaagtcgaa

SEQ ID NO: 9644 - RNA, 30 nt, Homo sapiens
  source 1..30: mol_type = unassigned RNA
ggcaaggcaccgcggaagcagctggccacc

SEQ ID NO: 9645 - DNA, 30 bp, Homo sapiens
  source 1..30: mol_type = unassigned DNA
ggcaaggcaccgcggaagcagctggccacc

SEQ ID NO: 9646 - DNA, 30 bp, Homo sapiens
  source 1..30: mol_type = unassigned DNA
ggtggccagctgcttccgcggtgccttgcc

SEQ ID NO: 9647 - RNA, 53 nt, Homo sapiens
  source 1..53: mol_type = unassigned RNA
tgggttaggaggctgatgtggagggggagcagatggtctgaactgagaccatg

SEQ ID NO: 9648 - DNA, 53 bp, Homo sapiens
  source 1..53: mol_type = unassigned DNA
tgggttaggaggctgatgtggagggggagcagatggtctgaactgagaccatg

SEQ ID NO: 9649 - DNA, 53 bp, Homo sapiens
  source 1..53: mol_type = unassigned DNA
catggtctcagttcagaccatctgctccccctccacatcagcctcctaaccca

SEQ ID NO: 9650 - RNA, 30 nt, Homo sapiens
  source 1..30: mol_type = unassigned RNA
tgatccctttgccctgtcgccggaacaacc

SEQ ID NO: 9651 - DNA, 30 bp, Homo sapiens
  source 1..30: mol_type = unassigned DNA
tgatccctttgccctgtcgccggaacaacc

SEQ ID NO: 9652 - DNA, 30 bp, Homo sapiens
  source 1..30: mol_type = unassigned DNA
ggttgttccggcgacagggcaaagggatca

SEQ ID NO: 9653 - RNA, 31 nt, Homo sapiens
  source 1..31: mol_type = unassigned RNA
tgcagactctggaagctgtgaaaaggaagca

SEQ ID NO: 9654 - DNA, 31 bp, Homo sapiens
  source 1..31: mol_type = unassigned DNA
tgcagactctggaagctgtgaaaaggaagca

SEQ ID NO: 9655 - DNA, 31 bp, Homo sapiens
  source 1..31: mol_type = unassigned DNA
tgcttccttttcacagcttccagagtctgca

SEQ ID NO: 9656 - RNA, 55 nt, Homo sapiens
  source 1..55: mol_type = unassigned RNA
taaatgggtaggagaatctgaaagacagctacgattgctgtttgatcaggtatga

SEQ ID NO: 9657 - DNA, 55 bp, Homo sapiens
  source 1..55: mol_type = unassigned DNA
taaatgggtaggagaatctgaaagacagctacgattgctgtttgatcaggtatga

SEQ ID NO: 9658 - DNA, 55 bp, Homo sapiens
  source 1..55: mol_type = unassigned DNA
tcatacctgatcaaacagcaatcgtagctgtctttcagattctcctacccattta

SEQ ID NO: 9659 - RNA, 28 nt, Homo sapiens
  source 1..28: mol_type = unassigned RNA
ttttatgtcactgcaataattaactgta

SEQ ID NO: 9660 - DNA, 28 bp, Homo sapiens
  source 1..28: mol_type = unassigned DNA
ttttatgtcactgcaataattaactgta

SEQ ID NO: 9661 - DNA, 28 bp, Homo sapiens
  source 1..28: mol_type = unassigned DNA
tacagttaattattgcagtgacataaaa

SEQ ID NO: 9662 - RNA, 30 nt, Homo sapiens
  source 1..30: mol_type = unassigned RNA
tcaactgggactgcaacctggacagagccg

SEQ ID NO: 9663 - DNA, 30 bp, Homo sapiens
  source 1..30: mol_type = unassigned DNA
tcaactgggactgcaacctggacagagccg

SEQ ID NO: 9664 - DNA, 30 bp, Homo sapiens
  source 1..30: mol_type = unassigned DNA
cggctctgtccaggttgcagtcccagttga

SEQ ID NO: 9665 - RNA, 33 nt, Homo sapiens
  source 1..33: mol_type = unassigned RNA
aacccctaagaacttgagtacaaggaagagacg

SEQ ID NO: 9666 - DNA, 33 bp, Homo sapiens
  source 1..33: mol_type = unassigned DNA
aacccctaagaacttgagtacaaggaagagacg

SEQ ID NO: 9667 - DNA, 33 bp, Homo sapiens
  source 1..33: mol_type = unassigned DNA
cgtctcttccttgtactcaagttcttaggggtt

SEQ ID NO: 9668 - RNA, 146 nt, Homo sapiens
  source 1..146: mol_type = unassigned RNA
ataggaggtcgttatgttaaagtctgggacatgttaaaaggaggacaattgctagtatctttgaaaaatcatcacaaaaccgtgacatgtttatgtctaagcagctctggacagaggttactctctggctcactggataggttggc

SEQ ID NO: 9669 - DNA, 146 bp, Homo sapiens
  source 1..146: mol_type = unassigned DNA
ataggaggtcgttatgttaaagtctgggacatgttaaaaggaggacaattgctagtatctttgaaaaatcatcacaaaaccgtgacatgtttatgtctaagcagctctggacagaggttactctctggctcactggataggttggc

SEQ ID NO: 9670 - DNA, 146 bp, Homo sapiens
  source 1..146: mol_type = unassigned DNA
gccaacctatccagtgagccagagagtaacctctgtccagagctgcttagacataaacatgtcacggttttgtgatgatttttcaaagatactagcaattgtcctccttttaacatgtcccagactttaacataacgacctcctat

SEQ ID NO: 9671 - RNA, 31 nt, Homo sapiens
  source 1..31: mol_type = unassigned RNA
ttaatggcgcccagatcaagcttcgagaata

SEQ ID NO: 9672 - DNA, 31 bp, Homo sapiens
  source 1..31: mol_type = unassigned DNA
ttaatggcgcccagatcaagcttcgagaata

SEQ ID NO: 9673 - DNA, 31 bp, Homo sapiens
  source 1..31: mol_type = unassigned DNA
tattctcgaagcttgatctgggcgccattaa

SEQ ID NO: 9674 - RNA, 48 nt, Homo sapiens
  source 1..48: mol_type = unassigned RNA
cccttctaggttcattgccaagtaccggcagccagaagggtgtagttt

SEQ ID NO: 9675 - DNA, 48 bp, Homo sapiens
  source 1..48: mol_type = unassigned DNA
cccttctaggttcattgccaagtaccggcagccagaagggtgtagttt

SEQ ID NO: 9676 - DNA, 48 bp, Homo sapiens
  source 1..48: mol_type = unassigned DNA
aaactacacccttctggctgccggtacttggcaatgaacctagaaggg

SEQ ID NO: 9677 - RNA, 142 nt, Homo sapiens
  source 1..142: mol_type = unassigned RNA
agtcatttcagccctctcttgtctctcatcctcttacccctgcgctcgtgccccctgccttctgccatgggatgacacagcacaaatgtcctcaccagatgtggggcctgtgatctgggactttcaagactccaagactgag

SEQ ID NO: 9678 - DNA, 142 bp, Homo sapiens
  source 1..142: mol_type = unassigned DNA
agtcatttcagccctctcttgtctctcatcctcttacccctgcgctcgtgccccctgccttctgccatgggatgacacagcacaaatgtcctcaccagatgtggggcctgtgatctgggactttcaagactccaagactgag

SEQ ID NO: 9679 - DNA, 142 bp, Homo sapiens
  source 1..142: mol_type = unassigned DNA
ctcagtcttggagtcttgaaagtcccagatcacaggccccacatctggtgaggacatttgtgctgtgtcatcccatggcagaaggcagggggcacgagcgcaggggtaagaggatgagagacaagagagggctgaaatgact

SEQ ID NO: 9680 - RNA, 35 nt, Homo sapiens
  source 1..35: mol_type = unassigned RNA
atttagcaagtttgaccagtttctgaaggaagttc

SEQ ID NO: 9681 - DNA, 35 bp, Homo sapiens
  source 1..35: mol_type = unassigned DNA
atttagcaagtttgaccagtttctgaaggaagttc

SEQ ID NO: 9682 - DNA, 35 bp, Homo sapiens
  source 1..35: mol_type = unassigned DNA
gaacttccttcagaaactggtcaaacttgctaaat

SEQ ID NO: 9683 - RNA, 32 nt, Homo sapiens
  source 1..32: mol_type = unassigned RNA
agctagaggaagatgtagatcctgcaaaagtt

SEQ ID NO: 9684 - DNA, 32 bp, Homo sapiens
  source 1..32: mol_type = unassigned DNA
agctagaggaagatgtagatcctgcaaaagtt

SEQ ID NO: 9685 - DNA, 32 bp, Homo sapiens
  source 1..32: mol_type = unassigned DNA
aacttttgcaggatctacatcttcctctagct

SEQ ID NO: 9686 - RNA, 30 nt, Homo sapiens
  source 1..30: mol_type = unassigned RNA
accttctcgatccgtcttctgcttcagttc

SEQ ID NO: 9687 - DNA, 30 bp, Homo sapiens
  source 1..30: mol_type = unassigned DNA
accttctcgatccgtcttctgcttcagttc

SEQ ID NO: 9688 - DNA, 30 bp, Homo sapiens
  source 1..30: mol_type = unassigned DNA
gaactgaagcagaagacggatcgagaaggt

SEQ ID NO: 9689 - RNA, 29 nt, Homo sapiens
  source 1..29: mol_type = unassigned RNA
gtcaatggaccgtcagttgtaggagatca

SEQ ID NO: 9690 - DNA, 29 bp, Homo sapiens
  source 1..29: mol_type = unassigned DNA
gtcaatggaccgtcagttgtaggagatca

SEQ ID NO: 9691 - DNA, 29 bp, Homo sapiens
  source 1..29: mol_type = unassigned DNA
tgatctcctacaactgacggtccattgac

SEQ ID NO: 9692 - RNA, 30 nt, Homo sapiens
  source 1..30: mol_type = unassigned RNA
ctgaaaatgaagccagtcgatacggaaggt

SEQ ID NO: 9693 - DNA, 30 bp, Homo sapiens
  source 1..30: mol_type = unassigned DNA
ctgaaaatgaagccagtcgatacggaaggt

SEQ ID NO: 9694 - DNA, 30 bp, Homo sapiens
  source 1..30: mol_type = unassigned DNA
accttccgtatcgactggcttcattttcag

SEQ ID NO: 9695 - RNA, 31 nt, Homo sapiens
  source 1..31: mol_type = unassigned RNA
gaagaatcagagagtcctgttgaaagaccct

SEQ ID NO: 9696 - DNA, 31 bp, Homo sapiens
  source 1..31: mol_type = unassigned DNA
gaagaatcagagagtcctgttgaaagaccct

SEQ ID NO: 9697 - DNA, 31 bp, Homo sapiens
  source 1..31: mol_type = unassigned DNA
agggtctttcaacaggactctctgattcttc

SEQ ID NO: 9698 - RNA, 31 nt, Homo sapiens
  source 1..31: mol_type = unassigned RNA
acatgtttattttaataaattgatggcaaaa

SEQ ID NO: 9699 - DNA, 31 bp, Homo sapiens
  source 1..31: mol_type = unassigned DNA
acatgtttattttaataaattgatggcaaaa

SEQ ID NO: 9700 - DNA, 31 bp, Homo sapiens
  source 1..31: mol_type = unassigned DNA
ttttgccatcaatttattaaaataaacatgt

SEQ ID NO: 9701 - RNA, 85 nt, Homo sapiens
  source 1..85: mol_type = unassigned RNA
cttggcagctgtgctgtctatcacaaacttgatggactgcctgacaacagaattgggacagtagcactatgtggtggacttggct

SEQ ID NO: 9702 - DNA, 85 bp, Homo sapiens
  source 1..85: mol_type = unassigned DNA
cttggcagctgtgctgtctatcacaaacttgatggactgcctgacaacagaattgggacagtagcactatgtggtggacttggct

SEQ ID NO: 9703 - DNA, 85 bp, Homo sapiens
  source 1..85: mol_type = unassigned DNA
agccaagtccaccacatagtgctactgtcccaattctgttgtcaggcagtccatcaagtttgtgatagacagcacagctgccaag

SEQ ID NO: 9704 - RNA, 31 nt, Homo sapiens
  source 1..31: mol_type = unassigned RNA
ctttctctgaagaatagtgagcaggtaaaga

SEQ ID NO: 9705 - DNA, 31 bp, Homo sapiens
  source 1..31: mol_type = unassigned DNA
ctttctctgaagaatagtgagcaggtaaaga

SEQ ID NO: 9706 - DNA, 31 bp, Homo sapiens
  source 1..31: mol_type = unassigned DNA
tctttacctgctcactattcttcagagaaag

SEQ ID NO: 9707 - RNA, 93 nt, Homo sapiens
  source 1..93: mol_type = unassigned RNA
tgaagtggtgttgtctgtctggggaaataactgaggttcgttgtctcgcgctaaggagaacaaagatgtgggcacacagggaatgggtttaag

SEQ ID NO: 9708 - DNA, 93 bp, Homo sapiens
  source 1..93: mol_type = unassigned DNA
tgaagtggtgttgtctgtctggggaaataactgaggttcgttgtctcgcgctaaggagaacaaagatgtgggcacacagggaatgggtttaag

SEQ ID NO: 9709 - DNA, 93 bp, Homo sapiens
  source 1..93: mol_type = unassigned DNA
cttaaacccattccctgtgtgcccacatctttgttctccttagcgcgagacaacgaacctcagttatttccccagacagacaacaccacttca

SEQ ID NO: 9710 - RNA, 129 nt, Homo sapiens
  source 1..129: mol_type = unassigned RNA
agggatgcaagagggatgaccccatttatgtcagctgtaagtggccgagcttatcctgctgcaattaccatcttagaaactgctcagaaaattgcaaaaggtaatttatttcagatcctaaatgagtta

SEQ ID NO: 9711 - DNA, 129 bp, Homo sapiens
  source 1..129: mol_type = unassigned DNA
agggatgcaagagggatgaccccatttatgtcagctgtaagtggccgagcttatcctgctgcaattaccatcttagaaactgctcagaaaattgcaaaaggtaatttatttcagatcctaaatgagtta

SEQ ID NO: 9712 - DNA, 129 bp, Homo sapiens
  source 1..129: mol_type = unassigned DNA
taactcatttaggatctgaaataaattaccttttgcaattttctgagcagtttctaagatggtaattgcagcaggataagctcggccacttacagctgacataaatggggtcatccctcttgcatccct

SEQ ID NO: 9713 - RNA, 30 nt, Homo sapiens
  source 1..30: mol_type = unassigned RNA
ttggccctgagccagcagatcaagcaaatg

SEQ ID NO: 9714 - DNA, 30 bp, Homo sapiens
  source 1..30: mol_type = unassigned DNA
ttggccctgagccagcagatcaagcaaatg

SEQ ID NO: 9715 - DNA, 30 bp, Homo sapiens
  source 1..30: mol_type = unassigned DNA
catttgcttgatctgctggctcagggccaa

SEQ ID NO: 9716 - RNA, 67 nt, Homo sapiens
  source 1..67: mol_type = unassigned RNA
acttgagattagggagtggtgatgactctgaacgagcatgctgccttcaagcgtctgtttaacaaag

SEQ ID NO: 9717 - DNA, 67 bp, Homo sapiens
  source 1..67: mol_type = unassigned DNA
acttgagattagggagtggtgatgactctgaacgagcatgctgccttcaagcgtctgtttaacaaag

SEQ ID NO: 9718 - DNA, 67 bp, Homo sapiens
  source 1..67: mol_type = unassigned DNA
ctttgttaaacagacgcttgaaggcagcatgctcgttcagagtcatcaccactccctaatctcaagt

SEQ ID NO: 9719 - RNA, 40 nt, Homo sapiens
  source 1..40: mol_type = unassigned RNA
gcccacctcccacttctctaccccgcccctactgtgctgc

SEQ ID NO: 9720 - DNA, 40 bp, Homo sapiens
  source 1..40: mol_type = unassigned DNA
gcccacctcccacttctctaccccgcccctactgtgctgc

SEQ ID NO: 9721 - DNA, 40 bp, Homo sapiens
  source 1..40: mol_type = unassigned DNA
gcagcacagtaggggcggggtagagaagtgggaggtgggc

SEQ ID NO: 9722 - RNA, 30 nt, Homo sapiens
  source 1..30: mol_type = unassigned RNA
tttctctctgaaagcagaaaaaggcactga

SEQ ID NO: 9723 - DNA, 30 bp, Homo sapiens
  source 1..30: mol_type = unassigned DNA
tttctctctgaaagcagaaaaaggcactga

SEQ ID NO: 9724 - DNA, 30 bp, Homo sapiens
  source 1..30: mol_type = unassigned DNA
tcagtgcctttttctgctttcagagagaaa

SEQ ID NO: 9725 - RNA, 34 nt, Homo sapiens
  source 1..34: mol_type = unassigned RNA
caaagaagccagatcagaaagggttgtgaaggtg

SEQ ID NO: 9726 - DNA, 34 bp, Homo sapiens
  source 1..34: mol_type = unassigned DNA
caaagaagccagatcagaaagggttgtgaaggtg

SEQ ID NO: 9727 - DNA, 34 bp, Homo sapiens
  source 1..34: mol_type = unassigned DNA
caccttcacaaccctttctgatctggcttctttg

SEQ ID NO: 9728 - RNA, 89 nt, Homo sapiens
  source 1..89: mol_type = unassigned RNA
tctggctctgagacacaggggtggtggaagtaggatagtgattggatgatgaatctgtagctgcagaggcatctgggcccctcaccttc

SEQ ID NO: 9729 - DNA, 89 bp, Homo sapiens
  source 1..89: mol_type = unassigned DNA
tctggctctgagacacaggggtggtggaagtaggatagtgattggatgatgaatctgtagctgcagaggcatctgggcccctcaccttc

SEQ ID NO: 9730 - DNA, 89 bp, Homo sapiens
  source 1..89: mol_type = unassigned DNA
gaaggtgaggggcccagatgcctctgcagctacagattcatcatccaatcactatcctacttccaccacccctgtgtctcagagccaga

SEQ ID NO: 9731 - RNA, 31 nt, Homo sapiens
  source 1..31: mol_type = unassigned RNA
gcatctgggagagctgagccttgaagctgga

SEQ ID NO: 9732 - DNA, 31 bp, Homo sapiens
  source 1..31: mol_type = unassigned DNA
gcatctgggagagctgagccttgaagctgga

SEQ ID NO: 9733 - DNA, 31 bp, Homo sapiens
  source 1..31: mol_type = unassigned DNA
tccagcttcaaggctcagctctcccagatgc

SEQ ID NO: 9734 - RNA, 40 nt, Homo sapiens
  source 1..40: mol_type = unassigned RNA
ctaggtgaagctctgagacaggactgagccgtgctgccac

SEQ ID NO: 9735 - DNA, 40 bp, Homo sapiens
  source 1..40: mol_type = unassigned DNA
ctaggtgaagctctgagacaggactgagccgtgctgccac

SEQ ID NO: 9736 - DNA, 40 bp, Homo sapiens
  source 1..40: mol_type = unassigned DNA
gtggcagcacggctcagtcctgtctcagagcttcacctag

SEQ ID NO: 9737 - RNA, 139 nt, Homo sapiens
  source 1..139: mol_type = unassigned RNA
ctcaattactgaacagatcactggtgtggcctgttgaacacagtgctgtaacttcctgcacaagagacaagtctgaaagttttgctttccgctgtgaaagcattggtgactgcttgacagactcgcttgaagcaaataa

SEQ ID NO: 9738 - DNA, 139 bp, Homo sapiens
  source 1..139: mol_type = unassigned DNA
ctcaattactgaacagatcactggtgtggcctgttgaacacagtgctgtaacttcctgcacaagagacaagtctgaaagttttgctttccgctgtgaaagcattggtgactgcttgacagactcgcttgaagcaaataa

SEQ ID NO: 9739 - DNA, 139 bp, Homo sapiens
  source 1..139: mol_type = unassigned DNA
ttatttgcttcaagcgagtctgtcaagcagtcaccaatgctttcacagcggaaagcaaaactttcagacttgtctcttgtgcaggaagttacagcactgtgttcaacaggccacaccagtgatctgttcagtaattgag

SEQ ID NO: 9740 - RNA, 30 nt, Homo sapiens
  source 1..30: mol_type = unassigned RNA
tgaagatgtacatcttgacctccggtttag

SEQ ID NO: 9741 - DNA, 30 bp, Homo sapiens
  source 1..30: mol_type = unassigned DNA
tgaagatgtacatcttgacctccggtttag

SEQ ID NO: 9742 - DNA, 30 bp, Homo sapiens
  source 1..30: mol_type = unassigned DNA
ctaaaccggaggtcaagatgtacatcttca

SEQ ID NO: 9743 - RNA, 31 nt, Homo sapiens
  source 1..31: mol_type = unassigned RNA
gtagtcgacaaagaatctggacgatgtaaag

SEQ ID NO: 9744 - DNA, 31 bp, Homo sapiens
  source 1..31: mol_type = unassigned DNA
gtagtcgacaaagaatctggacgatgtaaag

SEQ ID NO: 9745 - DNA, 31 bp, Homo sapiens
  source 1..31: mol_type = unassigned DNA
ctttacatcgtccagattctttgtcgactac

SEQ ID NO: 9746 - RNA, 58 nt, Homo sapiens
  source 1..58: mol_type = unassigned RNA
ggcttttaaagaagtggattgtattgtgagatcctgtgattcctggtggccagtatcc

SEQ ID NO: 9747 - DNA, 58 bp, Homo sapiens
  source 1..58: mol_type = unassigned DNA
ggcttttaaagaagtggattgtattgtgagatcctgtgattcctggtggccagtatcc

SEQ ID NO: 9748 - DNA, 58 bp, Homo sapiens
  source 1..58: mol_type = unassigned DNA
ggatactggccaccaggaatcacaggatctcacaatacaatccacttctttaaaagcc

SEQ ID NO: 9749 - RNA, 174 nt, Homo sapiens
  source 1..174: mol_type = unassigned RNA
acctatgtattttgtcatatttttcaggataccttcttctactcattggtctatgacccctcattgaaaacactattagctgacaaaggtgaaatcagagtgggacctagatatcaagcagacattccagaaatgctgttagaaggtacgtttttctgcgtgtttgcagttttg

SEQ ID NO: 9750 - DNA, 174 bp, Homo sapiens
  source 1..174: mol_type = unassigned DNA
acctatgtattttgtcatatttttcaggataccttcttctactcattggtctatgacccctcattgaaaacactattagctgacaaaggtgaaatcagagtgggacctagatatcaagcagacattccagaaatgctgttagaaggtacgtttttctgcgtgtttgcagttttg

SEQ ID NO: 9751 - DNA, 174 bp, Homo sapiens
  source 1..174: mol_type = unassigned DNA
caaaactgcaaacacgcagaaaaacgtaccttctaacagcatttctggaatgtctgcttgatatctaggtcccactctgatttcacctttgtcagctaatagtgttttcaatgaggggtcatagaccaatgagtagaagaaggtatcctgaaaaatatgacaaaatacataggt

SEQ ID NO: 9752 - RNA, 170 nt, Homo sapiens
  source 1..170: mol_type = unassigned RNA
tcacctgatcagtatctagccttgttttatgtgtttccatttatttgtttatctatctgtctgtctgtctatctacctatgtatttatttgttgagatggagtttcactcttgttgcccaggctggagtgcaatggcgcgatgtcggctcactgcaacccccgcctcctg

SEQ ID NO: 9753 - DNA, 170 bp, Homo sapiens
  source 1..170: mol_type = unassigned DNA
tcacctgatcagtatctagccttgttttatgtgtttccatttatttgtttatctatctgtctgtctgtctatctacctatgtatttatttgttgagatggagtttcactcttgttgcccaggctggagtgcaatggcgcgatgtcggctcactgcaacccccgcctcctg

SEQ ID NO: 9754 - DNA, 170 bp, Homo sapiens
  source 1..170: mol_type = unassigned DNA
caggaggcgggggttgcagtgagccgacatcgcgccattgcactccagcctgggcaacaagagtgaaactccatctcaacaaataaatacataggtagatagacagacagacagatagataaacaaataaatggaaacacataaaacaaggctagatactgatcaggtga

SEQ ID NO: 9755 - RNA, 26 nt, Homo sapiens
  source 1..26: mol_type = unassigned RNA
ttatttgtttatctctctgtcttaaa

SEQ ID NO: 9756 - DNA, 26 bp, Homo sapiens
  source 1..26: mol_type = unassigned DNA
ttatttgtttatctctctgtcttaaa

SEQ ID NO: 9757 - DNA, 26 bp, Homo sapiens
  source 1..26: mol_type = unassigned DNA
tttaagacagagagataaacaaataa

SEQ ID NO: 9758 - RNA, 85 nt, Homo sapiens
  source 1..85: mol_type = unassigned RNA
ttctgaattctctgtgcactttatttgtatatctcgctgtgtgacctcaggcaagttacttaacctctctgaacatcagggctcc

SEQ ID NO: 9759 - DNA, 85 bp, Homo sapiens
  source 1..85: mol_type = unassigned DNA
ttctgaattctctgtgcactttatttgtatatctcgctgtgtgacctcaggcaagttacttaacctctctgaacatcagggctcc

SEQ ID NO: 9760 - DNA, 85 bp, Homo sapiens
  source 1..85: mol_type = unassigned DNA
ggagccctgatgttcagagaggttaagtaacttgcctgaggtcacacagcgagatatacaaataaagtgcacagagaattcagaa

SEQ ID NO: 9761 - RNA, 26 nt, Homo sapiens
  source 1..26: mol_type = unassigned RNA
ggactttggcttattgactcaagcac

SEQ ID NO: 9762 - DNA, 26 bp, Homo sapiens
  source 1..26: mol_type = unassigned DNA
ggactttggcttattgactcaagcac

SEQ ID NO: 9763 - DNA, 26 bp, Homo sapiens
  source 1..26: mol_type = unassigned DNA
gtgcttgagtcaataagccaaagtcc

SEQ ID NO: 9764 - RNA, 23 nt, Homo sapiens
  source 1..23: mol_type = unassigned RNA
ctttaacttatttacacaagcat

SEQ ID NO: 9765 - DNA, 23 bp, Homo sapiens
  source 1..23: mol_type = unassigned DNA
ctttaacttatttacacaagcat

SEQ ID NO: 9766 - DNA, 23 bp, Homo sapiens
  source 1..23: mol_type = unassigned DNA
atgcttgtgtaaataagttaaag

SEQ ID NO: 9767 - RNA, 66 nt, Homo sapiens
  source 1..66: mol_type = unassigned RNA
ccatccacacatccatccatccattcatctatttgtttatctctctgtctgtccatccatccgtcc

SEQ ID NO: 9768 - DNA, 66 bp, Homo sapiens
  source 1..66: mol_type = unassigned DNA
ccatccacacatccatccatccattcatctatttgtttatctctctgtctgtccatccatccgtcc

SEQ ID NO: 9769 - DNA, 66 bp, Homo sapiens
  source 1..66: mol_type = unassigned DNA
ggacggatggatggacagacagagagataaacaaatagatgaatggatggatggatgtgtggatgg

SEQ ID NO: 9770 - RNA, 24 nt, Homo sapiens
  source 1..24: mol_type = unassigned RNA
tatttgtttatctatctgtttgtt

SEQ ID NO: 9771 - DNA, 24 bp, Homo sapiens
  source 1..24: mol_type = unassigned DNA
tatttgtttatctatctgtttgtt

SEQ ID NO: 9772 - DNA, 24 bp, Homo sapiens
  source 1..24: mol_type = unassigned DNA
aacaaacagatagataaacaaata

SEQ ID NO: 9773 - RNA, 39 nt, Homo sapiens
  source 1..39: mol_type = unassigned RNA
acctatttatttctttatctatctgtatgtctatctatc

SEQ ID NO: 9774 - DNA, 39 bp, Homo sapiens
  source 1..39: mol_type = unassigned DNA
acctatttatttctttatctatctgtatgtctatctatc

SEQ ID NO: 9775 - DNA, 39 bp, Homo sapiens
  source 1..39: mol_type = unassigned DNA
gatagatagacatacagatagataaagaaataaataggt

SEQ ID NO: 9776 - RNA, 42 nt, Homo sapiens
  source 1..42: mol_type = unassigned RNA
gatgtctgttcttgtcctctttgtttatcgatctgtctggtt

SEQ ID NO: 9777 - DNA, 42 bp, Homo sapiens
  source 1..42: mol_type = unassigned DNA
gatgtctgttcttgtcctctttgtttatcgatctgtctggtt

SEQ ID NO: 9778 - DNA, 42 bp, Homo sapiens
  source 1..42: mol_type = unassigned DNA
aaccagacagatcgataaacaaagaggacaagaacagacatc

SEQ ID NO: 9779 - RNA, 24 nt, Homo sapiens
  source 1..24: mol_type = unassigned RNA
tctctggtaatcttactgtatgta

SEQ ID NO: 9780 - DNA, 24 bp, Homo sapiens
  source 1..24: mol_type = unassigned DNA
tctctggtaatcttactgtatgta

SEQ ID NO: 9781 - DNA, 24 bp, Homo sapiens
  source 1..24: mol_type = unassigned DNA
tacatacagtaagattaccagaga

SEQ ID NO: 9782 - RNA, 32 nt, Homo sapiens
  source 1..32: mol_type = unassigned RNA
tacttgtttatctagttttatgatgcctgtaa

SEQ ID NO: 9783 - DNA, 32 bp, Homo sapiens
  source 1..32: mol_type = unassigned DNA
tacttgtttatctagttttatgatgcctgtaa

SEQ ID NO: 9784 - DNA, 32 bp, Homo sapiens
  source 1..32: mol_type = unassigned DNA
ttacaggcatcataaaactagataaacaagta

SEQ ID NO: 9785 - RNA, 25 nt, Homo sapiens
  source 1..25: mol_type = unassigned RNA
tctttgggcatctaggagtatgaaa

SEQ ID NO: 9786 - DNA, 25 bp, Homo sapiens
  source 1..25: mol_type = unassigned DNA
tctttgggcatctaggagtatgaaa

SEQ ID NO: 9787 - DNA, 25 bp, Homo sapiens
  source 1..25: mol_type = unassigned DNA
tttcatactcctagatgcccaaaga

SEQ ID NO: 9788 - RNA, 81 nt, Homo sapiens
  source 1..81: mol_type = unassigned RNA
ccctaaaacatttttctctatctttttttatctatctgtctgtctgtctgtctgtctgtctgtctgtctattctatctacc

SEQ ID NO: 9789 - DNA, 81 bp, Homo sapiens
  source 1..81: mol_type = unassigned DNA
ccctaaaacatttttctctatctttttttatctatctgtctgtctgtctgtctgtctgtctgtctgtctattctatctacc

SEQ ID NO: 9790 - DNA, 81 bp, Homo sapiens
  source 1..81: mol_type = unassigned DNA
ggtagatagaatagacagacagacagacagacagacagacagacagatagataaaaaaagatagagaaaaatgttttaggg

SEQ ID NO: 9791 - RNA, 24 nt, Homo sapiens
  source 1..24: mol_type = unassigned RNA
tatttggttatttagttgtctgtt

SEQ ID NO: 9792 - DNA, 24 bp, Homo sapiens
  source 1..24: mol_type = unassigned DNA
tatttggttatttagttgtctgtt

SEQ ID NO: 9793 - DNA, 24 bp, Homo sapiens
  source 1..24: mol_type = unassigned DNA
aacagacaactaaataaccaaata

SEQ ID NO: 9794 - RNA, 28 nt, Homo sapiens
  source 1..28: mol_type = unassigned RNA
ctgtttctctctgacttgaaagccagag

SEQ ID NO: 9795 - DNA, 28 bp, Homo sapiens
  source 1..28: mol_type = unassigned DNA
ctgtttctctctgacttgaaagccagag

SEQ ID NO: 9796 - DNA, 28 bp, Homo sapiens
  source 1..28: mol_type = unassigned DNA
ctctggctttcaagtcagagagaaacag

SEQ ID NO: 9797 - RNA, 99 nt, Homo sapiens
  source 1..99: mol_type = unassigned RNA
ttttcccttgacttgacagcctgatttttctctgacatgtttccttctttctcctagcatcaccctaaatcagtacagccttgaaactgagataaaggc

SEQ ID NO: 9798 - DNA, 99 bp, Homo sapiens
  source 1..99: mol_type = unassigned DNA
ttttcccttgacttgacagcctgatttttctctgacatgtttccttctttctcctagcatcaccctaaatcagtacagccttgaaactgagataaaggc

SEQ ID NO: 9799 - DNA, 99 bp, Homo sapiens
  source 1..99: mol_type = unassigned DNA
gcctttatctcagtttcaaggctgtactgatttagggtgatgctaggagaaagaaggaaacatgtcagagaaaaatcaggctgtcaagtcaagggaaaa

SEQ ID NO: 9800 - RNA, 63 nt, Homo sapiens
  source 1..63: mol_type = unassigned RNA
aatgctatcaggactgtctctacaattctcatttgctttgtttatctctctgtctttctgttt

SEQ ID NO: 9801 - DNA, 63 bp, Homo sapiens
  source 1..63: mol_type = unassigned DNA
aatgctatcaggactgtctctacaattctcatttgctttgtttatctctctgtctttctgttt

SEQ ID NO: 9802 - DNA, 63 bp, Homo sapiens
  source 1..63: mol_type = unassigned DNA
aaacagaaagacagagagataaacaaagcaaatgagaattgtagagacagtcctgatagcatt

SEQ ID NO: 9803 - RNA, 24 nt, Homo sapiens
  source 1..24: mol_type = unassigned RNA
ttttttgtttatctgctgtatgtg

SEQ ID NO: 9804 - DNA, 24 bp, Homo sapiens
  source 1..24: mol_type = unassigned DNA
ttttttgtttatctgctgtatgtg

SEQ ID NO: 9805 - DNA, 24 bp, Homo sapiens
  source 1..24: mol_type = unassigned DNA
cacatacagcagataaacaaaaaa

SEQ ID NO: 9806 - RNA, 71 nt, Homo sapiens
  source 1..71: mol_type = unassigned RNA
ttttgatgaagtgactcttttatcattatggaagttctctgtttatctctctgtctgccctcctccccact

SEQ ID NO: 9807 - DNA, 71 bp, Homo sapiens
  source 1..71: mol_type = unassigned DNA
ttttgatgaagtgactcttttatcattatggaagttctctgtttatctctctgtctgccctcctccccact

SEQ ID NO: 9808 - DNA, 71 bp, Homo sapiens
  source 1..71: mol_type = unassigned DNA
agtggggaggagggcagacagagagataaacagagaacttccataatgataaaagagtcacttcatcaaaa

SEQ ID NO: 9809 - RNA, 61 nt, Homo sapiens
  source 1..61: mol_type = unassigned RNA
gggtttgtttatctagctgtgttatttttaagttgttttgggattatagcatgtagagttc

SEQ ID NO: 9810 - DNA, 61 bp, Homo sapiens
  source 1..61: mol_type = unassigned DNA
gggtttgtttatctagctgtgttatttttaagttgttttgggattatagcatgtagagttc

SEQ ID NO: 9811 - DNA, 61 bp, Homo sapiens
  source 1..61: mol_type = unassigned DNA
gaactctacatgctataatcccaaaacaacttaaaaataacacagctagataaacaaaccc

SEQ ID NO: 9812 - RNA, 27 nt, Homo sapiens
  source 1..27: mol_type = unassigned RNA
ggaagtgttgagggacaaagtagtcat

SEQ ID NO: 9813 - DNA, 27 bp, Homo sapiens
  source 1..27: mol_type = unassigned DNA
ggaagtgttgagggacaaagtagtcat

SEQ ID NO: 9814 - DNA, 27 bp, Homo sapiens
  source 1..27: mol_type = unassigned DNA
atgactactttgtccctcaacacttcc

SEQ ID NO: 9815 - RNA, 25 nt, Homo sapiens
  source 1..25: mol_type = unassigned RNA
tctttgttcttctagctgtatttgt

SEQ ID NO: 9816 - DNA, 25 bp, Homo sapiens
  source 1..25: mol_type = unassigned DNA
tctttgttcttctagctgtatttgt

SEQ ID NO: 9817 - DNA, 25 bp, Homo sapiens
  source 1..25: mol_type = unassigned DNA
acaaatacagctagaagaacaaaga

SEQ ID NO: 9818 - RNA, 78 nt, Homo sapiens
  source 1..78: mol_type = unassigned RNA
ttcagcctttttctgtctgaaatactgccaggttgccaagtggagttgtatgaacccttctgattcttgagggctgct

SEQ ID NO: 9819 - DNA, 78 bp, Homo sapiens
  source 1..78: mol_type = unassigned DNA
ttcagcctttttctgtctgaaatactgccaggttgccaagtggagttgtatgaacccttctgattcttgagggctgct

SEQ ID NO: 9820 - DNA, 78 bp, Homo sapiens
  source 1..78: mol_type = unassigned DNA
agcagccctcaagaatcagaagggttcatacaactccacttggcaacctggcagtatttcagacagaaaaaggctgaa

SEQ ID NO: 9821 - RNA, 68 nt, Homo sapiens
  source 1..68: mol_type = unassigned RNA
atgtcacttctaggctgaggcattgaggaatcctctttgattctctagctgttttctcctgccacagc

SEQ ID NO: 9822 - DNA, 68 bp, Homo sapiens
  source 1..68: mol_type = unassigned DNA
atgtcacttctaggctgaggcattgaggaatcctctttgattctctagctgttttctcctgccacagc

SEQ ID NO: 9823 - DNA, 68 bp, Homo sapiens
  source 1..68: mol_type = unassigned DNA
gctgtggcaggagaaaacagctagagaatcaaagaggattcctcaatgcctcagcctagaagtgacat

SEQ ID NO: 9824 - RNA, 79 nt, Homo sapiens
  source 1..79: mol_type = unassigned RNA
actgagggaggagcctggaagaagggcatgtccctgggatgtggactccaggagggcggagccttggtcttgttcactg

SEQ ID NO: 9825 - DNA, 79 bp, Homo sapiens
  source 1..79: mol_type = unassigned DNA
actgagggaggagcctggaagaagggcatgtccctgggatgtggactccaggagggcggagccttggtcttgttcactg

SEQ ID NO: 9826 - DNA, 79 bp, Homo sapiens
  source 1..79: mol_type = unassigned DNA
cagtgaacaagaccaaggctccgccctcctggagtccacatcccagggacatgcccttcttccaggctcctccctcagt

SEQ ID NO: 9827 - RNA, 48 nt, Homo sapiens
  source 1..48: mol_type = unassigned RNA
ttagtgtattactttgtgtagttttgttagtggttgctgtaggcatta

SEQ ID NO: 9828 - DNA, 48 bp, Homo sapiens
  source 1..48: mol_type = unassigned DNA
ttagtgtattactttgtgtagttttgttagtggttgctgtaggcatta

SEQ ID NO: 9829 - DNA, 48 bp, Homo sapiens
  source 1..48: mol_type = unassigned DNA
taatgcctacagcaaccactaacaaaactacacaaagtaatacactaa

SEQ ID NO: 9830 - RNA, 40 nt, Homo sapiens
  source 1..40: mol_type = unassigned RNA
tgttttttaaccaacatctctggttatctacttgaatgtt

SEQ ID NO: 9831 - DNA, 40 bp, Homo sapiens
  source 1..40: mol_type = unassigned DNA
tgttttttaaccaacatctctggttatctacttgaatgtt

SEQ ID NO: 9832 - DNA, 40 bp, Homo sapiens
  source 1..40: mol_type = unassigned DNA
aacattcaagtagataaccagagatgttggttaaaaaaca

SEQ ID NO: 9833 - RNA, 25 nt, Homo sapiens
  source 1..25: mol_type = unassigned RNA
atatttggttatatgggtgtatgtg

SEQ ID NO: 9834 - DNA, 25 bp, Homo sapiens
  source 1..25: mol_type = unassigned DNA
atatttggttatatgggtgtatgtg

SEQ ID NO: 9835 - DNA, 25 bp, Homo sapiens
  source 1..25: mol_type = unassigned DNA
cacatacacccatataaccaaatat

SEQ ID NO: 9836 - RNA, 47 nt, Homo sapiens
  source 1..47: mol_type = unassigned RNA
tctttgtttatttagcctgtcttatatctcccactgtagtgaagatc

SEQ ID NO: 9837 - DNA, 47 bp, Homo sapiens
  source 1..47: mol_type = unassigned DNA
tctttgtttatttagcctgtcttatatctcccactgtagtgaagatc

SEQ ID NO: 9838 - DNA, 47 bp, Homo sapiens
  source 1..47: mol_type = unassigned DNA
gatcttcactacagtgggagatataagacaggctaaataaacaaaga

SEQ ID NO: 9839 - RNA, 30 nt, Homo sapiens
  source 1..30: mol_type = unassigned RNA
caagctctttggttctacaggtgtatgaca

SEQ ID NO: 9840 - DNA, 30 bp, Homo sapiens
  source 1..30: mol_type = unassigned DNA
caagctctttggttctacaggtgtatgaca

SEQ ID NO: 9841 - DNA, 30 bp, Homo sapiens
  source 1..30: mol_type = unassigned DNA
tgtcatacacctgtagaaccaaagagcttg

SEQ ID NO: 9842 - RNA, 123 nt, Homo sapiens
  source 1..123: mol_type = unassigned RNA
aagccaggcattgtggtgggcgcctgtaatcccagctactcgggaggctgaggcaggagaacgggtgaaccccggaggctgagcttgcagtgagccaagatcgcacctctgcattacagcctg

SEQ ID NO: 9843 - DNA, 123 bp, Homo sapiens
  source 1..123: mol_type = unassigned DNA
aagccaggcattgtggtgggcgcctgtaatcccagctactcgggaggctgaggcaggagaacgggtgaaccccggaggctgagcttgcagtgagccaagatcgcacctctgcattacagcctg

SEQ ID NO: 9844 - DNA, 123 bp, Homo sapiens
  source 1..123: mol_type = unassigned DNA
caggctgtaatgcagaggtgcgatcttggctcactgcaagctcagcctccggggttcacccgttctcctgcctcagcctcccgagtagctgggattacaggcgcccaccacaatgcctggctt

SEQ ID NO: 9845 - RNA, 26 nt, Homo sapiens
  source 1..26: mol_type = unassigned RNA
tgattgacatgatgtacagaaaaaaa

SEQ ID NO: 9846 - DNA, 26 bp, Homo sapiens
  source 1..26: mol_type = unassigned DNA
tgattgacatgatgtacagaaaaaaa

SEQ ID NO: 9847 - DNA, 26 bp, Homo sapiens
  source 1..26: mol_type = unassigned DNA
tttttttctgtacatcatgtcaatca

SEQ ID NO: 9848 - RNA, 24 nt, Homo sapiens
  source 1..24: mol_type = unassigned RNA
ttatctgcttatctagctgtcttg

SEQ ID NO: 9849 - DNA, 24 bp, Homo sapiens
  source 1..24: mol_type = unassigned DNA
ttatctgcttatctagctgtcttg

SEQ ID NO: 9850 - DNA, 24 bp, Homo sapiens
  source 1..24: mol_type = unassigned DNA
caagacagctagataagcagataa

SEQ ID NO: 9851 - RNA, 25 nt, Homo sapiens
  source 1..25: mol_type = unassigned RNA
ttttttggttatcttctgtatgtta

SEQ ID NO: 9852 - DNA, 25 bp, Homo sapiens
  source 1..25: mol_type = unassigned DNA
ttttttggttatcttctgtatgtta

SEQ ID NO: 9853 - DNA, 25 bp, Homo sapiens
  source 1..25: mol_type = unassigned DNA
taacatacagaagataaccaaaaaa

SEQ ID NO: 9854 - RNA, 82 nt, Homo sapiens
  source 1..82: mol_type = unassigned RNA
gatacacacacatgctctctgtttctctctctgtatgcgcacaatgtttctctatctctctctatttctgtttctcttccac

SEQ ID NO: 9855 - DNA, 82 bp, Homo sapiens
  source 1..82: mol_type = unassigned DNA
gatacacacacatgctctctgtttctctctctgtatgcgcacaatgtttctctatctctctctatttctgtttctcttccac

SEQ ID NO: 9856 - DNA, 82 bp, Homo sapiens
  source 1..82: mol_type = unassigned DNA
gtggaagagaaacagaaatagagagagatagagaaacattgtgcgcatacagagagagaaacagagagcatgtgtgtgtatc

SEQ ID NO: 9857 - RNA, 29 nt, Homo sapiens
  source 1..29: mol_type = unassigned RNA
ttcatgtttggggttgtcaggaccacact

SEQ ID NO: 9858 - DNA, 29 bp, Homo sapiens
  source 1..29: mol_type = unassigned DNA
ttcatgtttggggttgtcaggaccacact

SEQ ID NO: 9859 - DNA, 29 bp, Homo sapiens
  source 1..29: mol_type = unassigned DNA
agtgtggtcctgacaaccccaaacatgaa

SEQ ID NO: 9860 - RNA, 71 nt, Homo sapiens
  source 1..71: mol_type = unassigned RNA
tcttttttggtctagctgtattaggaatagagagaagagaatttctggaagtggagaccaggaaagggttc

SEQ ID NO: 9861 - DNA, 71 bp, Homo sapiens
  source 1..71: mol_type = unassigned DNA
tcttttttggtctagctgtattaggaatagagagaagagaatttctggaagtggagaccaggaaagggttc

SEQ ID NO: 9862 - DNA, 71 bp, Homo sapiens
  source 1..71: mol_type = unassigned DNA
gaaccctttcctggtctccacttccagaaattctcttctctctattcctaatacagctagaccaaaaaaga

SEQ ID NO: 9863 - RNA, 26 nt, Homo sapiens
  source 1..26: mol_type = unassigned RNA
tcccttggttatccagatgtatgcaa

SEQ ID NO: 9864 - DNA, 26 bp, Homo sapiens
  source 1..26: mol_type = unassigned DNA
tcccttggttatccagatgtatgcaa

SEQ ID NO: 9865 - DNA, 26 bp, Homo sapiens
  source 1..26: mol_type = unassigned DNA
ttgcatacatctggataaccaaggga

SEQ ID NO: 9866 - RNA, 42 nt, Homo sapiens
  source 1..42: mol_type = unassigned RNA
ttttgatattcgttctttggttatataaatgaatgccctcat

SEQ ID NO: 9867 - DNA, 42 bp, Homo sapiens
  source 1..42: mol_type = unassigned DNA
ttttgatattcgttctttggttatataaatgaatgccctcat

SEQ ID NO: 9868 - DNA, 42 bp, Homo sapiens
  source 1..42: mol_type = unassigned DNA
atgagggcattcatttatataaccaaagaacgaatatcaaaa

SEQ ID NO: 9869 - RNA, 35 nt, Homo sapiens
  source 1..35: mol_type = unassigned RNA
atgatctattatccttttttatcttgctgtattca

SEQ ID NO: 9870 - DNA, 35 bp, Homo sapiens
  source 1..35: mol_type = unassigned DNA
atgatctattatccttttttatcttgctgtattca

SEQ ID NO: 9871 - DNA, 35 bp, Homo sapiens
  source 1..35: mol_type = unassigned DNA
tgaatacagcaagataaaaaaggataatagatcat

SEQ ID NO: 9872 - RNA, 26 nt, Homo sapiens
  source 1..26: mol_type = unassigned RNA
ttcttggttatctagctatggtgtat

SEQ ID NO: 9873 - DNA, 26 bp, Homo sapiens
  source 1..26: mol_type = unassigned DNA
ttcttggttatctagctatggtgtat

SEQ ID NO: 9874 - DNA, 26 bp, Homo sapiens
  source 1..26: mol_type = unassigned DNA
atacaccatagctagataaccaagaa

SEQ ID NO: 9875 - RNA, 58 nt, Homo sapiens
  source 1..58: mol_type = unassigned RNA
tagtccacctgctctttgtttatcagctgtctgtacacacataagataactctgcatt

SEQ ID NO: 9876 - DNA, 58 bp, Homo sapiens
  source 1..58: mol_type = unassigned DNA
tagtccacctgctctttgtttatcagctgtctgtacacacataagataactctgcatt

SEQ ID NO: 9877 - DNA, 58 bp, Homo sapiens
  source 1..58: mol_type = unassigned DNA
aatgcagagttatcttatgtgtgtacagacagctgataaacaaagagcaggtggacta

SEQ ID NO: 9878 - RNA, 26 nt, Homo sapiens
  source 1..26: mol_type = unassigned RNA
tcctctttttatatagctgtctgagg

SEQ ID NO: 9879 - DNA, 26 bp, Homo sapiens
  source 1..26: mol_type = unassigned DNA
tcctctttttatatagctgtctgagg

SEQ ID NO: 9880 - DNA, 26 bp, Homo sapiens
  source 1..26: mol_type = unassigned DNA
cctcagacagctatataaaaagagga

SEQ ID NO: 9881 - RNA, 34 nt, Homo sapiens
  source 1..34: mol_type = unassigned RNA
ttctatgtttaactctctgtatgaaaccctgaat

SEQ ID NO: 9882 - DNA, 34 bp, Homo sapiens
  source 1..34: mol_type = unassigned DNA
ttctatgtttaactctctgtatgaaaccctgaat

SEQ ID NO: 9883 - DNA, 34 bp, Homo sapiens
  source 1..34: mol_type = unassigned DNA
attcagggtttcatacagagagttaaacatagaa

SEQ ID NO: 9884 - RNA, 53 nt, Homo sapiens
  source 1..53: mol_type = unassigned RNA
ttctgtggtcacctcgctgtctgcaaaatgcttccgtactgttccgcctccac

SEQ ID NO: 9885 - DNA, 53 bp, Homo sapiens
  source 1..53: mol_type = unassigned DNA
ttctgtggtcacctcgctgtctgcaaaatgcttccgtactgttccgcctccac

SEQ ID NO: 9886 - DNA, 53 bp, Homo sapiens
  source 1..53: mol_type = unassigned DNA
gtggaggcggaacagtacggaagcattttgcagacagcgaggtgaccacagaa

SEQ ID NO: 9887 - RNA, 42 nt, Homo sapiens
  source 1..42: mol_type = unassigned RNA
ttcttttattatccagctgtattcgctcctcaaatagtgttc

SEQ ID NO: 9888 - DNA, 42 bp, Homo sapiens
  source 1..42: mol_type = unassigned DNA
ttcttttattatccagctgtattcgctcctcaaatagtgttc

SEQ ID NO: 9889 - DNA, 42 bp, Homo sapiens
  source 1..42: mol_type = unassigned DNA
gaacactatttgaggagcgaatacagctggataataaaagaa

SEQ ID NO: 9890 - RNA, 25 nt, Homo sapiens
  source 1..25: mol_type = unassigned RNA
tcatttttaatctagctgtctgaag

SEQ ID NO: 9891 - DNA, 25 bp, Homo sapiens
  source 1..25: mol_type = unassigned DNA
tcatttttaatctagctgtctgaag

SEQ ID NO: 9892 - DNA, 25 bp, Homo sapiens
  source 1..25: mol_type = unassigned DNA
cttcagacagctagattaaaaatga

SEQ ID NO: 9893 - RNA, 31 nt, Homo sapiens
  source 1..31: mol_type = unassigned RNA
taacagatttgttgtctagctgtctgattgt

SEQ ID NO: 9894 - DNA, 31 bp, Homo sapiens
  source 1..31: mol_type = unassigned DNA
taacagatttgttgtctagctgtctgattgt

SEQ ID NO: 9895 - DNA, 31 bp, Homo sapiens
  source 1..31: mol_type = unassigned DNA
acaatcagacagctagacaacaaatctgtta

SEQ ID NO: 9896 - RNA, 53 nt, Homo sapiens
  source 1..53: mol_type = unassigned RNA
ggggcagggccccctgtgtagagtctttggctgtctagctgtgagtcctgatt

SEQ ID NO: 9897 - DNA, 53 bp, Homo sapiens
  source 1..53: mol_type = unassigned DNA
ggggcagggccccctgtgtagagtctttggctgtctagctgtgagtcctgatt

SEQ ID NO: 9898 - DNA, 53 bp, Homo sapiens
  source 1..53: mol_type = unassigned DNA
aatcaggactcacagctagacagccaaagactctacacagggggccctgcccc

SEQ ID NO: 9899 - RNA, 30 nt, Homo sapiens
  source 1..30: mol_type = unassigned RNA
ggctccattttacaacacctccagtggaat

SEQ ID NO: 9900 - DNA, 30 bp, Homo sapiens
  source 1..30: mol_type = unassigned DNA
ggctccattttacaacacctccagtggaat

SEQ ID NO: 9901 - DNA, 30 bp, Homo sapiens
  source 1..30: mol_type = unassigned DNA
attccactggaggtgttgtaaaatggagcc

SEQ ID NO: 9902 - RNA, 80 nt, Homo sapiens
  source 1..80: mol_type = unassigned RNA
aagcccagaagcttctgtggagcaaaggacacttacgaggtcctgctggccctgtcctggcagcaggagctccgggtgga

SEQ ID NO: 9903 - DNA, 80 bp, Homo sapiens
  source 1..80: mol_type = unassigned DNA
aagcccagaagcttctgtggagcaaaggacacttacgaggtcctgctggccctgtcctggcagcaggagctccgggtgga

SEQ ID NO: 9904 - DNA, 80 bp, Homo sapiens
  source 1..80: mol_type = unassigned DNA
tccacccggagctcctgctgccaggacagggccagcaggacctcgtaagtgtcctttgctccacagaagcttctgggctt

SEQ ID NO: 9905 - RNA, 36 nt, Homo sapiens
  source 1..36: mol_type = unassigned RNA
ttttatgcttcagtttttggttatctaactgtacct

SEQ ID NO: 9906 - DNA, 36 bp, Homo sapiens
  source 1..36: mol_type = unassigned DNA
ttttatgcttcagtttttggttatctaactgtacct

SEQ ID NO: 9907 - DNA, 36 bp, Homo sapiens
  source 1..36: mol_type = unassigned DNA
aggtacagttagataaccaaaaactgaagcataaaa

SEQ ID NO: 9908 - RNA, 133 nt, Homo sapiens
  source 1..133: mol_type = unassigned RNA
atcattgtttctctagctttataaaggaaaacacctatatttggtgcttacaattcgtatgctgttctaggtctgaggacacaacaatgacaaaggcaaaaactctgggctatggaaatccactgaagcaggt

SEQ ID NO: 9909 - DNA, 133 bp, Homo sapiens
  source 1..133: mol_type = unassigned DNA
atcattgtttctctagctttataaaggaaaacacctatatttggtgcttacaattcgtatgctgttctaggtctgaggacacaacaatgacaaaggcaaaaactctgggctatggaaatccactgaagcaggt

SEQ ID NO: 9910 - DNA, 133 bp, Homo sapiens
  source 1..133: mol_type = unassigned DNA
acctgcttcagtggatttccatagcccagagtttttgcctttgtcattgttgtgtcctcagacctagaacagcatacgaattgtaagcaccaaatataggtgttttcctttataaagctagagaaacaatgat

SEQ ID NO: 9911 - RNA, 35 nt, Homo sapiens
  source 1..35: mol_type = unassigned RNA
ggagtaatctgctccttggctatcaagttgtatga

SEQ ID NO: 9912 - DNA, 35 bp, Homo sapiens
  source 1..35: mol_type = unassigned DNA
ggagtaatctgctccttggctatcaagttgtatga

SEQ ID NO: 9913 - DNA, 35 bp, Homo sapiens
  source 1..35: mol_type = unassigned DNA
tcatacaacttgatagccaaggagcagattactcc

SEQ ID NO: 9914 - RNA, 25 nt, Homo sapiens
  source 1..25: mol_type = unassigned RNA
atcttggttgtttagctgtctgaca

SEQ ID NO: 9915 - DNA, 25 bp, Homo sapiens
  source 1..25: mol_type = unassigned DNA
atcttggttgtttagctgtctgaca

SEQ ID NO: 9916 - DNA, 25 bp, Homo sapiens
  source 1..25: mol_type = unassigned DNA
tgtcagacagctaaacaaccaagat

SEQ ID NO: 9917 - RNA, 51 nt, Homo sapiens
  source 1..51: mol_type = unassigned RNA
tttctccttggctctcttgttactttggttatctctctgtgtttctctctt

SEQ ID NO: 9918 - DNA, 51 bp, Homo sapiens
  source 1..51: mol_type = unassigned DNA
tttctccttggctctcttgttactttggttatctctctgtgtttctctctt

SEQ ID NO: 9919 - DNA, 51 bp, Homo sapiens
  source 1..51: mol_type = unassigned DNA
aagagagaaacacagagagataaccaaagtaacaagagagccaaggagaaa

SEQ ID NO: 9920 - RNA, 25 nt, Homo sapiens
  source 1..25: mol_type = unassigned RNA
ttttctttttatctaactgtatgtt

SEQ ID NO: 9921 - DNA, 25 bp, Homo sapiens
  source 1..25: mol_type = unassigned DNA
ttttctttttatctaactgtatgtt

SEQ ID NO: 9922 - DNA, 25 bp, Homo sapiens
  source 1..25: mol_type = unassigned DNA
aacatacagttagataaaaagaaaa

SEQ ID NO: 9923 - RNA, 52 nt, Homo sapiens
  source 1..52: mol_type = unassigned RNA
acaagaatcgcttgaacccgggaggacccgggaggtggaggttgcagtgagc

SEQ ID NO: 9924 - DNA, 52 bp, Homo sapiens
  source 1..52: mol_type = unassigned DNA
acaagaatcgcttgaacccgggaggacccgggaggtggaggttgcagtgagc

SEQ ID NO: 9925 - DNA, 52 bp, Homo sapiens
  source 1..52: mol_type = unassigned DNA
gctcactgcaacctccacctcccgggtcctcccgggttcaagcgattcttgt

SEQ ID NO: 9926 - RNA, 25 nt, Homo sapiens
  source 1..25: mol_type = unassigned RNA
tcttttcttatctagctgttggaaa

SEQ ID NO: 9927 - DNA, 25 bp, Homo sapiens
  source 1..25: mol_type = unassigned DNA
tcttttcttatctagctgttggaaa

SEQ ID NO: 9928 - DNA, 25 bp, Homo sapiens
  source 1..25: mol_type = unassigned DNA
tttccaacagctagataagaaaaga

SEQ ID NO: 9929 - RNA, 37 nt, Homo sapiens
  source 1..37: mol_type = unassigned RNA
aatgagagcaaatggattggaaatccatttggattta

SEQ ID NO: 9930 - DNA, 37 bp, Homo sapiens
  source 1..37: mol_type = unassigned DNA
aatgagagcaaatggattggaaatccatttggattta

SEQ ID NO: 9931 - DNA, 37 bp, Homo sapiens
  source 1..37: mol_type = unassigned DNA
taaatccaaatggatttccaatccatttgctctcatt

SEQ ID NO: 9932 - RNA, 41 nt, Homo sapiens
  source 1..41: mol_type = unassigned RNA
ttagaaaacagaatgatgctttggttatttagctgtgaaaa

SEQ ID NO: 9933 - DNA, 41 bp, Homo sapiens
  source 1..41: mol_type = unassigned DNA
ttagaaaacagaatgatgctttggttatttagctgtgaaaa

SEQ ID NO: 9934 - DNA, 41 bp, Homo sapiens
  source 1..41: mol_type = unassigned DNA
ttttcacagctaaataaccaaagcatcattctgttttctaa

SEQ ID NO: 9935 - RNA, 36 nt, Homo sapiens
  source 1..36: mol_type = unassigned RNA
ttatcccacttttaccatgaactaccatgtggacat

SEQ ID NO: 9936 - DNA, 36 bp, Homo sapiens
  source 1..36: mol_type = unassigned DNA
ttatcccacttttaccatgaactaccatgtggacat

SEQ ID NO: 9937 - DNA, 36 bp, Homo sapiens
  source 1..36: mol_type = unassigned DNA
atgtccacatggtagttcatggtaaaagtgggataa

SEQ ID NO: 9938 - RNA, 26 nt, Homo sapiens
  source 1..26: mol_type = unassigned RNA
ttttctgtatttgtttgtctatttaa

SEQ ID NO: 9939 - DNA, 26 bp, Homo sapiens
  source 1..26: mol_type = unassigned DNA
ttttctgtatttgtttgtctatttaa

SEQ ID NO: 9940 - DNA, 26 bp, Homo sapiens
  source 1..26: mol_type = unassigned DNA
ttaaatagacaaacaaatacagaaaa

SEQ ID NO: 9941 - RNA, 60 nt, Homo sapiens
  source 1..60: mol_type = unassigned RNA
ttggatggttggctggctagagaacacagttagttgagtggttatctggctgttccattg

SEQ ID NO: 9942 - DNA, 60 bp, Homo sapiens
  source 1..60: mol_type = unassigned DNA
ttggatggttggctggctagagaacacagttagttgagtggttatctggctgttccattg

SEQ ID NO: 9943 - DNA, 60 bp, Homo sapiens
  source 1..60: mol_type = unassigned DNA
caatggaacagccagataaccactcaactaactgtgttctctagccagccaaccatccaa

SEQ ID NO: 9944 - RNA, 24 nt, Homo sapiens
  source 1..24: mol_type = unassigned RNA
tctttggtttcctgctgtatgtga

SEQ ID NO: 9945 - DNA, 24 bp, Homo sapiens
  source 1..24: mol_type = unassigned DNA
tctttggtttcctgctgtatgtga

SEQ ID NO: 9946 - DNA, 24 bp, Homo sapiens
  source 1..24: mol_type = unassigned DNA
tcacatacagcaggaaaccaaaga

SEQ ID NO: 9947 - RNA, 25 nt, Homo sapiens
  source 1..25: mol_type = unassigned RNA
attctttttatctaactgtatgttt

SEQ ID NO: 9948 - DNA, 25 bp, Homo sapiens
  source 1..25: mol_type = unassigned DNA
attctttttatctaactgtatgttt

SEQ ID NO: 9949 - DNA, 25 bp, Homo sapiens
  source 1..25: mol_type = unassigned DNA
aaacatacagttagataaaaagaat

SEQ ID NO: 9950 - RNA, 27 nt, Homo sapiens
  source 1..27: mol_type = unassigned RNA
accgtttggttatttagcagtatgttg

SEQ ID NO: 9951 - DNA, 27 bp, Homo sapiens
  source 1..27: mol_type = unassigned DNA
accgtttggttatttagcagtatgttg

SEQ ID NO: 9952 - DNA, 27 bp, Homo sapiens
  source 1..27: mol_type = unassigned DNA
caacatactgctaaataaccaaacggt

SEQ ID NO: 9953 - RNA, 40 nt, Homo sapiens
  source 1..40: mol_type = unassigned RNA
tcccctggtgatttagctgtatgctcttgtgcaacatgct

SEQ ID NO: 9954 - DNA, 40 bp, Homo sapiens
  source 1..40: mol_type = unassigned DNA
tcccctggtgatttagctgtatgctcttgtgcaacatgct

SEQ ID NO: 9955 - DNA, 40 bp, Homo sapiens
  source 1..40: mol_type = unassigned DNA
agcatgttgcacaagagcatacagctaaatcaccagggga

SEQ ID NO: 9956 - RNA, 53 nt, Homo sapiens
  source 1..53: mol_type = unassigned RNA
ccaccgccttagaaaacggcatgctgcatttcggacttatacattgaaagccc

SEQ ID NO: 9957 - DNA, 53 bp, Homo sapiens
  source 1..53: mol_type = unassigned DNA
ccaccgccttagaaaacggcatgctgcatttcggacttatacattgaaagccc

SEQ ID NO: 9958 - DNA, 53 bp, Homo sapiens
  source 1..53: mol_type = unassigned DNA
gggctttcaatgtataagtccgaaatgcagcatgccgttttctaaggcggtgg

SEQ ID NO: 9959 - RNA, 25 nt, Homo sapiens
  source 1..25: mol_type = unassigned RNA
atccttagttctctagctgtttgca

SEQ ID NO: 9960 - DNA, 25 bp, Homo sapiens
  source 1..25: mol_type = unassigned DNA
atccttagttctctagctgtttgca

SEQ ID NO: 9961 - DNA, 25 bp, Homo sapiens
  source 1..25: mol_type = unassigned DNA
tgcaaacagctagagaactaaggat

SEQ ID NO: 9962 - RNA, 24 nt, Homo sapiens
  source 1..24: mol_type = unassigned RNA
tctctggtgatctatctgcatgca

SEQ ID NO: 9963 - DNA, 24 bp, Homo sapiens
  source 1..24: mol_type = unassigned DNA
tctctggtgatctatctgcatgca

SEQ ID NO: 9964 - DNA, 24 bp, Homo sapiens
  source 1..24: mol_type = unassigned DNA
tgcatgcagatagatcaccagaga

SEQ ID NO: 9965 - RNA, 26 nt, Homo sapiens
  source 1..26: mol_type = unassigned RNA
tttatttagtagtttgttttgtttta

SEQ ID NO: 9966 - DNA, 26 bp, Homo sapiens
  source 1..26: mol_type = unassigned DNA
tttatttagtagtttgttttgtttta

SEQ ID NO: 9967 - DNA, 26 bp, Homo sapiens
  source 1..26: mol_type = unassigned DNA
taaaacaaaacaaactactaaataaa

SEQ ID NO: 9968 - RNA, 40 nt, Homo sapiens
  source 1..40: mol_type = unassigned RNA
tgtagtgtttactctttctttgattatctagctttggttt

SEQ ID NO: 9969 - DNA, 40 bp, Homo sapiens
  source 1..40: mol_type = unassigned DNA
tgtagtgtttactctttctttgattatctagctttggttt

SEQ ID NO: 9970 - DNA, 40 bp, Homo sapiens
  source 1..40: mol_type = unassigned DNA
aaaccaaagctagataatcaaagaaagagtaaacactaca

SEQ ID NO: 9971 - RNA, 72 nt, Homo sapiens
  source 1..72: mol_type = unassigned RNA
agctaggggtgagatttaaagatccaccctgtccacagaaaccatgttatctagctgtatatgacagtgcag

SEQ ID NO: 9972 - DNA, 72 bp, Homo sapiens
  source 1..72: mol_type = unassigned DNA
agctaggggtgagatttaaagatccaccctgtccacagaaaccatgttatctagctgtatatgacagtgcag

SEQ ID NO: 9973 - DNA, 72 bp, Homo sapiens
  source 1..72: mol_type = unassigned DNA
ctgcactgtcatatacagctagataacatggtttctgtggacagggtggatctttaaatctcacccctagct

SEQ ID NO: 9974 - RNA, 34 nt, Homo sapiens
  source 1..34: mol_type = unassigned RNA
ggtgatgtggttctgtggttttctagctatgttc

SEQ ID NO: 9975 - DNA, 34 bp, Homo sapiens
  source 1..34: mol_type = unassigned DNA
ggtgatgtggttctgtggttttctagctatgttc

SEQ ID NO: 9976 - DNA, 34 bp, Homo sapiens
  source 1..34: mol_type = unassigned DNA
gaacatagctagaaaaccacagaaccacatcacc

SEQ ID NO: 9977 - RNA, 66 nt, Homo sapiens
  source 1..66: mol_type = unassigned RNA
ccgacagcttagttttgtatgatctctgttagtgtcacctctatatagctgtatgatctttagtaa

SEQ ID NO: 9978 - DNA, 66 bp, Homo sapiens
  source 1..66: mol_type = unassigned DNA
ccgacagcttagttttgtatgatctctgttagtgtcacctctatatagctgtatgatctttagtaa

SEQ ID NO: 9979 - DNA, 66 bp, Homo sapiens
  source 1..66: mol_type = unassigned DNA
ttactaaagatcatacagctatatagaggtgacactaacagagatcatacaaaactaagctgtcgg

SEQ ID NO: 9980 - RNA, 24 nt, Homo sapiens
  source 1..24: mol_type = unassigned RNA
tatttgggttacctaggtgtatgt

SEQ ID NO: 9981 - DNA, 24 bp, Homo sapiens
  source 1..24: mol_type = unassigned DNA
tatttgggttacctaggtgtatgt

SEQ ID NO: 9982 - DNA, 24 bp, Homo sapiens
  source 1..24: mol_type = unassigned DNA
acatacacctaggtaacccaaata

SEQ ID NO: 9983 - RNA, 83 nt, Homo sapiens
  source 1..83: mol_type = unassigned RNA
caattttagattagccctgatgggattaaagtagatacagcattaatgtagacatcctgagtggttctgtagctatatgtaat

SEQ ID NO: 9984 - DNA, 83 bp, Homo sapiens
  source 1..83: mol_type = unassigned DNA
caattttagattagccctgatgggattaaagtagatacagcattaatgtagacatcctgagtggttctgtagctatatgtaat

SEQ ID NO: 9985 - DNA, 83 bp, Homo sapiens
  source 1..83: mol_type = unassigned DNA
attacatatagctacagaaccactcaggatgtctacattaatgctgtatctactttaatcccatcagggctaatctaaaattg

SEQ ID NO: 9986 - RNA, 25 nt, Homo sapiens
  source 1..25: mol_type = unassigned RNA
tcctttgtttatctagctgtcaatt

SEQ ID NO: 9987 - DNA, 25 bp, Homo sapiens
  source 1..25: mol_type = unassigned DNA
tcctttgtttatctagctgtcaatt

SEQ ID NO: 9988 - DNA, 25 bp, Homo sapiens
  source 1..25: mol_type = unassigned DNA
aattgacagctagataaacaaagga

SEQ ID NO: 9989 - RNA, 24 nt, Homo sapiens
  source 1..24: mol_type = unassigned RNA
ttctgtattagttttcatggttta

SEQ ID NO: 9990 - DNA, 24 bp, Homo sapiens
  source 1..24: mol_type = unassigned DNA
ttctgtattagttttcatggttta

SEQ ID NO: 9991 - DNA, 24 bp, Homo sapiens
  source 1..24: mol_type = unassigned DNA
taaaccatgaaaactaatacagaa

SEQ ID NO: 9992 - RNA, 25 nt, Homo sapiens
  source 1..25: mol_type = unassigned RNA
ttctttggttttctatttgtatggc

SEQ ID NO: 9993 - DNA, 25 bp, Homo sapiens
  source 1..25: mol_type = unassigned DNA
ttctttggttttctatttgtatggc

SEQ ID NO: 9994 - DNA, 25 bp, Homo sapiens
  source 1..25: mol_type = unassigned DNA
gccatacaaatagaaaaccaaagaa

SEQ ID NO: 9995 - RNA, 33 nt, Homo sapiens
  source 1..33: mol_type = unassigned RNA
attgttctagacttttggagtagatcagtcagg

SEQ ID NO: 9996 - DNA, 33 bp, Homo sapiens
  source 1..33: mol_type = unassigned DNA
attgttctagacttttggagtagatcagtcagg

SEQ ID NO: 9997 - DNA, 33 bp, Homo sapiens
  source 1..33: mol_type = unassigned DNA
cctgactgatctactccaaaagtctagaacaat

SEQ ID NO: 9998 - RNA, 39 nt, Homo sapiens
  source 1..39: mol_type = unassigned RNA
acttctggttctgccactatctagctgtatgacttgcat

SEQ ID NO: 9999 - DNA, 39 bp, Homo sapiens
  source 1..39: mol_type = unassigned DNA
acttctggttctgccactatctagctgtatgacttgcat

SEQ ID NO: 10000 - DNA, 39 bp, Homo sapiens
  source 1..39: mol_type = unassigned DNA
atgcaagtcatacagctagatagtggcagaaccagaagt

SEQ ID NO: 10001 - RNA, 52 nt, Homo sapiens
  source 1..52: mol_type = unassigned RNA
aactctctctctctctctgtgtttctctctctgtcttaaataaatgtttatt

SEQ ID NO: 10002 - DNA, 52 bp, Homo sapiens
  source 1..52: mol_type = unassigned DNA
aactctctctctctctctgtgtttctctctctgtcttaaataaatgtttatt

SEQ ID NO: 10003 - DNA, 52 bp, Homo sapiens
  source 1..52: mol_type = unassigned DNA
aataaacatttatttaagacagagagagaaacacagagagagagagagagtt

SEQ ID NO: 10004 - RNA, 44 nt, Homo sapiens
  source 1..44: mol_type = unassigned RNA
atagggacgcaagtggtccaggatgatgtcaggacttgcatgag

SEQ ID NO: 10005 - DNA, 44 bp, Homo sapiens
  source 1..44: mol_type = unassigned DNA
atagggacgcaagtggtccaggatgatgtcaggacttgcatgag

SEQ ID NO: 10006 - DNA, 44 bp, Homo sapiens
  source 1..44: mol_type = unassigned DNA
ctcatgcaagtcctgacatcatcctggaccacttgcgtccctat

SEQ ID NO: 10007 - RNA, 44 nt, Homo sapiens
  source 1..44: mol_type = unassigned RNA
gtgtgactaaatttggtactgtattaatttgaatagttcaagaa

SEQ ID NO: 10008 - DNA, 44 bp, Homo sapiens
  source 1..44: mol_type = unassigned DNA
gtgtgactaaatttggtactgtattaatttgaatagttcaagaa

SEQ ID NO: 10009 - DNA, 44 bp, Homo sapiens
  source 1..44: mol_type = unassigned DNA
ttcttgaactattcaaattaatacagtaccaaatttagtcacac

SEQ ID NO: 10010 - RNA, 42 nt, Homo sapiens
  source 1..42: mol_type = unassigned RNA
gctttacttgaaatctggcaattctggacccacattcccaga

SEQ ID NO: 10011 - DNA, 42 bp, Homo sapiens
  source 1..42: mol_type = unassigned DNA
gctttacttgaaatctggcaattctggacccacattcccaga

SEQ ID NO: 10012 - DNA, 42 bp, Homo sapiens
  source 1..42: mol_type = unassigned DNA
tctgggaatgtgggtccagaattgccagatttcaagtaaagc

SEQ ID NO: 10013 - RNA, 94 nt, Homo sapiens
  source 1..94: mol_type = unassigned RNA
gattccctggttctctggctgtctgtggaccaatgctgcgacccggggaggggccaccaccaggagcagcagcagaaggcccagggcagagggc

SEQ ID NO: 10014 - DNA, 94 bp, Homo sapiens
  source 1..94: mol_type = unassigned DNA
gattccctggttctctggctgtctgtggaccaatgctgcgacccggggaggggccaccaccaggagcagcagcagaaggcccagggcagagggc

SEQ ID NO: 10015 - DNA, 94 bp, Homo sapiens
  source 1..94: mol_type = unassigned DNA
gccctctgccctgggccttctgctgctgctcctggtggtggcccctccccgggtcgcagcattggtccacagacagccagagaaccagggaatc

SEQ ID NO: 10016 - RNA, 23 nt, Homo sapiens
  source 1..23: mol_type = unassigned RNA
ttagggattactttgtgtggttc

SEQ ID NO: 10017 - DNA, 23 bp, Homo sapiens
  source 1..23: mol_type = unassigned DNA
ttagggattactttgtgtggttc

SEQ ID NO: 10018 - DNA, 23 bp, Homo sapiens
  source 1..23: mol_type = unassigned DNA
gaaccacacaaagtaatccctaa

SEQ ID NO: 10019 - RNA, 53 nt, Homo sapiens
  source 1..53: mol_type = unassigned RNA
ggttgcagtgagcctagatcggaccactgcattacagcctgggtgacagagcc

SEQ ID NO: 10020 - DNA, 53 bp, Homo sapiens
  source 1..53: mol_type = unassigned DNA
ggttgcagtgagcctagatcggaccactgcattacagcctgggtgacagagcc

SEQ ID NO: 10021 - DNA, 53 bp, Homo sapiens
  source 1..53: mol_type = unassigned DNA
ggctctgtcacccaggctgtaatgcagtggtccgatctaggctcactgcaacc

SEQ ID NO: 10022 - RNA, 36 nt, Homo sapiens
  source 1..36: mol_type = unassigned RNA
agctttgttttactagctgtatgagcttgaacagat

SEQ ID NO: 10023 - DNA, 36 bp, Homo sapiens
  source 1..36: mol_type = unassigned DNA
agctttgttttactagctgtatgagcttgaacagat

SEQ ID NO: 10024 - DNA, 36 bp, Homo sapiens
  source 1..36: mol_type = unassigned DNA
atctgttcaagctcatacagctagtaaaacaaagct

SEQ ID NO: 10025 - RNA, 31 nt, Homo sapiens
  source 1..31: mol_type = unassigned RNA
ttttgcttgtttcccagaggggtgtgtgtgt

SEQ ID NO: 10026 - DNA, 31 bp, Homo sapiens
  source 1..31: mol_type = unassigned DNA
ttttgcttgtttcccagaggggtgtgtgtgt

SEQ ID NO: 10027 - DNA, 31 bp, Homo sapiens
  source 1..31: mol_type = unassigned DNA
acacacacacccctctgggaaacaagcaaaa

SEQ ID NO: 10028 - RNA, 62 nt, Homo sapiens
  source 1..62: mol_type = unassigned RNA
tcccagctctatggctagctagctgtattattctagttatgagacctccctggactttagtt

SEQ ID NO: 10029 - DNA, 62 bp, Homo sapiens
  source 1..62: mol_type = unassigned DNA
tcccagctctatggctagctagctgtattattctagttatgagacctccctggactttagtt

SEQ ID NO: 10030 - DNA, 62 bp, Homo sapiens
  source 1..62: mol_type = unassigned DNA
aactaaagtccagggaggtctcataactagaataatacagctagctagccatagagctggga

SEQ ID NO: 10031 - RNA, 67 nt, Homo sapiens
  source 1..67: mol_type = unassigned RNA
aatcctgtagggtgggtcgtgtgaacaccattttatgggtgagaacacaggcccagggagattaggc

SEQ ID NO: 10032 - DNA, 67 bp, Homo sapiens
  source 1..67: mol_type = unassigned DNA
aatcctgtagggtgggtcgtgtgaacaccattttatgggtgagaacacaggcccagggagattaggc

SEQ ID NO: 10033 - DNA, 67 bp, Homo sapiens
  source 1..67: mol_type = unassigned DNA
gcctaatctccctgggcctgtgttctcacccataaaatggtgttcacacgacccaccctacaggatt

SEQ ID NO: 10034 - RNA, 41 nt, Homo sapiens
  source 1..41: mol_type = unassigned RNA
gttcaataaggagcattaggtgattgactgatggtgactga

SEQ ID NO: 10035 - DNA, 41 bp, Homo sapiens
  source 1..41: mol_type = unassigned DNA
gttcaataaggagcattaggtgattgactgatggtgactga

SEQ ID NO: 10036 - DNA, 41 bp, Homo sapiens
  source 1..41: mol_type = unassigned DNA
tcagtcaccatcagtcaatcacctaatgctccttattgaac

SEQ ID NO: 10037 - RNA, 38 nt, Homo sapiens
  source 1..38: mol_type = unassigned RNA
attgtacagtaaacatcttggaatattgacacaagcac

SEQ ID NO: 10038 - DNA, 38 bp, Homo sapiens
  source 1..38: mol_type = unassigned DNA
attgtacagtaaacatcttggaatattgacacaagcac

SEQ ID NO: 10039 - DNA, 38 bp, Homo sapiens
  source 1..38: mol_type = unassigned DNA
gtgcttgtgtcaatattccaagatgtttactgtacaat

SEQ ID NO: 10040 - RNA, 25 nt, Homo sapiens
  source 1..25: mol_type = unassigned RNA
atctatttttatccagctgtatttt

SEQ ID NO: 10041 - DNA, 25 bp, Homo sapiens
  source 1..25: mol_type = unassigned DNA
atctatttttatccagctgtatttt

SEQ ID NO: 10042 - DNA, 25 bp, Homo sapiens
  source 1..25: mol_type = unassigned DNA
aaaatacagctggataaaaatagat

SEQ ID NO: 10043 - RNA, 52 nt, Homo sapiens
  source 1..52: mol_type = unassigned RNA
tccacatcctcaccaactttggttatctcgtgtctttgtgtgtgtgtgtgtg

SEQ ID NO: 10044 - DNA, 52 bp, Homo sapiens
  source 1..52: mol_type = unassigned DNA
tccacatcctcaccaactttggttatctcgtgtctttgtgtgtgtgtgtgtg

SEQ ID NO: 10045 - DNA, 52 bp, Homo sapiens
  source 1..52: mol_type = unassigned DNA
cacacacacacacacaaagacacgagataaccaaagttggtgaggatgtgga

SEQ ID NO: 10046 - RNA, 67 nt, Homo sapiens
  source 1..67: mol_type = unassigned RNA
gctcttgtttagagatgcgttttggtcctggtgtagctggtttcttgctgtgtgaccttggacagtt

SEQ ID NO: 10047 - DNA, 67 bp, Homo sapiens
  source 1..67: mol_type = unassigned DNA
gctcttgtttagagatgcgttttggtcctggtgtagctggtttcttgctgtgtgaccttggacagtt

SEQ ID NO: 10048 - DNA, 67 bp, Homo sapiens
  source 1..67: mol_type = unassigned DNA
aactgtccaaggtcacacagcaagaaaccagctacaccaggaccaaaacgcatctctaaacaagagc

SEQ ID NO: 10049 - RNA, 24 nt, Homo sapiens
  source 1..24: mol_type = unassigned RNA
gagatcgcagctcatttggtacaa

SEQ ID NO: 10050 - DNA, 24 bp, Homo sapiens
  source 1..24: mol_type = unassigned DNA
gagatcgcagctcatttggtacaa

SEQ ID NO: 10051 - DNA, 24 bp, Homo sapiens
  source 1..24: mol_type = unassigned DNA
ttgtaccaaatgagctgcgatctc

SEQ ID NO: 10052 - RNA, 35 nt, Homo sapiens
  source 1..35: mol_type = unassigned RNA
tcagtgccctccataaaattgttgtactgtgaaat

SEQ ID NO: 10053 - DNA, 35 bp, Homo sapiens
  source 1..35: mol_type = unassigned DNA
tcagtgccctccataaaattgttgtactgtgaaat

SEQ ID NO: 10054 - DNA, 35 bp, Homo sapiens
  source 1..35: mol_type = unassigned DNA
atttcacagtacaacaattttatggagggcactga

SEQ ID NO: 10055 - RNA, 60 nt, Homo sapiens
  source 1..60: mol_type = unassigned RNA
gtcattgtacaggtcgttaagatacttgccccttccttggttatctagccgctgaaggga

SEQ ID NO: 10056 - DNA, 60 bp, Homo sapiens
  source 1..60: mol_type = unassigned DNA
gtcattgtacaggtcgttaagatacttgccccttccttggttatctagccgctgaaggga

SEQ ID NO: 10057 - DNA, 60 bp, Homo sapiens
  source 1..60: mol_type = unassigned DNA
tcccttcagcggctagataaccaaggaaggggcaagtatcttaacgacctgtacaatgac

SEQ ID NO: 10058 - RNA, 31 nt, Homo sapiens
  source 1..31: mol_type = unassigned RNA
cagctgcttactctggaagtcctaaaatctc

SEQ ID NO: 10059 - DNA, 31 bp, Homo sapiens
  source 1..31: mol_type = unassigned DNA
cagctgcttactctggaagtcctaaaatctc

SEQ ID NO: 10060 - DNA, 31 bp, Homo sapiens
  source 1..31: mol_type = unassigned DNA
gagattttaggacttccagagtaagcagctg

SEQ ID NO: 10061 - RNA, 148 nt, Homo sapiens
  source 1..148: mol_type = unassigned RNA
ttctgttttttcctctggagtttgtttctctggctgtatgacttgcatgatacttaatccattctttctgtgctgcttatagttatttttagggtttcattaatactgtatcatgatgccaaacaacagactttagaaaatataatgc

SEQ ID NO: 10062 - DNA, 148 bp, Homo sapiens
  source 1..148: mol_type = unassigned DNA
ttctgttttttcctctggagtttgtttctctggctgtatgacttgcatgatacttaatccattctttctgtgctgcttatagttatttttagggtttcattaatactgtatcatgatgccaaacaacagactttagaaaatataatgc

SEQ ID NO: 10063 - DNA, 148 bp, Homo sapiens
  source 1..148: mol_type = unassigned DNA
gcattatattttctaaagtctgttgtttggcatcatgatacagtattaatgaaaccctaaaaataactataagcagcacagaaagaatggattaagtatcatgcaagtcatacagccagagaaacaaactccagaggaaaaaacagaa

SEQ ID NO: 10064 - RNA, 32 nt, Homo sapiens
  source 1..32: mol_type = unassigned RNA
agggtctctggttagctggctgcatgagctct

SEQ ID NO: 10065 - DNA, 32 bp, Homo sapiens
  source 1..32: mol_type = unassigned DNA
agggtctctggttagctggctgcatgagctct

SEQ ID NO: 10066 - DNA, 32 bp, Homo sapiens
  source 1..32: mol_type = unassigned DNA
agagctcatgcagccagctaaccagagaccct

SEQ ID NO: 10067 - RNA, 70 nt, Homo sapiens
  source 1..70: mol_type = unassigned RNA
atgttgtttatcagctgtatgaacttttgggctgaggttatggcattttctagatgtagaaccatgttgt

SEQ ID NO: 10068 - DNA, 70 bp, Homo sapiens
  source 1..70: mol_type = unassigned DNA
atgttgtttatcagctgtatgaacttttgggctgaggttatggcattttctagatgtagaaccatgttgt

SEQ ID NO: 10069 - DNA, 70 bp, Homo sapiens
  source 1..70: mol_type = unassigned DNA
acaacatggttctacatctagaaaatgccataacctcagcccaaaagttcatacagctgataaacaacat

SEQ ID NO: 10070 - RNA, 48 nt, Homo sapiens
  source 1..48: mol_type = unassigned RNA
gggccactggggtagatcctgaaacttctccaccacctcaatgtggag

SEQ ID NO: 10071 - DNA, 48 bp, Homo sapiens
  source 1..48: mol_type = unassigned DNA
gggccactggggtagatcctgaaacttctccaccacctcaatgtggag

SEQ ID NO: 10072 - DNA, 48 bp, Homo sapiens
  source 1..48: mol_type = unassigned DNA
ctccacattgaggtggtggagaagtttcaggatctaccccagtggccc

SEQ ID NO: 10073 - RNA, 23 nt, Homo sapiens
  source 1..23: mol_type = unassigned RNA
tgatttagtagatttattgttga

SEQ ID NO: 10074 - DNA, 23 bp, Homo sapiens
  source 1..23: mol_type = unassigned DNA
tgatttagtagatttattgttga

SEQ ID NO: 10075 - DNA, 23 bp, Homo sapiens
  source 1..23: mol_type = unassigned DNA
tcaacaataaatctactaaatca

SEQ ID NO: 10076 - RNA, 36 nt, Homo sapiens
  source 1..36: mol_type = unassigned RNA
ttcactgtacattggttaccaagctgtctgagtctg

SEQ ID NO: 10077 - DNA, 36 bp, Homo sapiens
  source 1..36: mol_type = unassigned DNA
ttcactgtacattggttaccaagctgtctgagtctg

SEQ ID NO: 10078 - DNA, 36 bp, Homo sapiens
  source 1..36: mol_type = unassigned DNA
cagactcagacagcttggtaaccaatgtacagtgaa

SEQ ID NO: 10079 - RNA, 47 nt, Homo sapiens
  source 1..47: mol_type = unassigned RNA
tgtcttggttatcttgctgcctgaggttagcgtgtgcctccattccc

SEQ ID NO: 10080 - DNA, 47 bp, Homo sapiens
  source 1..47: mol_type = unassigned DNA
tgtcttggttatcttgctgcctgaggttagcgtgtgcctccattccc

SEQ ID NO: 10081 - DNA, 47 bp, Homo sapiens
  source 1..47: mol_type = unassigned DNA
gggaatggaggcacacgctaacctcaggcagcaagataaccaagaca

SEQ ID NO: 10082 - RNA, 32 nt, Homo sapiens
  source 1..32: mol_type = unassigned RNA
atgaaatacacagaccaggggccttggaaaca

SEQ ID NO: 10083 - DNA, 32 bp, Homo sapiens
  source 1..32: mol_type = unassigned DNA
atgaaatacacagaccaggggccttggaaaca

SEQ ID NO: 10084 - DNA, 32 bp, Homo sapiens
  source 1..32: mol_type = unassigned DNA
tgtttccaaggcccctggtctgtgtatttcat

SEQ ID NO: 10085 - RNA, 33 nt, Homo sapiens
  source 1..33: mol_type = unassigned RNA
tctttgggtgtcttgctgtgtggctgtaggtga

SEQ ID NO: 10086 - DNA, 33 bp, Homo sapiens
  source 1..33: mol_type = unassigned DNA
tctttgggtgtcttgctgtgtggctgtaggtga

SEQ ID NO: 10087 - DNA, 33 bp, Homo sapiens
  source 1..33: mol_type = unassigned DNA
tcacctacagccacacagcaagacacccaaaga

SEQ ID NO: 10088 - RNA, 25 nt, Homo sapiens
  source 1..25: mol_type = unassigned RNA
attgaaggttaaagaattgtggaaa

SEQ ID NO: 10089 - DNA, 25 bp, Homo sapiens
  source 1..25: mol_type = unassigned DNA
attgaaggttaaagaattgtggaaa

SEQ ID NO: 10090 - DNA, 25 bp, Homo sapiens
  source 1..25: mol_type = unassigned DNA
tttccacaattctttaaccttcaat

SEQ ID NO: 10091 - RNA, 31 nt, Homo sapiens
  source 1..31: mol_type = unassigned RNA
tgagctttggttatttggctgtataacttaa

SEQ ID NO: 10092 - DNA, 31 bp, Homo sapiens
  source 1..31: mol_type = unassigned DNA
tgagctttggttatttggctgtataacttaa

SEQ ID NO: 10093 - DNA, 31 bp, Homo sapiens
  source 1..31: mol_type = unassigned DNA
ttaagttatacagccaaataaccaaagctca

SEQ ID NO: 10094 - RNA, 36 nt, Homo sapiens
  source 1..36: mol_type = unassigned RNA
ctttctttgtttctctctctttctttctctctctcc

SEQ ID NO: 10095 - DNA, 36 bp, Homo sapiens
  source 1..36: mol_type = unassigned DNA
ctttctttgtttctctctctttctttctctctctcc

SEQ ID NO: 10096 - DNA, 36 bp, Homo sapiens
  source 1..36: mol_type = unassigned DNA
ggagagagagaaagaaagagagagaaacaaagaaag

SEQ ID NO: 10097 - RNA, 35 nt, Homo sapiens
  source 1..35: mol_type = unassigned RNA
tgtggtagtggttatacagctgtatgagtttgcca

SEQ ID NO: 10098 - DNA, 35 bp, Homo sapiens
  source 1..35: mol_type = unassigned DNA
tgtggtagtggttatacagctgtatgagtttgcca

SEQ ID NO: 10099 - DNA, 35 bp, Homo sapiens
  source 1..35: mol_type = unassigned DNA
tggcaaactcatacagctgtataaccactaccaca

SEQ ID NO: 10100 - RNA, 31 nt, Homo sapiens
  source 1..31: mol_type = unassigned RNA
tgtgtggttatctaggtgtttttgtaagtct

SEQ ID NO: 10101 - DNA, 31 bp, Homo sapiens
  source 1..31: mol_type = unassigned DNA
tgtgtggttatctaggtgtttttgtaagtct

SEQ ID NO: 10102 - DNA, 31 bp, Homo sapiens
  source 1..31: mol_type = unassigned DNA
agacttacaaaaacacctagataaccacaca

SEQ ID NO: 10103 - RNA, 53 nt, Homo sapiens
  source 1..53: mol_type = unassigned RNA
gtagccttataatctttggttatctcagtttatttgcgtgatccattcaatgt

SEQ ID NO: 10104 - DNA, 53 bp, Homo sapiens
  source 1..53: mol_type = unassigned DNA
gtagccttataatctttggttatctcagtttatttgcgtgatccattcaatgt

SEQ ID NO: 10105 - DNA, 53 bp, Homo sapiens
  source 1..53: mol_type = unassigned DNA
acattgaatggatcacgcaaataaactgagataaccaaagattataaggctac

SEQ ID NO: 10106 - RNA, 72 nt, Homo sapiens
  source 1..72: mol_type = unassigned RNA
aagcttaggtttggctgtttggttatttagctgactggttttagagaagcccttccgcagatggctggagga

SEQ ID NO: 10107 - DNA, 72 bp, Homo sapiens
  source 1..72: mol_type = unassigned DNA
aagcttaggtttggctgtttggttatttagctgactggttttagagaagcccttccgcagatggctggagga

SEQ ID NO: 10108 - DNA, 72 bp, Homo sapiens
  source 1..72: mol_type = unassigned DNA
tcctccagccatctgcggaagggcttctctaaaaccagtcagctaaataaccaaacagccaaacctaagctt

SEQ ID NO: 10109 - RNA, 25 nt, Homo sapiens
  source 1..25: mol_type = unassigned RNA
ttgtgtggttatctaggtgtttttg

SEQ ID NO: 10110 - DNA, 25 bp, Homo sapiens
  source 1..25: mol_type = unassigned DNA
ttgtgtggttatctaggtgtttttg

SEQ ID NO: 10111 - DNA, 25 bp, Homo sapiens
  source 1..25: mol_type = unassigned DNA
caaaaacacctagataaccacacaa

SEQ ID NO: 10112 - RNA, 32 nt, Homo sapiens
  source 1..32: mol_type = unassigned RNA
ctgtttttctttgattatcttgctgtttaata

SEQ ID NO: 10113 - DNA, 32 bp, Homo sapiens
  source 1..32: mol_type = unassigned DNA
ctgtttttctttgattatcttgctgtttaata

SEQ ID NO: 10114 - DNA, 32 bp, Homo sapiens
  source 1..32: mol_type = unassigned DNA
tattaaacagcaagataatcaaagaaaaacag

SEQ ID NO: 10115 - RNA, 33 nt, Homo sapiens
  source 1..33: mol_type = unassigned RNA
acagtggttatctctgtatgatagatttgtaag

SEQ ID NO: 10116 - DNA, 33 bp, Homo sapiens
  source 1..33: mol_type = unassigned DNA
acagtggttatctctgtatgatagatttgtaag

SEQ ID NO: 10117 - DNA, 33 bp, Homo sapiens
  source 1..33: mol_type = unassigned DNA
cttacaaatctatcatacagagataaccactgt

SEQ ID NO: 10118 - RNA, 37 nt, Homo sapiens
  source 1..37: mol_type = unassigned RNA
gctttggttctcgagcttcatgaaccatcagaatccc

SEQ ID NO: 10119 - DNA, 37 bp, Homo sapiens
  source 1..37: mol_type = unassigned DNA
gctttggttctcgagcttcatgaaccatcagaatccc

SEQ ID NO: 10120 - DNA, 37 bp, Homo sapiens
  source 1..37: mol_type = unassigned DNA
gggattctgatggttcatgaagctcgagaaccaaagc

SEQ ID NO: 10121 - RNA, 22 nt, Homo sapiens
  source 1..22: mol_type = unassigned RNA
actttacttgagtcaaacggaa

SEQ ID NO: 10122 - DNA, 22 bp, Homo sapiens
  source 1..22: mol_type = unassigned DNA
actttacttgagtcaaacggaa

SEQ ID NO: 10123 - DNA, 22 bp, Homo sapiens
  source 1..22: mol_type = unassigned DNA
ttccgtttgactcaagtaaagt

SEQ ID NO: 10124 - RNA, 74 nt, Homo sapiens
  source 1..74: mol_type = unassigned RNA
atgtactaaaattgatttgtatctgtggttatacagctctatgctaaaaaccattagatggtacactgtatggt

SEQ ID NO: 10125 - DNA, 74 bp, Homo sapiens
  source 1..74: mol_type = unassigned DNA
atgtactaaaattgatttgtatctgtggttatacagctctatgctaaaaaccattagatggtacactgtatggt

SEQ ID NO: 10126 - DNA, 74 bp, Homo sapiens
  source 1..74: mol_type = unassigned DNA
accatacagtgtaccatctaatggtttttagcatagagctgtataaccacagatacaaatcaattttagtacat

SEQ ID NO: 10127 - RNA, 57 nt, Homo sapiens
  source 1..57: mol_type = unassigned RNA
ctttatctctgtctttctgttctccctgtttttgtttatctttctgtctgactctgt

SEQ ID NO: 10128 - DNA, 57 bp, Homo sapiens
  source 1..57: mol_type = unassigned DNA
ctttatctctgtctttctgttctccctgtttttgtttatctttctgtctgactctgt

SEQ ID NO: 10129 - DNA, 57 bp, Homo sapiens
  source 1..57: mol_type = unassigned DNA
acagagtcagacagaaagataaacaaaaacagggagaacagaaagacagagataaag

SEQ ID NO: 10130 - RNA, 80 nt, Homo sapiens
  source 1..80: mol_type = unassigned RNA
agtttagcctttcagagtagaatgactagacttgtggacaactagactagtagactagtagagagatggtcctcagagcc

SEQ ID NO: 10131 - DNA, 80 bp, Homo sapiens
  source 1..80: mol_type = unassigned DNA
agtttagcctttcagagtagaatgactagacttgtggacaactagactagtagactagtagagagatggtcctcagagcc

SEQ ID NO: 10132 - DNA, 80 bp, Homo sapiens
  source 1..80: mol_type = unassigned DNA
ggctctgaggaccatctctctactagtctactagtctagttgtccacaagtctagtcattctactctgaaaggctaaact

SEQ ID NO: 10133 - RNA, 21 nt, Homo sapiens
  source 1..21: mol_type = unassigned RNA
gaatctgtggctcaatgggct

SEQ ID NO: 10134 - DNA, 21 bp, Homo sapiens
  source 1..21: mol_type = unassigned DNA
gaatctgtggctcaatgggct

SEQ ID NO: 10135 - DNA, 21 bp, Homo sapiens
  source 1..21: mol_type = unassigned DNA
agcccattgagccacagattc

SEQ ID NO: 10136 - RNA, 45 nt, Homo sapiens
  source 1..45: mol_type = unassigned RNA
tgagttctagttttcttggttaccagctgtctgaccttgggtaaa

SEQ ID NO: 10137 - DNA, 45 bp, Homo sapiens
  source 1..45: mol_type = unassigned DNA
tgagttctagttttcttggttaccagctgtctgaccttgggtaaa

SEQ ID NO: 10138 - DNA, 45 bp, Homo sapiens
  source 1..45: mol_type = unassigned DNA
tttacccaaggtcagacagctggtaaccaagaaaactagaactca

SEQ ID NO: 10139 - RNA, 34 nt, Homo sapiens
  source 1..34: mol_type = unassigned RNA
tattctttggttatctaagctgtagctacactgg

SEQ ID NO: 10140 - DNA, 34 bp, Homo sapiens
  source 1..34: mol_type = unassigned DNA
tattctttggttatctaagctgtagctacactgg

SEQ ID NO: 10141 - DNA, 34 bp, Homo sapiens
  source 1..34: mol_type = unassigned DNA
ccagtgtagctacagcttagataaccaaagaata

SEQ ID NO: 10142 - RNA, 29 nt, Homo sapiens
  source 1..29: mol_type = unassigned RNA
ctgtgggatcgtggctcttcaggaatctg

SEQ ID NO: 10143 - DNA, 29 bp, Homo sapiens
  source 1..29: mol_type = unassigned DNA
ctgtgggatcgtggctcttcaggaatctg

SEQ ID NO: 10144 - DNA, 29 bp, Homo sapiens
  source 1..29: mol_type = unassigned DNA
cagattcctgaagagccacgatcccacag

SEQ ID NO: 10145 - RNA, 22 nt, Homo sapiens
  source 1..22: mol_type = unassigned RNA
ctgcccgatggccatagtggat

SEQ ID NO: 10146 - DNA, 22 bp, Homo sapiens
  source 1..22: mol_type = unassigned DNA
ctgcccgatggccatagtggat

SEQ ID NO: 10147 - DNA, 22 bp, Homo sapiens
  source 1..22: mol_type = unassigned DNA
atccactatggccatcgggcag

SEQ ID NO: 10148 - RNA, 72 nt, Homo sapiens
  source 1..72: mol_type = unassigned RNA
taaacattcctgtaaacctgattatccaactgttttctatggatttctatctgtatgtctgggttgtttttt

SEQ ID NO: 10149 - DNA, 72 bp, Homo sapiens
  source 1..72: mol_type = unassigned DNA
taaacattcctgtaaacctgattatccaactgttttctatggatttctatctgtatgtctgggttgtttttt

SEQ ID NO: 10150 - DNA, 72 bp, Homo sapiens
  source 1..72: mol_type = unassigned DNA
aaaaaacaacccagacatacagatagaaatccatagaaaacagttggataatcaggtttacaggaatgttta

SEQ ID NO: 10151 - RNA, 25 nt, Homo sapiens
  source 1..25: mol_type = unassigned RNA
ttaggtagtagtattgtatcattgt

SEQ ID NO: 10152 - DNA, 25 bp, Homo sapiens
  source 1..25: mol_type = unassigned DNA
ttaggtagtagtattgtatcattgt

SEQ ID NO: 10153 - DNA, 25 bp, Homo sapiens
  source 1..25: mol_type = unassigned DNA
acaatgatacaatactactacctaa

SEQ ID NO: 10154 - RNA, 31 nt, Homo sapiens
  source 1..31: mol_type = unassigned RNA
ccatgggattgcgtcggtcctggggatgctt

SEQ ID NO: 10155 - DNA, 31 bp, Homo sapiens
  source 1..31: mol_type = unassigned DNA
ccatgggattgcgtcggtcctggggatgctt

SEQ ID NO: 10156 - DNA, 31 bp, Homo sapiens
  source 1..31: mol_type = unassigned DNA
aagcatccccaggaccgacgcaatcccatgg

SEQ ID NO: 10157 - RNA, 54 nt, Homo sapiens
  source 1..54: mol_type = unassigned RNA
aaaaaaatgattgcttgtgagtttgtggttttgtagctggatgatgggtacatg

SEQ ID NO: 10158 - DNA, 54 bp, Homo sapiens
  source 1..54: mol_type = unassigned DNA
aaaaaaatgattgcttgtgagtttgtggttttgtagctggatgatgggtacatg

SEQ ID NO: 10159 - DNA, 54 bp, Homo sapiens
  source 1..54: mol_type = unassigned DNA
catgtacccatcatccagctacaaaaccacaaactcacaagcaatcattttttt

SEQ ID NO: 10160 - RNA, 24 nt, Homo sapiens
  source 1..24: mol_type = unassigned RNA
ctctaccctcagctccatgtggat

SEQ ID NO: 10161 - DNA, 24 bp, Homo sapiens
  source 1..24: mol_type = unassigned DNA
ctctaccctcagctccatgtggat

SEQ ID NO: 10162 - DNA, 24 bp, Homo sapiens
  source 1..24: mol_type = unassigned DNA
atccacatggagctgagggtagag

SEQ ID NO: 10163 - RNA, 24 nt, Homo sapiens
  source 1..24: mol_type = unassigned RNA
taatgcattagtttgggtggtttg

SEQ ID NO: 10164 - DNA, 24 bp, Homo sapiens
  source 1..24: mol_type = unassigned DNA
taatgcattagtttgggtggtttg

SEQ ID NO: 10165 - DNA, 24 bp, Homo sapiens
  source 1..24: mol_type = unassigned DNA
caaaccacccaaactaatgcatta

SEQ ID NO: 10166 - RNA, 26 nt, Homo sapiens
  source 1..26: mol_type = unassigned RNA
ttttggagctctggattgacagcctt

SEQ ID NO: 10167 - DNA, 26 bp, Homo sapiens
  source 1..26: mol_type = unassigned DNA
ttttggagctctggattgacagcctt

SEQ ID NO: 10168 - DNA, 26 bp, Homo sapiens
  source 1..26: mol_type = unassigned DNA
aaggctgtcaatccagagctccaaaa

SEQ ID NO: 10169 - RNA, 61 nt, Homo sapiens
  source 1..61: mol_type = unassigned RNA
tattttggtttctagttgtctgaccgtaatcaggcaatgtagttgaacatgctctgggaat

SEQ ID NO: 10170 - DNA, 61 bp, Homo sapiens
  source 1..61: mol_type = unassigned DNA
tattttggtttctagttgtctgaccgtaatcaggcaatgtagttgaacatgctctgggaat

SEQ ID NO: 10171 - DNA, 61 bp, Homo sapiens
  source 1..61: mol_type = unassigned DNA
attcccagagcatgttcaactacattgcctgattacggtcagacaactagaaaccaaaata

SEQ ID NO: 10172 - RNA, 28 nt, Homo sapiens
  source 1..28: mol_type = unassigned RNA
tgcagttcttggtttctagctttctgag

SEQ ID NO: 10173 - DNA, 28 bp, Homo sapiens
  source 1..28: mol_type = unassigned DNA
tgcagttcttggtttctagctttctgag

SEQ ID NO: 10174 - DNA, 28 bp, Homo sapiens
  source 1..28: mol_type = unassigned DNA
ctcagaaagctagaaaccaagaactgca

SEQ ID NO: 10175 - RNA, 23 nt, Homo sapiens
  source 1..23: mol_type = unassigned RNA
taatgtattagtttgtgaggcat

SEQ ID NO: 10176 - DNA, 23 bp, Homo sapiens
  source 1..23: mol_type = unassigned DNA
taatgtattagtttgtgaggcat

SEQ ID NO: 10177 - DNA, 23 bp, Homo sapiens
  source 1..23: mol_type = unassigned DNA
atgcctcacaaactaatacatta

SEQ ID NO: 10178 - RNA, 31 nt, Homo sapiens
  source 1..31: mol_type = unassigned RNA
tcttggatttggttatctagatttatagcca

SEQ ID NO: 10179 - DNA, 31 bp, Homo sapiens
  source 1..31: mol_type = unassigned DNA
tcttggatttggttatctagatttatagcca

SEQ ID NO: 10180 - DNA, 31 bp, Homo sapiens
  source 1..31: mol_type = unassigned DNA
tggctataaatctagataaccaaatccaaga

SEQ ID NO: 10181 - RNA, 28 nt, Homo sapiens
  source 1..28: mol_type = unassigned RNA
tgtcctttgatgtcagcctggaggtcag

SEQ ID NO: 10182 - DNA, 28 bp, Homo sapiens
  source 1..28: mol_type = unassigned DNA
tgtcctttgatgtcagcctggaggtcag

SEQ ID NO: 10183 - DNA, 28 bp, Homo sapiens
  source 1..28: mol_type = unassigned DNA
ctgacctccaggctgacatcaaaggaca

SEQ ID NO: 10184 - RNA, 30 nt, Homo sapiens
  source 1..30: mol_type = unassigned RNA
tattttgttctctagctttctgctcccctt

SEQ ID NO: 10185 - DNA, 30 bp, Homo sapiens
  source 1..30: mol_type = unassigned DNA
tattttgttctctagctttctgctcccctt

SEQ ID NO: 10186 - DNA, 30 bp, Homo sapiens
  source 1..30: mol_type = unassigned DNA
aaggggagcagaaagctagagaacaaaata

SEQ ID NO: 10187 - RNA, 30 nt, Homo sapiens
  source 1..30: mol_type = unassigned RNA
atctttatttatctcgctttttggtcttaa

SEQ ID NO: 10188 - DNA, 30 bp, Homo sapiens
  source 1..30: mol_type = unassigned DNA
atctttatttatctcgctttttggtcttaa

SEQ ID NO: 10189 - DNA, 30 bp, Homo sapiens
  source 1..30: mol_type = unassigned DNA
ttaagaccaaaaagcgagataaataaagat

SEQ ID NO: 10190 - RNA, 38 nt, Homo sapiens
  source 1..38: mol_type = unassigned RNA
tttggtcttatatagtgtattagtttgtttgggcagat

SEQ ID NO: 10191 - DNA, 38 bp, Homo sapiens
  source 1..38: mol_type = unassigned DNA
tttggtcttatatagtgtattagtttgtttgggcagat

SEQ ID NO: 10192 - DNA, 38 bp, Homo sapiens
  source 1..38: mol_type = unassigned DNA
atctgcccaaacaaactaatacactatataagaccaaa

SEQ ID NO: 10193 - RNA, 62 nt, Homo sapiens
  source 1..62: mol_type = unassigned RNA
tagcaaatcagactggatgtagtggctcgcgcctgtaatcccagcattttgggaggccgaga

SEQ ID NO: 10194 - DNA, 62 bp, Homo sapiens
  source 1..62: mol_type = unassigned DNA
tagcaaatcagactggatgtagtggctcgcgcctgtaatcccagcattttgggaggccgaga

SEQ ID NO: 10195 - DNA, 62 bp, Homo sapiens
  source 1..62: mol_type = unassigned DNA
tctcggcctcccaaaatgctgggattacaggcgcgagccactacatccagtctgatttgcta

SEQ ID NO: 10196 - RNA, 22 nt, Homo sapiens
  source 1..22: mol_type = unassigned RNA
tctttggtattctagctatggg

SEQ ID NO: 10197 - DNA, 22 bp, Homo sapiens
  source 1..22: mol_type = unassigned DNA
tctttggtattctagctatggg

SEQ ID NO: 10198 - DNA, 22 bp, Homo sapiens
  source 1..22: mol_type = unassigned DNA
cccatagctagaataccaaaga

SEQ ID NO: 10199 - RNA, 30 nt, Homo sapiens
  source 1..30: mol_type = unassigned RNA
gccctccgtacacacagaactttttttctt

SEQ ID NO: 10200 - DNA, 30 bp, Homo sapiens
  source 1..30: mol_type = unassigned DNA
gccctccgtacacacagaactttttttctt

SEQ ID NO: 10201 - DNA, 30 bp, Homo sapiens
  source 1..30: mol_type = unassigned DNA
aagaaaaaaagttctgtgtgtacggagggc

SEQ ID NO: 10202 - RNA, 26 nt, Homo sapiens
  source 1..26: mol_type = unassigned RNA
aagcacctatgaattcacagtccaga

SEQ ID NO: 10203 - DNA, 26 bp, Homo sapiens
  source 1..26: mol_type = unassigned DNA
aagcacctatgaattcacagtccaga

SEQ ID NO: 10204 - DNA, 26 bp, Homo sapiens
  source 1..26: mol_type = unassigned DNA
tctggactgtgaattcataggtgctt

SEQ ID NO: 10205 - RNA, 94 nt, Homo sapiens
  source 1..94: mol_type = unassigned RNA
ggaggccctagtttgtgtggttggaaaccccagcctgtttttccctcccatctgaactgcagttttaggctctctctttttcccgcccccttga

SEQ ID NO: 10206 - DNA, 94 bp, Homo sapiens
  source 1..94: mol_type = unassigned DNA
ggaggccctagtttgtgtggttggaaaccccagcctgtttttccctcccatctgaactgcagttttaggctctctctttttcccgcccccttga

SEQ ID NO: 10207 - DNA, 94 bp, Homo sapiens
  source 1..94: mol_type = unassigned DNA
tcaagggggcgggaaaaagagagagcctaaaactgcagttcagatgggagggaaaaacaggctggggtttccaaccacacaaactagggcctcc

SEQ ID NO: 10208 - RNA, 23 nt, Homo sapiens
  source 1..23: mol_type = unassigned RNA
tctttgtttacctggctgtctca

SEQ ID NO: 10209 - DNA, 23 bp, Homo sapiens
  source 1..23: mol_type = unassigned DNA
tctttgtttacctggctgtctca

SEQ ID NO: 10210 - DNA, 23 bp, Homo sapiens
  source 1..23: mol_type = unassigned DNA
tgagacagccaggtaaacaaaga

SEQ ID NO: 10211 - RNA, 27 nt, Homo sapiens
  source 1..27: mol_type = unassigned RNA
agatggagagaaagtggtctgagaatt

SEQ ID NO: 10212 - DNA, 27 bp, Homo sapiens
  source 1..27: mol_type = unassigned DNA
agatggagagaaagtggtctgagaatt

SEQ ID NO: 10213 - DNA, 27 bp, Homo sapiens
  source 1..27: mol_type = unassigned DNA
aattctcagaccactttctctccatct

SEQ ID NO: 10214 - RNA, 74 nt, Homo sapiens
  source 1..74: mol_type = unassigned RNA
cacccacagcctgtatacacactgctcctcctgtattcccatctctgcattgacagccccatcctccaaggcac

SEQ ID NO: 10215 - DNA, 74 bp, Homo sapiens
  source 1..74: mol_type = unassigned DNA
cacccacagcctgtatacacactgctcctcctgtattcccatctctgcattgacagccccatcctccaaggcac

SEQ ID NO: 10216 - DNA, 74 bp, Homo sapiens
  source 1..74: mol_type = unassigned DNA
gtgccttggaggatggggctgtcaatgcagagatgggaatacaggaggagcagtgtgtatacaggctgtgggtg

SEQ ID NO: 10217 - RNA, 38 nt, Homo sapiens
  source 1..38: mol_type = unassigned RNA
tgcaagtctgtgtctgggttatcgatctgtatgtcttt

SEQ ID NO: 10218 - DNA, 38 bp, Homo sapiens
  source 1..38: mol_type = unassigned DNA
tgcaagtctgtgtctgggttatcgatctgtatgtcttt

SEQ ID NO: 10219 - DNA, 38 bp, Homo sapiens
  source 1..38: mol_type = unassigned DNA
aaagacatacagatcgataacccagacacagacttgca

SEQ ID NO: 10220 - RNA, 101 nt, Homo sapiens
  source 1..101: mol_type = unassigned RNA
ctataagaactggtgatgacatctgctgtgctgaagtgaataggtggggttgccatgaggaagccgcagctgctgtgttttgggtccgttcttcacggatg

SEQ ID NO: 10221 - DNA, 101 bp, Homo sapiens
  source 1..101: mol_type = unassigned DNA
ctataagaactggtgatgacatctgctgtgctgaagtgaataggtggggttgccatgaggaagccgcagctgctgtgttttgggtccgttcttcacggatg

SEQ ID NO: 10222 - DNA, 101 bp, Homo sapiens
  source 1..101: mol_type = unassigned DNA
catccgtgaagaacggacccaaaacacagcagctgcggcttcctcatggcaaccccacctattcacttcagcacagcagatgtcatcaccagttcttatag

SEQ ID NO: 10223 - RNA, 61 nt, Homo sapiens
  source 1..61: mol_type = unassigned RNA
ggtttgtcctgccttacatgcaccctcctctccatcccccatcctttcctaactatccttt

SEQ ID NO: 10224 - DNA, 61 bp, Homo sapiens
  source 1..61: mol_type = unassigned DNA
ggtttgtcctgccttacatgcaccctcctctccatcccccatcctttcctaactatccttt

SEQ ID NO: 10225 - DNA, 61 bp, Homo sapiens
  source 1..61: mol_type = unassigned DNA
aaaggatagttaggaaaggatgggggatggagaggagggtgcatgtaaggcaggacaaacc

SEQ ID NO: 10226 - RNA, 36 nt, Homo sapiens
  source 1..36: mol_type = unassigned RNA
gttatatccttgttctttgactagctagctgtgtga

SEQ ID NO: 10227 - DNA, 36 bp, Homo sapiens
  source 1..36: mol_type = unassigned DNA
gttatatccttgttctttgactagctagctgtgtga

SEQ ID NO: 10228 - DNA, 36 bp, Homo sapiens
  source 1..36: mol_type = unassigned DNA
tcacacagctagctagtcaaagaacaaggatataac

SEQ ID NO: 10229 - RNA, 39 nt, Homo sapiens
  source 1..39: mol_type = unassigned RNA
aatatcccagatcaaacttttattatctagctttatgtt

SEQ ID NO: 10230 - DNA, 39 bp, Homo sapiens
  source 1..39: mol_type = unassigned DNA
aatatcccagatcaaacttttattatctagctttatgtt

SEQ ID NO: 10231 - DNA, 39 bp, Homo sapiens
  source 1..39: mol_type = unassigned DNA
aacataaagctagataataaaagtttgatctgggatatt

SEQ ID NO: 10232 - RNA, 57 nt, Homo sapiens
  source 1..57: mol_type = unassigned RNA
agtaggaggatgctaagtttggttctctatctgtattgtgggtgagaggggctgttt

SEQ ID NO: 10233 - DNA, 57 bp, Homo sapiens
  source 1..57: mol_type = unassigned DNA
agtaggaggatgctaagtttggttctctatctgtattgtgggtgagaggggctgttt

SEQ ID NO: 10234 - DNA, 57 bp, Homo sapiens
  source 1..57: mol_type = unassigned DNA
aaacagcccctctcacccacaatacagatagagaaccaaacttagcatcctcctact

SEQ ID NO: 10235 - RNA, 28 nt, Homo sapiens
  source 1..28: mol_type = unassigned RNA
gtttcatatgactgacagccagagttgg

SEQ ID NO: 10236 - DNA, 28 bp, Homo sapiens
  source 1..28: mol_type = unassigned DNA
gtttcatatgactgacagccagagttgg

SEQ ID NO: 10237 - DNA, 28 bp, Homo sapiens
  source 1..28: mol_type = unassigned DNA
ccaactctggctgtcagtcatatgaaac

SEQ ID NO: 10238 - RNA, 53 nt, Homo sapiens
  source 1..53: mol_type = unassigned RNA
tctctactatgaattgaaagtcttcggtatctctctggaggtgggtgttagaa

SEQ ID NO: 10239 - DNA, 53 bp, Homo sapiens
  source 1..53: mol_type = unassigned DNA
tctctactatgaattgaaagtcttcggtatctctctggaggtgggtgttagaa

SEQ ID NO: 10240 - DNA, 53 bp, Homo sapiens
  source 1..53: mol_type = unassigned DNA
ttctaacacccacctccagagagataccgaagactttcaattcatagtagaga

SEQ ID NO: 10241 - RNA, 23 nt, Homo sapiens
  source 1..23: mol_type = unassigned RNA
tgagctgttatttagctgtatgg

SEQ ID NO: 10242 - DNA, 23 bp, Homo sapiens
  source 1..23: mol_type = unassigned DNA
tgagctgttatttagctgtatgg

SEQ ID NO: 10243 - DNA, 23 bp, Homo sapiens
  source 1..23: mol_type = unassigned DNA
ccatacagctaaataacagctca

SEQ ID NO: 10244 - RNA, 51 nt, Homo sapiens
  source 1..51: mol_type = unassigned RNA
ctctatggctagctagctgaatgccctgccacttaattttaagtctcagta

SEQ ID NO: 10245 - DNA, 51 bp, Homo sapiens
  source 1..51: mol_type = unassigned DNA
ctctatggctagctagctgaatgccctgccacttaattttaagtctcagta

SEQ ID NO: 10246 - DNA, 51 bp, Homo sapiens
  source 1..51: mol_type = unassigned DNA
tactgagacttaaaattaagtggcagggcattcagctagctagccatagag

SEQ ID NO: 10247 - RNA, 62 nt, Homo sapiens
  source 1..62: mol_type = unassigned RNA
aagtacttctcagatctttgcagtttcctgtttttgacgtggaaatattgacacaagaaaag

SEQ ID NO: 10248 - DNA, 62 bp, Homo sapiens
  source 1..62: mol_type = unassigned DNA
aagtacttctcagatctttgcagtttcctgtttttgacgtggaaatattgacacaagaaaag

SEQ ID NO: 10249 - DNA, 62 bp, Homo sapiens
  source 1..62: mol_type = unassigned DNA
cttttcttgtgtcaatatttccacgtcaaaaacaggaaactgcaaagatctgagaagtactt

SEQ ID NO: 10250 - RNA, 30 nt, Homo sapiens
  source 1..30: mol_type = unassigned RNA
ttctttgttaatctagctgtcgctgtcaat

SEQ ID NO: 10251 - DNA, 30 bp, Homo sapiens
  source 1..30: mol_type = unassigned DNA
ttctttgttaatctagctgtcgctgtcaat

SEQ ID NO: 10252 - DNA, 30 bp, Homo sapiens
  source 1..30: mol_type = unassigned DNA
attgacagcgacagctagattaacaaagaa

SEQ ID NO: 10253 - RNA, 67 nt, Homo sapiens
  source 1..67: mol_type = unassigned RNA
gtcagcgtgatttgtaactgttgatgctgaccctgatcatctggctgaggtaatgtttgtctggttt

SEQ ID NO: 10254 - DNA, 67 bp, Homo sapiens
  source 1..67: mol_type = unassigned DNA
gtcagcgtgatttgtaactgttgatgctgaccctgatcatctggctgaggtaatgtttgtctggttt

SEQ ID NO: 10255 - DNA, 67 bp, Homo sapiens
  source 1..67: mol_type = unassigned DNA
aaaccagacaaacattacctcagccagatgatcagggtcagcatcaacagttacaaatcacgctgac

SEQ ID NO: 10256 - RNA, 39 nt, Homo sapiens
  source 1..39: mol_type = unassigned RNA
acttttggttgtttagctgtctgagttcttcttgcactg

SEQ ID NO: 10257 - DNA, 39 bp, Homo sapiens
  source 1..39: mol_type = unassigned DNA
acttttggttgtttagctgtctgagttcttcttgcactg

SEQ ID NO: 10258 - DNA, 39 bp, Homo sapiens
  source 1..39: mol_type = unassigned DNA
cagtgcaagaagaactcagacagctaaacaaccaaaagt

SEQ ID NO: 10259 - RNA, 46 nt, Homo sapiens
  source 1..46: mol_type = unassigned RNA
ccaactttacactctgtggtactctctctgtatgcattcacattgt

SEQ ID NO: 10260 - DNA, 46 bp, Homo sapiens
  source 1..46: mol_type = unassigned DNA
ccaactttacactctgtggtactctctctgtatgcattcacattgt

SEQ ID NO: 10261 - DNA, 46 bp, Homo sapiens
  source 1..46: mol_type = unassigned DNA
acaatgtgaatgcatacagagagagtaccacagagtgtaaagttgg

SEQ ID NO: 10262 - RNA, 38 nt, Homo sapiens
  source 1..38: mol_type = unassigned RNA
catggaatatacagatctttggttttctagttgtgttc

SEQ ID NO: 10263 - DNA, 38 bp, Homo sapiens
  source 1..38: mol_type = unassigned DNA
catggaatatacagatctttggttttctagttgtgttc

SEQ ID NO: 10264 - DNA, 38 bp, Homo sapiens
  source 1..38: mol_type = unassigned DNA
gaacacaactagaaaaccaaagatctgtatattccatg

SEQ ID NO: 10265 - RNA, 58 nt, Homo sapiens
  source 1..58: mol_type = unassigned RNA
tattgagtttgacactgatgttttgctgtttcacttattggtttatgctttttgctat

SEQ ID NO: 10266 - DNA, 58 bp, Homo sapiens
  source 1..58: mol_type = unassigned DNA
tattgagtttgacactgatgttttgctgtttcacttattggtttatgctttttgctat

SEQ ID NO: 10267 - DNA, 58 bp, Homo sapiens
  source 1..58: mol_type = unassigned DNA
atagcaaaaagcataaaccaataagtgaaacagcaaaacatcagtgtcaaactcaata

SEQ ID NO: 10268 - RNA, 33 nt, Homo sapiens
  source 1..33: mol_type = unassigned RNA
tgtgtttgatggctttcattgactgcataacaa

SEQ ID NO: 10269 - DNA, 33 bp, Homo sapiens
  source 1..33: mol_type = unassigned DNA
tgtgtttgatggctttcattgactgcataacaa

SEQ ID NO: 10270 - DNA, 33 bp, Homo sapiens
  source 1..33: mol_type = unassigned DNA
ttgttatgcagtcaatgaaagccatcaaacaca

SEQ ID NO: 10271 - RNA, 28 nt, Homo sapiens
  source 1..28: mol_type = unassigned RNA
attttgtcaatattccatgccttgccct

SEQ ID NO: 10272 - DNA, 28 bp, Homo sapiens
  source 1..28: mol_type = unassigned DNA
attttgtcaatattccatgccttgccct

SEQ ID NO: 10273 - DNA, 28 bp, Homo sapiens
  source 1..28: mol_type = unassigned DNA
agggcaaggcatggaatattgacaaaat

SEQ ID NO: 10274 - RNA, 54 nt, Homo sapiens
  source 1..54: mol_type = unassigned RNA
gggggaccccaaggagtcaggacagacccatctcctgcctatggggccccagcc

SEQ ID NO: 10275 - DNA, 54 bp, Homo sapiens
  source 1..54: mol_type = unassigned DNA
gggggaccccaaggagtcaggacagacccatctcctgcctatggggccccagcc

SEQ ID NO: 10276 - DNA, 54 bp, Homo sapiens
  source 1..54: mol_type = unassigned DNA
ggctggggccccataggcaggagatgggtctgtcctgactccttggggtccccc

SEQ ID NO: 10277 - RNA, 50 nt, Homo sapiens
  source 1..50: mol_type = unassigned RNA
ccctaaatgcctccggtagagaaaacctcagtgcgtcgtatgcttgtttc

SEQ ID NO: 10278 - DNA, 50 bp, Homo sapiens
  source 1..50: mol_type = unassigned DNA
ccctaaatgcctccggtagagaaaacctcagtgcgtcgtatgcttgtttc

SEQ ID NO: 10279 - DNA, 50 bp, Homo sapiens
  source 1..50: mol_type = unassigned DNA
gaaacaagcatacgacgcactgaggttttctctaccggaggcatttaggg

SEQ ID NO: 10280 - RNA, 28 nt, Homo sapiens
  source 1..28: mol_type = unassigned RNA
agcatgggtggtgttctaggacttgagg

SEQ ID NO: 10281 - DNA, 28 bp, Homo sapiens
  source 1..28: mol_type = unassigned DNA
agcatgggtggtgttctaggacttgagg

SEQ ID NO: 10282 - DNA, 28 bp, Homo sapiens
  source 1..28: mol_type = unassigned DNA
cctcaagtcctagaacaccacccatgct

SEQ ID NO: 10283 - RNA, 56 nt, Homo sapiens
  source 1..56: mol_type = unassigned RNA
aatcgaagagatggtagaaaatagcatgaatcgataatggttcaaaggttgctgag

SEQ ID NO: 10284 - DNA, 56 bp, Homo sapiens
  source 1..56: mol_type = unassigned DNA
aatcgaagagatggtagaaaatagcatgaatcgataatggttcaaaggttgctgag

SEQ ID NO: 10285 - DNA, 56 bp, Homo sapiens
  source 1..56: mol_type = unassigned DNA
ctcagcaacctttgaaccattatcgattcatgctattttctaccatctcttcgatt

SEQ ID NO: 10286 - RNA, 186 nt, Homo sapiens
  source 1..186: mol_type = unassigned RNA
ccagtgcctttggttgctggagggaagaacacaatggatctggtgctaaaaagatgccttcttcatttggctgtgataggtgctttgctggctgtgggggctacaaaaggtatgtgtggatatgtggacatgagcaggtgtgaacttggggatgaattccccctgctctggtttctgtcctcctaa

SEQ ID NO: 10287 - DNA, 186 bp, Homo sapiens
  source 1..186: mol_type = unassigned DNA
ccagtgcctttggttgctggagggaagaacacaatggatctggtgctaaaaagatgccttcttcatttggctgtgataggtgctttgctggctgtgggggctacaaaaggtatgtgtggatatgtggacatgagcaggtgtgaacttggggatgaattccccctgctctggtttctgtcctcctaa

SEQ ID NO: 10288 - DNA, 186 bp, Homo sapiens
  source 1..186: mol_type = unassigned DNA
ttaggaggacagaaaccagagcagggggaattcatccccaagttcacacctgctcatgtccacatatccacacataccttttgtagcccccacagccagcaaagcacctatcacagccaaatgaagaaggcatctttttagcaccagatccattgtgttcttccctccagcaaccaaaggcactgg

SEQ ID NO: 10289 - RNA, 32 nt, Homo sapiens
  source 1..32: mol_type = unassigned RNA
aagctgatatactggtgtgtaatgatggaaat

SEQ ID NO: 10290 - DNA, 32 bp, Homo sapiens
  source 1..32: mol_type = unassigned DNA
aagctgatatactggtgtgtaatgatggaaat

SEQ ID NO: 10291 - DNA, 32 bp, Homo sapiens
  source 1..32: mol_type = unassigned DNA
atttccatcattacacaccagtatatcagctt

SEQ ID NO: 10292 - RNA, 65 nt, Homo sapiens
  source 1..65: mol_type = unassigned RNA
aaaggggtgagggacagagtagtataagagcagaggttttgtatgctgttgaagataagctggta

SEQ ID NO: 10293 - DNA, 65 bp, Homo sapiens
  source 1..65: mol_type = unassigned DNA
aaaggggtgagggacagagtagtataagagcagaggttttgtatgctgttgaagataagctggta

SEQ ID NO: 10294 - DNA, 65 bp, Homo sapiens
  source 1..65: mol_type = unassigned DNA
taccagcttatcttcaacagcatacaaaacctctgctcttatactactctgtccctcaccccttt

SEQ ID NO: 10295 - RNA, 22 nt, Homo sapiens
  source 1..22: mol_type = unassigned RNA
gtttgttcgttctcacgtgcct

SEQ ID NO: 10296 - DNA, 22 bp, Homo sapiens
  source 1..22: mol_type = unassigned DNA
gtttgttcgttctcacgtgcct

SEQ ID NO: 10297 - DNA, 22 bp, Homo sapiens
  source 1..22: mol_type = unassigned DNA
aggcacgtgagaacgaacaaac

SEQ ID NO: 10298 - RNA, 29 nt, Homo sapiens
  source 1..29: mol_type = unassigned RNA
caaggataatgtcctttagttgtatttgt

SEQ ID NO: 10299 - DNA, 29 bp, Homo sapiens
  source 1..29: mol_type = unassigned DNA
caaggataatgtcctttagttgtatttgt

SEQ ID NO: 10300 - DNA, 29 bp, Homo sapiens
  source 1..29: mol_type = unassigned DNA
acaaatacaactaaaggacattatccttg

SEQ ID NO: 10301 - RNA, 45 nt, Homo sapiens
  source 1..45: mol_type = unassigned RNA
ctctccccacatgcagggcccagctcgactccttcaccccgacct

SEQ ID NO: 10302 - DNA, 45 bp, Homo sapiens
  source 1..45: mol_type = unassigned DNA
ctctccccacatgcagggcccagctcgactccttcaccccgacct

SEQ ID NO: 10303 - DNA, 45 bp, Homo sapiens
  source 1..45: mol_type = unassigned DNA
aggtcggggtgaaggagtcgagctgggccctgcatgtggggagag

SEQ ID NO: 10304 - RNA, 28 nt, Homo sapiens
  source 1..28: mol_type = unassigned RNA
actctgggatccaacctgacagaatgcc

SEQ ID NO: 10305 - DNA, 28 bp, Homo sapiens
  source 1..28: mol_type = unassigned DNA
actctgggatccaacctgacagaatgcc

SEQ ID NO: 10306 - DNA, 28 bp, Homo sapiens
  source 1..28: mol_type = unassigned DNA
ggcattctgtcaggttggatcccagagt

SEQ ID NO: 10307 - RNA, 29 nt, Homo sapiens
  source 1..29: mol_type = unassigned RNA
ccacagatatgggagtgagagcgaatgat

SEQ ID NO: 10308 - DNA, 29 bp, Homo sapiens
  source 1..29: mol_type = unassigned DNA
ccacagatatgggagtgagagcgaatgat

SEQ ID NO: 10309 - DNA, 29 bp, Homo sapiens
  source 1..29: mol_type = unassigned DNA
atcattcgctctcactcccatatctgtgg

SEQ ID NO: 10310 - RNA, 33 nt, Homo sapiens
  source 1..33: mol_type = unassigned RNA
caaaaggatatgggagtgagaactgagacaggc

SEQ ID NO: 10311 - DNA, 33 bp, Homo sapiens
  source 1..33: mol_type = unassigned DNA
caaaaggatatgggagtgagaactgagacaggc

SEQ ID NO: 10312 - DNA, 33 bp, Homo sapiens
  source 1..33: mol_type = unassigned DNA
gcctgtctcagttctcactcccatatccttttg

SEQ ID NO: 10313 - RNA, 41 nt, Homo sapiens
  source 1..41: mol_type = unassigned RNA
gcctgttcccaacactgtattagttcgttctcgcatgacta

SEQ ID NO: 10314 - DNA, 41 bp, Homo sapiens
  source 1..41: mol_type = unassigned DNA
gcctgttcccaacactgtattagttcgttctcgcatgacta

SEQ ID NO: 10315 - DNA, 41 bp, Homo sapiens
  source 1..41: mol_type = unassigned DNA
tagtcatgcgagaacgaactaatacagtgttgggaacaggc

SEQ ID NO: 10316 - RNA, 51 nt, Homo sapiens
  source 1..51: mol_type = unassigned RNA
tatcagtggctcttaaacatggctgcacattagaattgcctgaaaaggtgt

SEQ ID NO: 10317 - DNA, 51 bp, Homo sapiens
  source 1..51: mol_type = unassigned DNA
tatcagtggctcttaaacatggctgcacattagaattgcctgaaaaggtgt

SEQ ID NO: 10318 - DNA, 51 bp, Homo sapiens
  source 1..51: mol_type = unassigned DNA
acaccttttcaggcaattctaatgtgcagccatgtttaagagccactgata

SEQ ID NO: 10319 - RNA, 23 nt, Homo sapiens
  source 1..23: mol_type = unassigned RNA
gagcaatactcttcaacgtgcct

SEQ ID NO: 10320 - DNA, 23 bp, Homo sapiens
  source 1..23: mol_type = unassigned DNA
gagcaatactcttcaacgtgcct

SEQ ID NO: 10321 - DNA, 23 bp, Homo sapiens
  source 1..23: mol_type = unassigned DNA
aggcacgttgaagagtattgctc

SEQ ID NO: 10322 - RNA, 30 nt, Homo sapiens
  source 1..30: mol_type = unassigned RNA
aatggaccatttggactgtgttacgactac

SEQ ID NO: 10323 - DNA, 30 bp, Homo sapiens
  source 1..30: mol_type = unassigned DNA
aatggaccatttggactgtgttacgactac

SEQ ID NO: 10324 - DNA, 30 bp, Homo sapiens
  source 1..30: mol_type = unassigned DNA
gtagtcgtaacacagtccaaatggtccatt

SEQ ID NO: 10325 - RNA, 63 nt, Homo sapiens
  source 1..63: mol_type = unassigned RNA
tatggaccgagggtctgctccagctgagagccagcagaggggagaggcatcctcacttcttct

SEQ ID NO: 10326 - DNA, 63 bp, Homo sapiens
  source 1..63: mol_type = unassigned DNA
tatggaccgagggtctgctccagctgagagccagcagaggggagaggcatcctcacttcttct

SEQ ID NO: 10327 - DNA, 63 bp, Homo sapiens
  source 1..63: mol_type = unassigned DNA
agaagaagtgaggatgcctctcccctctgctggctctcagctggagcagaccctcggtccata

SEQ ID NO: 10328 - RNA, 33 nt, Homo sapiens
  source 1..33: mol_type = unassigned RNA
tatggtgggaacagaatctggcctcgccaggag

SEQ ID NO: 10329 - DNA, 33 bp, Homo sapiens
  source 1..33: mol_type = unassigned DNA
tatggtgggaacagaatctggcctcgccaggag

SEQ ID NO: 10330 - DNA, 33 bp, Homo sapiens
  source 1..33: mol_type = unassigned DNA
ctcctggcgaggccagattctgttcccaccata

SEQ ID NO: 10331 - RNA, 32 nt, Homo sapiens
  source 1..32: mol_type = unassigned RNA
ctgccttcgatagctcaagaccatgaggttca

SEQ ID NO: 10332 - DNA, 32 bp, Homo sapiens
  source 1..32: mol_type = unassigned DNA
ctgccttcgatagctcaagaccatgaggttca

SEQ ID NO: 10333 - DNA, 32 bp, Homo sapiens
  source 1..32: mol_type = unassigned DNA
tgaacctcatggtcttgagctatcgaaggcag

SEQ ID NO: 10334 - RNA, 24 nt, Homo sapiens
  source 1..24: mol_type = unassigned RNA
aaggtccatatgacttggacatgg

SEQ ID NO: 10335 - DNA, 24 bp, Homo sapiens
  source 1..24: mol_type = unassigned DNA
aaggtccatatgacttggacatgg

SEQ ID NO: 10336 - DNA, 24 bp, Homo sapiens
  source 1..24: mol_type = unassigned DNA
ccatgtccaagtcatatggacctt

SEQ ID NO: 10337 - RNA, 40 nt, Homo sapiens
  source 1..40: mol_type = unassigned RNA
tttctctgaattgcatttgatgtcaatatgacttggagat

SEQ ID NO: 10338 - DNA, 40 bp, Homo sapiens
  source 1..40: mol_type = unassigned DNA
tttctctgaattgcatttgatgtcaatatgacttggagat

SEQ ID NO: 10339 - DNA, 40 bp, Homo sapiens
  source 1..40: mol_type = unassigned DNA
atctccaagtcatattgacatcaaatgcaattcagagaaa

SEQ ID NO: 10340 - RNA, 31 nt, Homo sapiens
  source 1..31: mol_type = unassigned RNA
ccattttcaattgaccaggaaggagatattt

SEQ ID NO: 10341 - DNA, 31 bp, Homo sapiens
  source 1..31: mol_type = unassigned DNA
ccattttcaattgaccaggaaggagatattt

SEQ ID NO: 10342 - DNA, 31 bp, Homo sapiens
  source 1..31: mol_type = unassigned DNA
aaatatctccttcctggtcaattgaaaatgg

SEQ ID NO: 10343 - RNA, 118 nt, Homo sapiens
  source 1..118: mol_type = unassigned RNA
ttatcctgactgctgagatgagcagtttaccctaggaggacctgtgggactatgttttggtaaagaaaagttgagctgctctgtgggagtgaggttccaatgaagccaaatgtacaag

SEQ ID NO: 10344 - DNA, 118 bp, Homo sapiens
  source 1..118: mol_type = unassigned DNA
ttatcctgactgctgagatgagcagtttaccctaggaggacctgtgggactatgttttggtaaagaaaagttgagctgctctgtgggagtgaggttccaatgaagccaaatgtacaag

SEQ ID NO: 10345 - DNA, 118 bp, Homo sapiens
  source 1..118: mol_type = unassigned DNA
cttgtacatttggcttcattggaacctcactcccacagagcagctcaacttttctttaccaaaacatagtcccacaggtcctcctagggtaaactgctcatctcagcagtcaggataa

SEQ ID NO: 10346 - RNA, 58 nt, Homo sapiens
  source 1..58: mol_type = unassigned RNA
cccttagctggtcttggggtttaaacagcacctctctgtggaacatgtacacaccact

SEQ ID NO: 10347 - DNA, 58 bp, Homo sapiens
  source 1..58: mol_type = unassigned DNA
cccttagctggtcttggggtttaaacagcacctctctgtggaacatgtacacaccact

SEQ ID NO: 10348 - DNA, 58 bp, Homo sapiens
  source 1..58: mol_type = unassigned DNA
agtggtgtgtacatgttccacagagaggtgctgtttaaaccccaagaccagctaaggg

SEQ ID NO: 10349 - RNA, 138 nt, Homo sapiens
  source 1..138: mol_type = unassigned RNA
gttttagattctcccatgtgttgaagtcaaatctggtcatgccttcctctccactctctttttgtctgtctgactcaaactctggaggcacaaatccaacatgggtttttttctttttgggccagagagctgcatgct

SEQ ID NO: 10350 - DNA, 138 bp, Homo sapiens
  source 1..138: mol_type = unassigned DNA
gttttagattctcccatgtgttgaagtcaaatctggtcatgccttcctctccactctctttttgtctgtctgactcaaactctggaggcacaaatccaacatgggtttttttctttttgggccagagagctgcatgct

SEQ ID NO: 10351 - DNA, 138 bp, Homo sapiens
  source 1..138: mol_type = unassigned DNA
agcatgcagctctctggcccaaaaagaaaaaaacccatgttggatttgtgcctccagagtttgagtcagacagacaaaaagagagtggagaggaaggcatgaccagatttgacttcaacacatgggagaatctaaaac

SEQ ID NO: 10352 - RNA, 22 nt, Homo sapiens
  source 1..22: mol_type = unassigned RNA
atgccatatgttgacagccaga

SEQ ID NO: 10353 - DNA, 22 bp, Homo sapiens
  source 1..22: mol_type = unassigned DNA
atgccatatgttgacagccaga

SEQ ID NO: 10354 - DNA, 22 bp, Homo sapiens
  source 1..22: mol_type = unassigned DNA
tctggctgtcaacatatggcat

SEQ ID NO: 10355 - RNA, 24 nt, Homo sapiens
  source 1..24: mol_type = unassigned RNA
tataacatcacatccatgtgtaaa

SEQ ID NO: 10356 - DNA, 24 bp, Homo sapiens
  source 1..24: mol_type = unassigned DNA
tataacatcacatccatgtgtaaa

SEQ ID NO: 10357 - DNA, 24 bp, Homo sapiens
  source 1..24: mol_type = unassigned DNA
tttacacatggatgtgatgttata

SEQ ID NO: 10358 - RNA, 73 nt, Homo sapiens
  source 1..73: mol_type = unassigned RNA
ccccacagggctatgtcttctctgagactgttctgacacttagaaaacagataacagcccctccatgtgggct

SEQ ID NO: 10359 - DNA, 73 bp, Homo sapiens
  source 1..73: mol_type = unassigned DNA
ccccacagggctatgtcttctctgagactgttctgacacttagaaaacagataacagcccctccatgtgggct

SEQ ID NO: 10360 - DNA, 73 bp, Homo sapiens
  source 1..73: mol_type = unassigned DNA
agcccacatggaggggctgttatctgttttctaagtgtcagaacagtctcagagaagacatagccctgtgggg

SEQ ID NO: 10361 - RNA, 42 nt, Homo sapiens
  source 1..42: mol_type = unassigned RNA
gtgcacacctgagagattccatgtgaactcacttttcacaaa

SEQ ID NO: 10362 - DNA, 42 bp, Homo sapiens
  source 1..42: mol_type = unassigned DNA
gtgcacacctgagagattccatgtgaactcacttttcacaaa

SEQ ID NO: 10363 - DNA, 42 bp, Homo sapiens
  source 1..42: mol_type = unassigned DNA
tttgtgaaaagtgagttcacatggaatctctcaggtgtgcac

SEQ ID NO: 10364 - RNA, 29 nt, Homo sapiens
  source 1..29: mol_type = unassigned RNA
ttctacagtagccccagatcaccggacac

SEQ ID NO: 10365 - DNA, 29 bp, Homo sapiens
  source 1..29: mol_type = unassigned DNA
ttctacagtagccccagatcaccggacac

SEQ ID NO: 10366 - DNA, 29 bp, Homo sapiens
  source 1..29: mol_type = unassigned DNA
gtgtccggtgatctggggctactgtagaa

SEQ ID NO: 10367 - RNA, 22 nt, Homo sapiens
  source 1..22: mol_type = unassigned RNA
ctttcacatgttgaaacaggcc

SEQ ID NO: 10368 - DNA, 22 bp, Homo sapiens
  source 1..22: mol_type = unassigned DNA
ctttcacatgttgaaacaggcc

SEQ ID NO: 10369 - DNA, 22 bp, Homo sapiens
  source 1..22: mol_type = unassigned DNA
ggcctgtttcaacatgtgaaag

SEQ ID NO: 10370 - RNA, 29 nt, Homo sapiens
  source 1..29: mol_type = unassigned RNA
ttacctcccccggaccctctgagcctcct

SEQ ID NO: 10371 - DNA, 29 bp, Homo sapiens
  source 1..29: mol_type = unassigned DNA
ttacctcccccggaccctctgagcctcct

SEQ ID NO: 10372 - DNA, 29 bp, Homo sapiens
  source 1..29: mol_type = unassigned DNA
aggaggctcagagggtccgggggaggtaa

SEQ ID NO: 10373 - RNA, 46 nt, Homo sapiens
  source 1..46: mol_type = unassigned RNA
cttggtgagtatctctatgatctcaagaagtaaagtttcttaacaa

SEQ ID NO: 10374 - DNA, 46 bp, Homo sapiens
  source 1..46: mol_type = unassigned DNA
cttggtgagtatctctatgatctcaagaagtaaagtttcttaacaa

SEQ ID NO: 10375 - DNA, 46 bp, Homo sapiens
  source 1..46: mol_type = unassigned DNA
ttgttaagaaactttacttcttgagatcatagagatactcaccaag

SEQ ID NO: 10376 - RNA, 33 nt, Homo sapiens
  source 1..33: mol_type = unassigned RNA
cagatttgcagatcaaggagaacccaggagttt

SEQ ID NO: 10377 - DNA, 33 bp, Homo sapiens
  source 1..33: mol_type = unassigned DNA
cagatttgcagatcaaggagaacccaggagttt

SEQ ID NO: 10378 - DNA, 33 bp, Homo sapiens
  source 1..33: mol_type = unassigned DNA
aaactcctgggttctccttgatctgcaaatctg

SEQ ID NO: 10379 - RNA, 30 nt, Homo sapiens
  source 1..30: mol_type = unassigned RNA
taatgaagacaaggtctgtagaatgaagag

SEQ ID NO: 10380 - DNA, 30 bp, Homo sapiens
  source 1..30: mol_type = unassigned DNA
taatgaagacaaggtctgtagaatgaagag

SEQ ID NO: 10381 - DNA, 30 bp, Homo sapiens
  source 1..30: mol_type = unassigned DNA
ctcttcattctacagaccttgtcttcatta

SEQ ID NO: 10382 - RNA, 28 nt, Homo sapiens
  source 1..28: mol_type = unassigned RNA
gccctcagattgtcggcttccgccctct

SEQ ID NO: 10383 - DNA, 28 bp, Homo sapiens
  source 1..28: mol_type = unassigned DNA
gccctcagattgtcggcttccgccctct

SEQ ID NO: 10384 - DNA, 28 bp, Homo sapiens
  source 1..28: mol_type = unassigned DNA
agagggcggaagccgacaatctgagggc

SEQ ID NO: 10385 - RNA, 71 nt, Homo sapiens
  source 1..71: mol_type = unassigned RNA
ccgtttccaggcattgctgtgtgacccattttgcacatggtttgattccagatcggaggccctgtttttcc

SEQ ID NO: 10386 - DNA, 71 bp, Homo sapiens
  source 1..71: mol_type = unassigned DNA
ccgtttccaggcattgctgtgtgacccattttgcacatggtttgattccagatcggaggccctgtttttcc

SEQ ID NO: 10387 - DNA, 71 bp, Homo sapiens
  source 1..71: mol_type = unassigned DNA
ggaaaaacagggcctccgatctggaatcaaaccatgtgcaaaatgggtcacacagcaatgcctggaaacgg

SEQ ID NO: 10388 - RNA, 45 nt, Homo sapiens
  source 1..45: mol_type = unassigned RNA
agttagtgtgtgggtttgtaggcccagggttaaaagggtgataga

SEQ ID NO: 10389 - DNA, 45 bp, Homo sapiens
  source 1..45: mol_type = unassigned DNA
agttagtgtgtgggtttgtaggcccagggttaaaagggtgataga

SEQ ID NO: 10390 - DNA, 45 bp, Homo sapiens
  source 1..45: mol_type = unassigned DNA
tctatcacccttttaaccctgggcctacaaacccacacactaact

SEQ ID NO: 10391 - RNA, 42 nt, Homo sapiens
  source 1..42: mol_type = unassigned RNA
ttcccatttggcctttgctggcatgggtggggttgggaccac

SEQ ID NO: 10392 - DNA, 42 bp, Homo sapiens
  source 1..42: mol_type = unassigned DNA
ttcccatttggcctttgctggcatgggtggggttgggaccac

SEQ ID NO: 10393 - DNA, 42 bp, Homo sapiens
  source 1..42: mol_type = unassigned DNA
gtggtcccaaccccacccatgccagcaaaggccaaatgggaa

SEQ ID NO: 10394 - RNA, 39 nt, Homo sapiens
  source 1..39: mol_type = unassigned RNA
tttttttttttcgttcgggtctcactctgtctgctgtgg

SEQ ID NO: 10395 - DNA, 39 bp, Homo sapiens
  source 1..39: mol_type = unassigned DNA
tttttttttttcgttcgggtctcactctgtctgctgtgg

SEQ ID NO: 10396 - DNA, 39 bp, Homo sapiens
  source 1..39: mol_type = unassigned DNA
ccacagcagacagagtgagacccgaacgaaaaaaaaaaa

SEQ ID NO: 10397 - RNA, 38 nt, Homo sapiens
  source 1..38: mol_type = unassigned RNA
ggaagcaactctggcatgttgacacaggtaagaaggta

SEQ ID NO: 10398 - DNA, 38 bp, Homo sapiens
  source 1..38: mol_type = unassigned DNA
ggaagcaactctggcatgttgacacaggtaagaaggta

SEQ ID NO: 10399 - DNA, 38 bp, Homo sapiens
  source 1..38: mol_type = unassigned DNA
taccttcttacctgtgtcaacatgccagagttgcttcc

SEQ ID NO: 10400 - RNA, 129 nt, Homo sapiens
  source 1..129: mol_type = unassigned RNA
atgtatttttcaaaatagttacttattttgtacacctctaaagggaacatctgataagaaaagcccaggactgtaggtctgtggacataaggcatgatcttctggcattagatacctcagctcagattt

SEQ ID NO: 10401 - DNA, 129 bp, Homo sapiens
  source 1..129: mol_type = unassigned DNA
atgtatttttcaaaatagttacttattttgtacacctctaaagggaacatctgataagaaaagcccaggactgtaggtctgtggacataaggcatgatcttctggcattagatacctcagctcagattt

SEQ ID NO: 10402 - DNA, 129 bp, Homo sapiens
  source 1..129: mol_type = unassigned DNA
aaatctgagctgaggtatctaatgccagaagatcatgccttatgtccacagacctacagtcctgggcttttcttatcagatgttccctttagaggtgtacaaaataagtaactattttgaaaaatacat

SEQ ID NO: 10403 - RNA, 28 nt, Homo sapiens
  source 1..28: mol_type = unassigned RNA
gatctttgacaaagttgacacaggcaat

SEQ ID NO: 10404 - DNA, 28 bp, Homo sapiens
  source 1..28: mol_type = unassigned DNA
gatctttgacaaagttgacacaggcaat

SEQ ID NO: 10405 - DNA, 28 bp, Homo sapiens
  source 1..28: mol_type = unassigned DNA
attgcctgtgtcaactttgtcaaagatc

SEQ ID NO: 10406 - RNA, 41 nt, Homo sapiens
  source 1..41: mol_type = unassigned RNA
tgtgtttcgaaagaaaaattggccgtttagctcaactgaga

SEQ ID NO: 10407 - DNA, 41 bp, Homo sapiens
  source 1..41: mol_type = unassigned DNA
tgtgtttcgaaagaaaaattggccgtttagctcaactgaga

SEQ ID NO: 10408 - DNA, 41 bp, Homo sapiens
  source 1..41: mol_type = unassigned DNA
tctcagttgagctaaacggccaatttttctttcgaaacaca

SEQ ID NO: 10409 - RNA, 31 nt, Homo sapiens
  source 1..31: mol_type = unassigned RNA
taatatgcgcggttgtgtggtcttacatgga

SEQ ID NO: 10410 - DNA, 31 bp, Homo sapiens
  source 1..31: mol_type = unassigned DNA
taatatgcgcggttgtgtggtcttacatgga

SEQ ID NO: 10411 - DNA, 31 bp, Homo sapiens
  source 1..31: mol_type = unassigned DNA
tccatgtaagaccacacaaccgcgcatatta

SEQ ID NO: 10412 - RNA, 42 nt, Homo sapiens
  source 1..42: mol_type = unassigned RNA
ggttggggctgacttaaatggctggaaaccagaagcttttga

SEQ ID NO: 10413 - DNA, 42 bp, Homo sapiens
  source 1..42: mol_type = unassigned DNA
ggttggggctgacttaaatggctggaaaccagaagcttttga

SEQ ID NO: 10414 - DNA, 42 bp, Homo sapiens
  source 1..42: mol_type = unassigned DNA
tcaaaagcttctggtttccagccatttaagtcagccccaacc

SEQ ID NO: 10415 - RNA, 43 nt, Homo sapiens
  source 1..43: mol_type = unassigned RNA
gcatggtgaggttctggtgaggttcttctgggttgctgactgc

SEQ ID NO: 10416 - DNA, 43 bp, Homo sapiens
  source 1..43: mol_type = unassigned DNA
gcatggtgaggttctggtgaggttcttctgggttgctgactgc

SEQ ID NO: 10417 - DNA, 43 bp, Homo sapiens
  source 1..43: mol_type = unassigned DNA
gcagtcagcaacccagaagaacctcaccagaacctcaccatgc

SEQ ID NO: 10418 - RNA, 31 nt, Homo sapiens
  source 1..31: mol_type = unassigned RNA
gcaccaacaccacctccgacgactgcattct

SEQ ID NO: 10419 - DNA, 31 bp, Homo sapiens
  source 1..31: mol_type = unassigned DNA
gcaccaacaccacctccgacgactgcattct

SEQ ID NO: 10420 - DNA, 31 bp, Homo sapiens
  source 1..31: mol_type = unassigned DNA
agaatgcagtcgtcggaggtggtgttggtgc

SEQ ID NO: 10421 - RNA, 50 nt, Homo sapiens
  source 1..50: mol_type = unassigned RNA
cgtttccctgatgtctagtaatgttgaccatatcttttcatgcgcgtatt

SEQ ID NO: 10422 - DNA, 50 bp, Homo sapiens
  source 1..50: mol_type = unassigned DNA
cgtttccctgatgtctagtaatgttgaccatatcttttcatgcgcgtatt

SEQ ID NO: 10423 - DNA, 50 bp, Homo sapiens
  source 1..50: mol_type = unassigned DNA
aatacgcgcatgaaaagatatggtcaacattactagacatcagggaaacg

SEQ ID NO: 10424 - RNA, 36 nt, Homo sapiens
  source 1..36: mol_type = unassigned RNA
attctttgttttgtttcccagatttcaggaaacatt

SEQ ID NO: 10425 - DNA, 36 bp, Homo sapiens
  source 1..36: mol_type = unassigned DNA
attctttgttttgtttcccagatttcaggaaacatt

SEQ ID NO: 10426 - DNA, 36 bp, Homo sapiens
  source 1..36: mol_type = unassigned DNA
aatgtttcctgaaatctgggaaacaaaacaaagaat

SEQ ID NO: 10427 - RNA, 43 nt, Homo sapiens
  source 1..43: mol_type = unassigned RNA
gcaaaaatggttatctctgaacactgataatgagaggtgggcc

SEQ ID NO: 10428 - DNA, 43 bp, Homo sapiens
  source 1..43: mol_type = unassigned DNA
gcaaaaatggttatctctgaacactgataatgagaggtgggcc

SEQ ID NO: 10429 - DNA, 43 bp, Homo sapiens
  source 1..43: mol_type = unassigned DNA
ggcccacctctcattatcagtgttcagagataaccatttttgc

SEQ ID NO: 10430 - RNA, 32 nt, Homo sapiens
  source 1..32: mol_type = unassigned RNA
gacacagaagcataggaatgtgatataatgga

SEQ ID NO: 10431 - DNA, 32 bp, Homo sapiens
  source 1..32: mol_type = unassigned DNA
gacacagaagcataggaatgtgatataatgga

SEQ ID NO: 10432 - DNA, 32 bp, Homo sapiens
  source 1..32: mol_type = unassigned DNA
tccattatatcacattcctatgcttctgtgtc

SEQ ID NO: 10433 - RNA, 29 nt, Homo sapiens
  source 1..29: mol_type = unassigned RNA
agattcttaaccagacccaggatggcgcc

SEQ ID NO: 10434 - DNA, 29 bp, Homo sapiens
  source 1..29: mol_type = unassigned DNA
agattcttaaccagacccaggatggcgcc

SEQ ID NO: 10435 - DNA, 29 bp, Homo sapiens
  source 1..29: mol_type = unassigned DNA
ggcgccatcctgggtctggttaagaatct

SEQ ID NO: 10436 - RNA, 31 nt, Homo sapiens
  source 1..31: mol_type = unassigned RNA
aatgagatcatccggcctgtagccaacgtgt

SEQ ID NO: 10437 - DNA, 31 bp, Homo sapiens
  source 1..31: mol_type = unassigned DNA
aatgagatcatccggcctgtagccaacgtgt

SEQ ID NO: 10438 - DNA, 31 bp, Homo sapiens
  source 1..31: mol_type = unassigned DNA
acacgttggctacaggccggatgatctcatt

SEQ ID NO: 10439 - RNA, 54 nt, Homo sapiens
  source 1..54: mol_type = unassigned RNA
acaccgaaactgaacagcgaagccccgtggcccctctccctcccacacccttcc

SEQ ID NO: 10440 - DNA, 54 bp, Homo sapiens
  source 1..54: mol_type = unassigned DNA
acaccgaaactgaacagcgaagccccgtggcccctctccctcccacacccttcc

SEQ ID NO: 10441 - DNA, 54 bp, Homo sapiens
  source 1..54: mol_type = unassigned DNA
ggaagggtgtgggagggagaggggccacggggcttcgctgttcagtttcggtgt

SEQ ID NO: 10442 - RNA, 59 nt, Homo sapiens
  source 1..59: mol_type = unassigned RNA
attctgaagtactggttggtctacagccataccaccccacacacacccgatctcatctg

SEQ ID NO: 10443 - DNA, 59 bp, Homo sapiens
  source 1..59: mol_type = unassigned DNA
attctgaagtactggttggtctacagccataccaccccacacacacccgatctcatctg

SEQ ID NO: 10444 - DNA, 59 bp, Homo sapiens
  source 1..59: mol_type = unassigned DNA
cagatgagatcgggtgtgtgtggggtggtatggctgtagaccaaccagtacttcagaat

SEQ ID NO: 10445 - RNA, 29 nt, Homo sapiens
  source 1..29: mol_type = unassigned RNA
ctaaactacaggattgtggagcaaactcc

SEQ ID NO: 10446 - DNA, 29 bp, Homo sapiens
  source 1..29: mol_type = unassigned DNA
ctaaactacaggattgtggagcaaactcc

SEQ ID NO: 10447 - DNA, 29 bp, Homo sapiens
  source 1..29: mol_type = unassigned DNA
ggagtttgctccacaatcctgtagtttag

SEQ ID NO: 10448 - RNA, 25 nt, Homo sapiens
  source 1..25: mol_type = unassigned RNA
atatttaaggggtagtgggagagat

SEQ ID NO: 10449 - DNA, 25 bp, Homo sapiens
  source 1..25: mol_type = unassigned DNA
atatttaaggggtagtgggagagat

SEQ ID NO: 10450 - DNA, 25 bp, Homo sapiens
  source 1..25: mol_type = unassigned DNA
atctctcccactaccccttaaatat

SEQ ID NO: 10451 - RNA, 29 nt, Homo sapiens
  source 1..29: mol_type = unassigned RNA
tgcttggtcctgactgccttttgaatctc

SEQ ID NO: 10452 - DNA, 29 bp, Homo sapiens
  source 1..29: mol_type = unassigned DNA
tgcttggtcctgactgccttttgaatctc

SEQ ID NO: 10453 - DNA, 29 bp, Homo sapiens
  source 1..29: mol_type = unassigned DNA
gagattcaaaaggcagtcaggaccaagca

SEQ ID NO: 10454 - RNA, 31 nt, Homo sapiens
  source 1..31: mol_type = unassigned RNA
tgcgacctgtgtgatactttgtaatttatct

SEQ ID NO: 10455 - DNA, 31 bp, Homo sapiens
  source 1..31: mol_type = unassigned DNA
tgcgacctgtgtgatactttgtaatttatct

SEQ ID NO: 10456 - DNA, 31 bp, Homo sapiens
  source 1..31: mol_type = unassigned DNA
agataaattacaaagtatcacacaggtcgca

SEQ ID NO: 10457 - RNA, 43 nt, Homo sapiens
  source 1..43: mol_type = unassigned RNA
cccagaggatctgggcaatggtcaaggcctctcatgggcacca

SEQ ID NO: 10458 - DNA, 43 bp, Homo sapiens
  source 1..43: mol_type = unassigned DNA
cccagaggatctgggcaatggtcaaggcctctcatgggcacca

SEQ ID NO: 10459 - DNA, 43 bp, Homo sapiens
  source 1..43: mol_type = unassigned DNA
tggtgcccatgagaggccttgaccattgcccagatcctctggg

SEQ ID NO: 10460 - RNA, 34 nt, Homo sapiens
  source 1..34: mol_type = unassigned RNA
taatatatctgaaggctgttgaagaagatgctaa

SEQ ID NO: 10461 - DNA, 34 bp, Homo sapiens
  source 1..34: mol_type = unassigned DNA
taatatatctgaaggctgttgaagaagatgctaa

SEQ ID NO: 10462 - DNA, 34 bp, Homo sapiens
  source 1..34: mol_type = unassigned DNA
ttagcatcttcttcaacagccttcagatatatta

SEQ ID NO: 10463 - RNA, 69 nt, Homo sapiens
  source 1..69: mol_type = unassigned RNA
catttcaggtgagctcaaagggtcctgtttggtaatctcgctgttgaaaatacagacctgtgccttaga

SEQ ID NO: 10464 - DNA, 69 bp, Homo sapiens
  source 1..69: mol_type = unassigned DNA
catttcaggtgagctcaaagggtcctgtttggtaatctcgctgttgaaaatacagacctgtgccttaga

SEQ ID NO: 10465 - DNA, 69 bp, Homo sapiens
  source 1..69: mol_type = unassigned DNA
tctaaggcacaggtctgtattttcaacagcgagattaccaaacaggaccctttgagctcacctgaaatg

SEQ ID NO: 10466 - RNA, 88 nt, Homo sapiens
  source 1..88: mol_type = unassigned RNA
ccaaacaccctctcccgcccgagactatgaatggacatcagctttgtcagtcattggtacaacgccgaagccagggccttcgcctttt

SEQ ID NO: 10467 - DNA, 88 bp, Homo sapiens
  source 1..88: mol_type = unassigned DNA
ccaaacaccctctcccgcccgagactatgaatggacatcagctttgtcagtcattggtacaacgccgaagccagggccttcgcctttt

SEQ ID NO: 10468 - DNA, 88 bp, Homo sapiens
  source 1..88: mol_type = unassigned DNA
aaaaggcgaaggccctggcttcggcgttgtaccaatgactgacaaagctgatgtccattcatagtctcgggcgggagagggtgtttgg

SEQ ID NO: 10469 - RNA, 51 nt, Homo sapiens
  source 1..51: mol_type = unassigned RNA
gcactgatgatgctctctgaaggctggaggaagagcagtaaaggtaaagca

SEQ ID NO: 10470 - DNA, 51 bp, Homo sapiens
  source 1..51: mol_type = unassigned DNA
gcactgatgatgctctctgaaggctggaggaagagcagtaaaggtaaagca

SEQ ID NO: 10471 - DNA, 51 bp, Homo sapiens
  source 1..51: mol_type = unassigned DNA
tgctttacctttactgctcttcctccagccttcagagagcatcatcagtgc

SEQ ID NO: 10472 - RNA, 78 nt, Homo sapiens
  source 1..78: mol_type = unassigned RNA
gggctttgacatgttgaccaggctggtcttgaactactgacctcaagcgatctgcccaccccggcctcccaaagtgct

SEQ ID NO: 10473 - DNA, 78 bp, Homo sapiens
  source 1..78: mol_type = unassigned DNA
gggctttgacatgttgaccaggctggtcttgaactactgacctcaagcgatctgcccaccccggcctcccaaagtgct

SEQ ID NO: 10474 - DNA, 78 bp, Homo sapiens
  source 1..78: mol_type = unassigned DNA
agcactttgggaggccggggtgggcagatcgcttgaggtcagtagttcaagaccagcctggtcaacatgtcaaagccc

SEQ ID NO: 10475 - RNA, 90 nt, Homo sapiens
  source 1..90: mol_type = unassigned RNA
agaaaagttaagtgatttgccagtctgggaaggtgatgaactgggtttgaacacagatcacagatcctctgactaaatctcatgcctttt

SEQ ID NO: 10476 - DNA, 90 bp, Homo sapiens
  source 1..90: mol_type = unassigned DNA
agaaaagttaagtgatttgccagtctgggaaggtgatgaactgggtttgaacacagatcacagatcctctgactaaatctcatgcctttt

SEQ ID NO: 10477 - DNA, 90 bp, Homo sapiens
  source 1..90: mol_type = unassigned DNA
aaaaggcatgagatttagtcagaggatctgtgatctgtgttcaaacccagttcatcaccttcccagactggcaaatcacttaacttttct

SEQ ID NO: 10478 - RNA, 43 nt, Homo sapiens
  source 1..43: mol_type = unassigned RNA
atttgtcttccgtactgtgaacagacacagtctcttgcctgga

SEQ ID NO: 10479 - DNA, 43 bp, Homo sapiens
  source 1..43: mol_type = unassigned DNA
atttgtcttccgtactgtgaacagacacagtctcttgcctgga

SEQ ID NO: 10480 - DNA, 43 bp, Homo sapiens
  source 1..43: mol_type = unassigned DNA
tccaggcaagagactgtgtctgttcacagtacggaagacaaat

SEQ ID NO: 10481 - RNA, 44 nt, Homo sapiens
  source 1..44: mol_type = unassigned RNA
tatagatggagcacttgaccatgcaactagaaaactgtatcatg

SEQ ID NO: 10482 - DNA, 44 bp, Homo sapiens
  source 1..44: mol_type = unassigned DNA
tatagatggagcacttgaccatgcaactagaaaactgtatcatg

SEQ ID NO: 10483 - DNA, 44 bp, Homo sapiens
  source 1..44: mol_type = unassigned DNA
catgatacagttttctagttgcatggtcaagtgctccatctata

SEQ ID NO: 10484 - RNA, 61 nt, Homo sapiens
  source 1..61: mol_type = unassigned RNA
gggatggggcactggccgttgcaggactgtatgcactctttgtacatgttgatacaggcag

SEQ ID NO: 10485 - DNA, 61 bp, Homo sapiens
  source 1..61: mol_type = unassigned DNA
gggatggggcactggccgttgcaggactgtatgcactctttgtacatgttgatacaggcag

SEQ ID NO: 10486 - DNA, 61 bp, Homo sapiens
  source 1..61: mol_type = unassigned DNA
ctgcctgtatcaacatgtacaaagagtgcatacagtcctgcaacggccagtgccccatccc

SEQ ID NO: 10487 - RNA, 102 nt, Homo sapiens
  source 1..102: mol_type = unassigned RNA
agagaccaaaacaaaaacaggcagagatagaacggacagtagacaaaagagagagagaccgaggcagagatagagaaaaaaaggcccagagagagtcccctc

SEQ ID NO: 10488 - DNA, 102 bp, Homo sapiens
  source 1..102: mol_type = unassigned DNA
agagaccaaaacaaaaacaggcagagatagaacggacagtagacaaaagagagagagaccgaggcagagatagagaaaaaaaggcccagagagagtcccctc

SEQ ID NO: 10489 - DNA, 102 bp, Homo sapiens
  source 1..102: mol_type = unassigned DNA
gaggggactctctctgggcctttttttctctatctctgcctcggtctctctctcttttgtctactgtccgttctatctctgcctgtttttgttttggtctct

SEQ ID NO: 10490 - RNA, 30 nt, Homo sapiens
  source 1..30: mol_type = unassigned RNA
ctccacacccagcatcatcaggaccacagg

SEQ ID NO: 10491 - DNA, 30 bp, Homo sapiens
  source 1..30: mol_type = unassigned DNA
ctccacacccagcatcatcaggaccacagg

SEQ ID NO: 10492 - DNA, 30 bp, Homo sapiens
  source 1..30: mol_type = unassigned DNA
cctgtggtcctgatgatgctgggtgtggag

SEQ ID NO: 10493 - RNA, 26 nt, Homo sapiens
  source 1..26: mol_type = unassigned RNA
aaatggaagacactaaggacttaaat

SEQ ID NO: 10494 - DNA, 26 bp, Homo sapiens
  source 1..26: mol_type = unassigned DNA
aaatggaagacactaaggacttaaat

SEQ ID NO: 10495 - DNA, 26 bp, Homo sapiens
  source 1..26: mol_type = unassigned DNA
atttaagtccttagtgtcttccattt

SEQ ID NO: 10496 - RNA, 22 nt, Homo sapiens
  source 1..22: mol_type = unassigned RNA
acttggtgagtatagggatggc

SEQ ID NO: 10497 - DNA, 22 bp, Homo sapiens
  source 1..22: mol_type = unassigned DNA
acttggtgagtatagggatggc

SEQ ID NO: 10498 - DNA, 22 bp, Homo sapiens
  source 1..22: mol_type = unassigned DNA
gccatccctatactcaccaagt

SEQ ID NO: 10499 - RNA, 23 nt, Homo sapiens
  source 1..23: mol_type = unassigned RNA
tctaatggcttttccagtatccc

SEQ ID NO: 10500 - DNA, 23 bp, Homo sapiens
  source 1..23: mol_type = unassigned DNA
tctaatggcttttccagtatccc

SEQ ID NO: 10501 - DNA, 23 bp, Homo sapiens
  source 1..23: mol_type = unassigned DNA
gggatactggaaaagccattaga

SEQ ID NO: 10502 - RNA, 32 nt, Homo sapiens
  source 1..32: mol_type = unassigned RNA
gcaagtcctacctgttacgcaattttttatct

SEQ ID NO: 10503 - DNA, 32 bp, Homo sapiens
  source 1..32: mol_type = unassigned DNA
gcaagtcctacctgttacgcaattttttatct

SEQ ID NO: 10504 - DNA, 32 bp, Homo sapiens
  source 1..32: mol_type = unassigned DNA
agataaaaaattgcgtaacaggtaggacttgc

SEQ ID NO: 10505 - RNA, 29 nt, Homo sapiens
  source 1..29: mol_type = unassigned RNA
ttctacagcacctcacatgtggttctaac

SEQ ID NO: 10506 - DNA, 29 bp, Homo sapiens
  source 1..29: mol_type = unassigned DNA
ttctacagcacctcacatgtggttctaac

SEQ ID NO: 10507 - DNA, 29 bp, Homo sapiens
  source 1..29: mol_type = unassigned DNA
gttagaaccacatgtgaggtgctgtagaa

SEQ ID NO: 10508 - RNA, 59 nt, Homo sapiens
  source 1..59: mol_type = unassigned RNA
aaggcaggtggcttttggagagacagtgcttccagttgcaggtagaaggctgttcattt

SEQ ID NO: 10509 - DNA, 59 bp, Homo sapiens
  source 1..59: mol_type = unassigned DNA
aaggcaggtggcttttggagagacagtgcttccagttgcaggtagaaggctgttcattt

SEQ ID NO: 10510 - DNA, 59 bp, Homo sapiens
  source 1..59: mol_type = unassigned DNA
aaatgaacagccttctacctgcaactggaagcactgtctctccaaaagccacctgcctt

SEQ ID NO: 10511 - RNA, 52 nt, Homo sapiens
  source 1..52: mol_type = unassigned RNA
cgtggtgtcacagtgactgcatggaagcgtggtgtcgtgatgattgcatgga

SEQ ID NO: 10512 - DNA, 52 bp, Homo sapiens
  source 1..52: mol_type = unassigned DNA
cgtggtgtcacagtgactgcatggaagcgtggtgtcgtgatgattgcatgga

SEQ ID NO: 10513 - DNA, 52 bp, Homo sapiens
  source 1..52: mol_type = unassigned DNA
tccatgcaatcatcacgacaccacgcttccatgcagtcactgtgacaccacg

SEQ ID NO: 10514 - RNA, 32 nt, Homo sapiens
  source 1..32: mol_type = unassigned RNA
gcttagagtgggacctgaatgtgcggctgcat

SEQ ID NO: 10515 - DNA, 32 bp, Homo sapiens
  source 1..32: mol_type = unassigned DNA
gcttagagtgggacctgaatgtgcggctgcat

SEQ ID NO: 10516 - DNA, 32 bp, Homo sapiens
  source 1..32: mol_type = unassigned DNA
atgcagccgcacattcaggtcccactctaagc

SEQ ID NO: 10517 - RNA, 25 nt, Homo sapiens
  source 1..25: mol_type = unassigned RNA
gtcactcctctcctcccaatgggag

SEQ ID NO: 10518 - DNA, 25 bp, Homo sapiens
  source 1..25: mol_type = unassigned DNA
gtcactcctctcctcccaatgggag

SEQ ID NO: 10519 - DNA, 25 bp, Homo sapiens
  source 1..25: mol_type = unassigned DNA
ctcccattgggaggagaggagtgac

SEQ ID NO: 10520 - RNA, 21 nt, Homo sapiens
  source 1..21: mol_type = unassigned RNA
ggttctttcccacccagggct

SEQ ID NO: 10521 - DNA, 21 bp, Homo sapiens
  source 1..21: mol_type = unassigned DNA
ggttctttcccacccagggct

SEQ ID NO: 10522 - DNA, 21 bp, Homo sapiens
  source 1..21: mol_type = unassigned DNA
agccctgggtgggaaagaacc

SEQ ID NO: 10523 - RNA, 40 nt, Homo sapiens
  source 1..40: mol_type = unassigned RNA
gtcactcctctcctcccaatgggagtatggtgttttgaac

SEQ ID NO: 10524 - DNA, 40 bp, Homo sapiens
  source 1..40: mol_type = unassigned DNA
gtcactcctctcctcccaatgggagtatggtgttttgaac

SEQ ID NO: 10525 - DNA, 40 bp, Homo sapiens
  source 1..40: mol_type = unassigned DNA
gttcaaaacaccatactcccattgggaggagaggagtgac

SEQ ID NO: 10526 - RNA, 28 nt, Homo sapiens
  source 1..28: mol_type = unassigned RNA
acagtgagactgtagtatagtggttttt

SEQ ID NO: 10527 - DNA, 28 bp, Homo sapiens
  source 1..28: mol_type = unassigned DNA
acagtgagactgtagtatagtggttttt

SEQ ID NO: 10528 - DNA, 28 bp, Homo sapiens
  source 1..28: mol_type = unassigned DNA
aaaaaccactatactacagtctcactgt

SEQ ID NO: 10529 - RNA, 31 nt, Homo sapiens
  source 1..31: mol_type = unassigned RNA
caagcagataggcctgtaccctgtgctggtc

SEQ ID NO: 10530 - DNA, 31 bp, Homo sapiens
  source 1..31: mol_type = unassigned DNA
caagcagataggcctgtaccctgtgctggtc

SEQ ID NO: 10531 - DNA, 31 bp, Homo sapiens
  source 1..31: mol_type = unassigned DNA
gaccagcacagggtacaggcctatctgcttg

SEQ ID NO: 10532 - RNA, 200 nt, Homo sapiens
  source 1..200: mol_type = unassigned RNA
ggatggaaacattctttaagcggccttgtagaaatcctattccatgttaatatgccaaccaattttactttcccagagccacagaaggatatctcattgtatgcctcaattcaatcacctttccattttcaaggaccgatttcaattcctgattggctacttgatctgactgcttcctgctaatcttgttgcctattgtc

SEQ ID NO: 10533 - DNA, 200 bp, Homo sapiens
  source 1..200: mol_type = unassigned DNA
ggatggaaacattctttaagcggccttgtagaaatcctattccatgttaatatgccaaccaattttactttcccagagccacagaaggatatctcattgtatgcctcaattcaatcacctttccattttcaaggaccgatttcaattcctgattggctacttgatctgactgcttcctgctaatcttgttgcctattgtc

SEQ ID NO: 10534 - DNA, 200 bp, Homo sapiens
  source 1..200: mol_type = unassigned DNA
gacaataggcaacaagattagcaggaagcagtcagatcaagtagccaatcaggaattgaaatcggtccttgaaaatggaaaggtgattgaattgaggcatacaatgagatatccttctgtggctctgggaaagtaaaattggttggcatattaacatggaataggatttctacaaggccgcttaaagaatgtttccatcc

SEQ ID NO: 10535 - RNA, 32 nt, Homo sapiens
  source 1..32: mol_type = unassigned RNA
tccaccacgcagaccagatgaaggaaggcaac

SEQ ID NO: 10536 - DNA, 32 bp, Homo sapiens
  source 1..32: mol_type = unassigned DNA
tccaccacgcagaccagatgaaggaaggcaac

SEQ ID NO: 10537 - DNA, 32 bp, Homo sapiens
  source 1..32: mol_type = unassigned DNA
gttgccttccttcatctggtctgcgtggtgga

SEQ ID NO: 10538 - RNA, 26 nt, Homo sapiens
  source 1..26: mol_type = unassigned RNA
catgttccttttgcctttctaggcct

SEQ ID NO: 10539 - DNA, 26 bp, Homo sapiens
  source 1..26: mol_type = unassigned DNA
catgttccttttgcctttctaggcct

SEQ ID NO: 10540 - DNA, 26 bp, Homo sapiens
  source 1..26: mol_type = unassigned DNA
aggcctagaaaggcaaaaggaacatg

SEQ ID NO: 10541 - RNA, 200 nt, Homo sapiens
  source 1..200: mol_type = unassigned RNA
ttcccttacaacttaatctgttttttgctttttccccagtttaaggccaatcctcctgctgtgacttttgaactaactggggagacagacaacatatttgtgatagaacgggagggacttctgtattacaacagagccttggacagggaaacaagatctactcacaatctccaggtaaattgataccagctgaagggatc

SEQ ID NO: 10542 - DNA, 200 bp, Homo sapiens
  source 1..200: mol_type = unassigned DNA
ttcccttacaacttaatctgttttttgctttttccccagtttaaggccaatcctcctgctgtgacttttgaactaactggggagacagacaacatatttgtgatagaacgggagggacttctgtattacaacagagccttggacagggaaacaagatctactcacaatctccaggtaaattgataccagctgaagggatc

SEQ ID NO: 10543 - DNA, 200 bp, Homo sapiens
  source 1..200: mol_type = unassigned DNA
gatcccttcagctggtatcaatttacctggagattgtgagtagatcttgtttccctgtccaaggctctgttgtaatacagaagtccctcccgttctatcacaaatatgttgtctgtctccccagttagttcaaaagtcacagcaggaggattggccttaaactggggaaaaagcaaaaaacagattaagttgtaagggaa

SEQ ID NO: 10544 - RNA, 26 nt, Homo sapiens
  source 1..26: mol_type = unassigned RNA
attcaaatcccttctcatcgccactg

SEQ ID NO: 10545 - DNA, 26 bp, Homo sapiens
  source 1..26: mol_type = unassigned DNA
attcaaatcccttctcatcgccactg

SEQ ID NO: 10546 - DNA, 26 bp, Homo sapiens
  source 1..26: mol_type = unassigned DNA
cagtggcgatgagaagggatttgaat

SEQ ID NO: 10547 - RNA, 16 nt, Homo sapiens
  source 1..16: mol_type = unassigned RNA
gatttgtgatgatctt

SEQ ID NO: 10548 - DNA, 16 bp, Homo sapiens
  source 1..16: mol_type = unassigned DNA
gatttgtgatgatctt

SEQ ID NO: 10549 - DNA, 16 bp, Homo sapiens
  source 1..16: mol_type = unassigned DNA
aagatcatcacaaatc

SEQ ID NO: 10550 - RNA, 28 nt, Homo sapiens
  source 1..28: mol_type = unassigned RNA
ggtgctttgaaccaggaaaggacaagaa

SEQ ID NO: 10551 - DNA, 28 bp, Homo sapiens
  source 1..28: mol_type = unassigned DNA
ggtgctttgaaccaggaaaggacaagaa

SEQ ID NO: 10552 - DNA, 28 bp, Homo sapiens
  source 1..28: mol_type = unassigned DNA
ttcttgtcctttcctggttcaaagcacc

SEQ ID NO: 10553 - RNA, 54 nt, Homo sapiens
  source 1..54: mol_type = unassigned RNA
ggtaatgtttgggcacgtgtttgttatgacttaggaggagaatggacagagggc

SEQ ID NO: 10554 - DNA, 54 bp, Homo sapiens
  source 1..54: mol_type = unassigned DNA
ggtaatgtttgggcacgtgtttgttatgacttaggaggagaatggacagagggc

SEQ ID NO: 10555 - DNA, 54 bp, Homo sapiens
  source 1..54: mol_type = unassigned DNA
gccctctgtccattctcctcctaagtcataacaaacacgtgcccaaacattacc

SEQ ID NO: 10556 - RNA, 40 nt, Homo sapiens
  source 1..40: mol_type = unassigned RNA
atatgtaatagtttgtactgttttgctaagtgatttttct

SEQ ID NO: 10557 - DNA, 40 bp, Homo sapiens
  source 1..40: mol_type = unassigned DNA
atatgtaatagtttgtactgttttgctaagtgatttttct

SEQ ID NO: 10558 - DNA, 40 bp, Homo sapiens
  source 1..40: mol_type = unassigned DNA
agaaaaatcacttagcaaaacagtacaaactattacatat

SEQ ID NO: 10559 - RNA, 56 nt, Homo sapiens
  source 1..56: mol_type = unassigned RNA
ctagtttctctggctttgtagatcaggtgaagcacctctgaatgacagccagcagc

SEQ ID NO: 10560 - DNA, 56 bp, Homo sapiens
  source 1..56: mol_type = unassigned DNA
ctagtttctctggctttgtagatcaggtgaagcacctctgaatgacagccagcagc

SEQ ID NO: 10561 - DNA, 56 bp, Homo sapiens
  source 1..56: mol_type = unassigned DNA
gctgctggctgtcattcagaggtgcttcacctgatctacaaagccagagaaactag

SEQ ID NO: 10562 - RNA, 28 nt, Homo sapiens
  source 1..28: mol_type = unassigned RNA
ctgccattgagatgaccagcacggcccc

SEQ ID NO: 10563 - DNA, 28 bp, Homo sapiens
  source 1..28: mol_type = unassigned DNA
ctgccattgagatgaccagcacggcccc

SEQ ID NO: 10564 - DNA, 28 bp, Homo sapiens
  source 1..28: mol_type = unassigned DNA
ggggccgtgctggtcatctcaatggcag

SEQ ID NO: 10565 - RNA, 47 nt, Homo sapiens
  source 1..47: mol_type = unassigned RNA
ttcccactgcctaatggatgttccagtatcttatggctggtaaatta

SEQ ID NO: 10566 - DNA, 47 bp, Homo sapiens
  source 1..47: mol_type = unassigned DNA
ttcccactgcctaatggatgttccagtatcttatggctggtaaatta

SEQ ID NO: 10567 - DNA, 47 bp, Homo sapiens
  source 1..47: mol_type = unassigned DNA
taatttaccagccataagatactggaacatccattaggcagtgggaa

SEQ ID NO: 10568 - RNA, 38 nt, Homo sapiens
  source 1..38: mol_type = unassigned RNA
ctggcatacatactgtattttatgatgaattacattga

SEQ ID NO: 10569 - DNA, 38 bp, Homo sapiens
  source 1..38: mol_type = unassigned DNA
ctggcatacatactgtattttatgatgaattacattga

SEQ ID NO: 10570 - DNA, 38 bp, Homo sapiens
  source 1..38: mol_type = unassigned DNA
tcaatgtaattcatcataaaatacagtatgtatgccag

SEQ ID NO: 10571 - RNA, 40 nt, Homo sapiens
  source 1..40: mol_type = unassigned RNA
ggaatctatgatggttatagccagactgcctgggttactg

SEQ ID NO: 10572 - DNA, 40 bp, Homo sapiens
  source 1..40: mol_type = unassigned DNA
ggaatctatgatggttatagccagactgcctgggttactg

SEQ ID NO: 10573 - DNA, 40 bp, Homo sapiens
  source 1..40: mol_type = unassigned DNA
cagtaacccaggcagtctggctataaccatcatagattcc

SEQ ID NO: 10574 - RNA, 86 nt, Homo sapiens
  source 1..86: mol_type = unassigned RNA
ctgcaggagggatgatgagtttggagtctgagctttaaagcccacattcagaaagagaagccaggctcctgaggctggtcagtggc

SEQ ID NO: 10575 - DNA, 86 bp, Homo sapiens
  source 1..86: mol_type = unassigned DNA
ctgcaggagggatgatgagtttggagtctgagctttaaagcccacattcagaaagagaagccaggctcctgaggctggtcagtggc

SEQ ID NO: 10576 - DNA, 86 bp, Homo sapiens
  source 1..86: mol_type = unassigned DNA
gccactgaccagcctcaggagcctggcttctctttctgaatgtgggctttaaagctcagactccaaactcatcatccctcctgcag

SEQ ID NO: 10577 - RNA, 32 nt, Homo sapiens
  source 1..32: mol_type = unassigned RNA
ggcgagggcgccggagctgggctcagcagtgg

SEQ ID NO: 10578 - DNA, 32 bp, Homo sapiens
  source 1..32: mol_type = unassigned DNA
ggcgagggcgccggagctgggctcagcagtgg

SEQ ID NO: 10579 - DNA, 32 bp, Homo sapiens
  source 1..32: mol_type = unassigned DNA
ccactgctgagcccagctccggcgccctcgcc

SEQ ID NO: 10580 - RNA, 30 nt, Homo sapiens
  source 1..30: mol_type = unassigned RNA
taccaagactttgactagaatgtcgtattt

SEQ ID NO: 10581 - DNA, 30 bp, Homo sapiens
  source 1..30: mol_type = unassigned DNA
taccaagactttgactagaatgtcgtattt

SEQ ID NO: 10582 - DNA, 30 bp, Homo sapiens
  source 1..30: mol_type = unassigned DNA
aaatacgacattctagtcaaagtcttggta

SEQ ID NO: 10583 - RNA, 31 nt, Homo sapiens
  source 1..31: mol_type = unassigned RNA
ttgcttcttttattagactagtgttgacttt

SEQ ID NO: 10584 - DNA, 31 bp, Homo sapiens
  source 1..31: mol_type = unassigned DNA
ttgcttcttttattagactagtgttgacttt

SEQ ID NO: 10585 - DNA, 31 bp, Homo sapiens
  source 1..31: mol_type = unassigned DNA
aaagtcaacactagtctaataaaagaagcaa

SEQ ID NO: 10586 - RNA, 36 nt, Homo sapiens
  source 1..36: mol_type = unassigned RNA
ttctacagcacctcctgtagacctgcccactgagcc

SEQ ID NO: 10587 - DNA, 36 bp, Homo sapiens
  source 1..36: mol_type = unassigned DNA
ttctacagcacctcctgtagacctgcccactgagcc

SEQ ID NO: 10588 - DNA, 36 bp, Homo sapiens
  source 1..36: mol_type = unassigned DNA
ggctcagtgggcaggtctacaggaggtgctgtagaa

SEQ ID NO: 10589 - RNA, 32 nt, Homo sapiens
  source 1..32: mol_type = unassigned RNA
cagctgcagatcccaggcctctggcgccccca

SEQ ID NO: 10590 - DNA, 32 bp, Homo sapiens
  source 1..32: mol_type = unassigned DNA
cagctgcagatcccaggcctctggcgccccca

SEQ ID NO: 10591 - DNA, 32 bp, Homo sapiens
  source 1..32: mol_type = unassigned DNA
tgggggcgccagaggcctgggatctgcagctg

SEQ ID NO: 10592 - RNA, 103 nt, Homo sapiens
  source 1..103: mol_type = unassigned RNA
cgtgacatcaccctgggacccatgtggctggcacccttggtggtttcctggtgtttgttacaggagcaggggaagccagggctgcaggcctgcacctggtggc

SEQ ID NO: 10593 - DNA, 103 bp, Homo sapiens
  source 1..103: mol_type = unassigned DNA
cgtgacatcaccctgggacccatgtggctggcacccttggtggtttcctggtgtttgttacaggagcaggggaagccagggctgcaggcctgcacctggtggc

SEQ ID NO: 10594 - DNA, 103 bp, Homo sapiens
  source 1..103: mol_type = unassigned DNA
gccaccaggtgcaggcctgcagccctggcttcccctgctcctgtaacaaacaccaggaaaccaccaagggtgccagccacatgggtcccagggtgatgtcacg

SEQ ID NO: 10595 - RNA, 23 nt, Homo sapiens
  source 1..23: mol_type = unassigned RNA
tgacatggtgctgtgggctgaat

SEQ ID NO: 10596 - DNA, 23 bp, Homo sapiens
  source 1..23: mol_type = unassigned DNA
tgacatggtgctgtgggctgaat

SEQ ID NO: 10597 - DNA, 23 bp, Homo sapiens
  source 1..23: mol_type = unassigned DNA
attcagcccacagcaccatgtca

SEQ ID NO: 10598 - RNA, 39 nt, Homo sapiens
  source 1..39: mol_type = unassigned RNA
gggtctggtctagggcaaccggctcttgacacagcgccc

SEQ ID NO: 10599 - DNA, 39 bp, Homo sapiens
  source 1..39: mol_type = unassigned DNA
gggtctggtctagggcaaccggctcttgacacagcgccc

SEQ ID NO: 10600 - DNA, 39 bp, Homo sapiens
  source 1..39: mol_type = unassigned DNA
gggcgctgtgtcaagagccggttgccctagaccagaccc

SEQ ID NO: 10601 - RNA, 31 nt, Homo sapiens
  source 1..31: mol_type = unassigned RNA
tgcaattggggtcgcccggatggtaggggta

SEQ ID NO: 10602 - DNA, 31 bp, Homo sapiens
  source 1..31: mol_type = unassigned DNA
tgcaattggggtcgcccggatggtaggggta

SEQ ID NO: 10603 - DNA, 31 bp, Homo sapiens
  source 1..31: mol_type = unassigned DNA
tacccctaccatccgggcgaccccaattgca

SEQ ID NO: 10604 - RNA, 98 nt, Homo sapiens
  source 1..98: mol_type = unassigned RNA
aaattaccagggctgtaggctaccaggcatgcggcccgtccccagggcctaatgaagacacacctgaatctcaccaagcctctcaaacgaactactag

SEQ ID NO: 10605 - DNA, 98 bp, Homo sapiens
  source 1..98: mol_type = unassigned DNA
aaattaccagggctgtaggctaccaggcatgcggcccgtccccagggcctaatgaagacacacctgaatctcaccaagcctctcaaacgaactactag

SEQ ID NO: 10606 - DNA, 98 bp, Homo sapiens
  source 1..98: mol_type = unassigned DNA
ctagtagttcgtttgagaggcttggtgagattcaggtgtgtcttcattaggccctggggacgggccgcatgcctggtagcctacagccctggtaattt

SEQ ID NO: 10607 - RNA, 31 nt, Homo sapiens
  source 1..31: mol_type = unassigned RNA
gcctggagtctggcgagggacttgggagagg

SEQ ID NO: 10608 - DNA, 31 bp, Homo sapiens
  source 1..31: mol_type = unassigned DNA
gcctggagtctggcgagggacttgggagagg

SEQ ID NO: 10609 - DNA, 31 bp, Homo sapiens
  source 1..31: mol_type = unassigned DNA
cctctcccaagtccctcgccagactccaggc

SEQ ID NO: 10610 - RNA, 170 nt, Homo sapiens
  source 1..170: mol_type = unassigned RNA
cttttcccatcaggtggacgcgcatgggcaggagatattatttgcagcatttcctcctagaggacgcctttgtcattgtagtgcaatctaagaatgggtgtccttagacaacagggaccgaccaaatcgtcatgcagctgtttggatgctttaaaaaaataaatccccac

SEQ ID NO: 10611 - DNA, 170 bp, Homo sapiens
  source 1..170: mol_type = unassigned DNA
cttttcccatcaggtggacgcgcatgggcaggagatattatttgcagcatttcctcctagaggacgcctttgtcattgtagtgcaatctaagaatgggtgtccttagacaacagggaccgaccaaatcgtcatgcagctgtttggatgctttaaaaaaataaatccccac

SEQ ID NO: 10612 - DNA, 170 bp, Homo sapiens
  source 1..170: mol_type = unassigned DNA
gtggggatttatttttttaaagcatccaaacagctgcatgacgatttggtcggtccctgttgtctaaggacacccattcttagattgcactacaatgacaaaggcgtcctctaggaggaaatgctgcaaataatatctcctgcccatgcgcgtccacctgatgggaaaag

SEQ ID NO: 10613 - RNA, 31 nt, Homo sapiens
  source 1..31: mol_type = unassigned RNA
ggatgcgtccccagatcgcaggatttccaag

SEQ ID NO: 10614 - DNA, 31 bp, Homo sapiens
  source 1..31: mol_type = unassigned DNA
ggatgcgtccccagatcgcaggatttccaag

SEQ ID NO: 10615 - DNA, 31 bp, Homo sapiens
  source 1..31: mol_type = unassigned DNA
cttggaaatcctgcgatctggggacgcatcc

SEQ ID NO: 10616 - RNA, 29 nt, Homo sapiens
  source 1..29: mol_type = unassigned RNA
aagccctcttcaagcagtagaacctatct

SEQ ID NO: 10617 - DNA, 29 bp, Homo sapiens
  source 1..29: mol_type = unassigned DNA
aagccctcttcaagcagtagaacctatct

SEQ ID NO: 10618 - DNA, 29 bp, Homo sapiens
  source 1..29: mol_type = unassigned DNA
agataggttctactgcttgaagagggctt

SEQ ID NO: 10619 - RNA, 26 nt, Homo sapiens
  source 1..26: mol_type = unassigned RNA
ctttctctatgaaatgaaagccacaa

SEQ ID NO: 10620 - DNA, 26 bp, Homo sapiens
  source 1..26: mol_type = unassigned DNA
ctttctctatgaaatgaaagccacaa

SEQ ID NO: 10621 - DNA, 26 bp, Homo sapiens
  source 1..26: mol_type = unassigned DNA
ttgtggctttcatttcatagagaaag

SEQ ID NO: 10622 - RNA, 28 nt, Homo sapiens
  source 1..28: mol_type = unassigned RNA
atccccaagaaaggcactgtggagacca

SEQ ID NO: 10623 - DNA, 28 bp, Homo sapiens
  source 1..28: mol_type = unassigned DNA
atccccaagaaaggcactgtggagacca

SEQ ID NO: 10624 - DNA, 28 bp, Homo sapiens
  source 1..28: mol_type = unassigned DNA
tggtctccacagtgcctttcttggggat

SEQ ID NO: 10625 - RNA, 30 nt, Homo sapiens
  source 1..30: mol_type = unassigned RNA
ataagtactgggctgttcagggacagaatg

SEQ ID NO: 10626 - DNA, 30 bp, Homo sapiens
  source 1..30: mol_type = unassigned DNA
ataagtactgggctgttcagggacagaatg

SEQ ID NO: 10627 - DNA, 30 bp, Homo sapiens
  source 1..30: mol_type = unassigned DNA
cattctgtccctgaacagcccagtacttat

SEQ ID NO: 10628 - RNA, 25 nt, Homo sapiens
  source 1..25: mol_type = unassigned RNA
tcctagatttgggactgagagcaga

SEQ ID NO: 10629 - DNA, 25 bp, Homo sapiens
  source 1..25: mol_type = unassigned DNA
tcctagatttgggactgagagcaga

SEQ ID NO: 10630 - DNA, 25 bp, Homo sapiens
  source 1..25: mol_type = unassigned DNA
tctgctctcagtcccaaatctagga

SEQ ID NO: 10631 - RNA, 106 nt, Homo sapiens
  source 1..106: mol_type = unassigned RNA
ctcacttcctcccatctgaagcccatagaaatcccccggattcagccagactcttctggagagacatggggaggaccagctgtagagaggagccacccactccagg

SEQ ID NO: 10632 - DNA, 106 bp, Homo sapiens
  source 1..106: mol_type = unassigned DNA
ctcacttcctcccatctgaagcccatagaaatcccccggattcagccagactcttctggagagacatggggaggaccagctgtagagaggagccacccactccagg

SEQ ID NO: 10633 - DNA, 106 bp, Homo sapiens
  source 1..106: mol_type = unassigned DNA
cctggagtgggtggctcctctctacagctggtcctccccatgtctctccagaagagtctggctgaatccgggggatttctatgggcttcagatgggaggaagtgag

SEQ ID NO: 10634 - RNA, 29 nt, Homo sapiens
  source 1..29: mol_type = unassigned RNA
gattcagactgagggacctggagagaact

SEQ ID NO: 10635 - DNA, 29 bp, Homo sapiens
  source 1..29: mol_type = unassigned DNA
gattcagactgagggacctggagagaact

SEQ ID NO: 10636 - DNA, 29 bp, Homo sapiens
  source 1..29: mol_type = unassigned DNA
agttctctccaggtccctcagtctgaatc

SEQ ID NO: 10637 - RNA, 107 nt, Homo sapiens
  source 1..107: mol_type = unassigned RNA
tagttctggaggcagggaggtccagatcaagtcagggaggtccagatcaagtcaggcagggaggtccagatcaagttgagtttctgatgaagagggccgcttcctgg

SEQ ID NO: 10638 - DNA, 107 bp, Homo sapiens
  source 1..107: mol_type = unassigned DNA
tagttctggaggcagggaggtccagatcaagtcagggaggtccagatcaagtcaggcagggaggtccagatcaagttgagtttctgatgaagagggccgcttcctgg

SEQ ID NO: 10639 - DNA, 107 bp, Homo sapiens
  source 1..107: mol_type = unassigned DNA
ccaggaagcggccctcttcatcagaaactcaacttgatctggacctccctgcctgacttgatctggacctccctgacttgatctggacctccctgcctccagaacta

SEQ ID NO: 10640 - RNA, 28 nt, Homo sapiens
  source 1..28: mol_type = unassigned RNA
tggcttccctagaactgtgaagcatatc

SEQ ID NO: 10641 - DNA, 28 bp, Homo sapiens
  source 1..28: mol_type = unassigned DNA
tggcttccctagaactgtgaagcatatc

SEQ ID NO: 10642 - DNA, 28 bp, Homo sapiens
  source 1..28: mol_type = unassigned DNA
gatatgcttcacagttctagggaagcca

SEQ ID NO: 10643 - RNA, 52 nt, Homo sapiens
  source 1..52: mol_type = unassigned RNA
atgtccatggaagtgagaaactcactgagtggactcagccctgctactgaca

SEQ ID NO: 10644 - DNA, 52 bp, Homo sapiens
  source 1..52: mol_type = unassigned DNA
atgtccatggaagtgagaaactcactgagtggactcagccctgctactgaca

SEQ ID NO: 10645 - DNA, 52 bp, Homo sapiens
  source 1..52: mol_type = unassigned DNA
tgtcagtagcagggctgagtccactcagtgagtttctcacttccatggacat

SEQ ID NO: 10646 - RNA, 76 nt, Homo sapiens
  source 1..76: mol_type = unassigned RNA
agcgcctgacactacccagccagaagggcccccagggaccctaccagaggccggtgctccctgcctgcctccttca

SEQ ID NO: 10647 - DNA, 76 bp, Homo sapiens
  source 1..76: mol_type = unassigned DNA
agcgcctgacactacccagccagaagggcccccagggaccctaccagaggccggtgctccctgcctgcctccttca

SEQ ID NO: 10648 - DNA, 76 bp, Homo sapiens
  source 1..76: mol_type = unassigned DNA
tgaaggaggcaggcagggagcaccggcctctggtagggtccctgggggcccttctggctgggtagtgtcaggcgct

SEQ ID NO: 10649 - RNA, 88 nt, Homo sapiens
  source 1..88: mol_type = unassigned RNA
gttatgaagttataccccatgcaactaaagacttggcctgccaccagcctgactgattgcccgcggggaccagtcagaggtactttca

SEQ ID NO: 10650 - DNA, 88 bp, Homo sapiens
  source 1..88: mol_type = unassigned DNA
gttatgaagttataccccatgcaactaaagacttggcctgccaccagcctgactgattgcccgcggggaccagtcagaggtactttca

SEQ ID NO: 10651 - DNA, 88 bp, Homo sapiens
  source 1..88: mol_type = unassigned DNA
tgaaagtacctctgactggtccccgcgggcaatcagtcaggctggtggcaggccaagtctttagttgcatggggtataacttcataac

SEQ ID NO: 10652 - RNA, 40 nt, Homo sapiens
  source 1..40: mol_type = unassigned RNA
atcacagggcaagggtttcctgctgaaggaacaaaatttt

SEQ ID NO: 10653 - DNA, 40 bp, Homo sapiens
  source 1..40: mol_type = unassigned DNA
atcacagggcaagggtttcctgctgaaggaacaaaatttt

SEQ ID NO: 10654 - DNA, 40 bp, Homo sapiens
  source 1..40: mol_type = unassigned DNA
aaaattttgttccttcagcaggaaacccttgccctgtgat

SEQ ID NO: 10655 - RNA, 36 nt, Homo sapiens
  source 1..36: mol_type = unassigned RNA
ttcgatatacctgacttccaggttcggctgccagca

SEQ ID NO: 10656 - DNA, 36 bp, Homo sapiens
  source 1..36: mol_type = unassigned DNA
ttcgatatacctgacttccaggttcggctgccagca

SEQ ID NO: 10657 - DNA, 36 bp, Homo sapiens
  source 1..36: mol_type = unassigned DNA
tgctggcagccgaacctggaagtcaggtatatcgaa

SEQ ID NO: 10658 - RNA, 31 nt, Homo sapiens
  source 1..31: mol_type = unassigned RNA
gccttctgggactggacagctttgctccgct

SEQ ID NO: 10659 - DNA, 31 bp, Homo sapiens
  source 1..31: mol_type = unassigned DNA
gccttctgggactggacagctttgctccgct

SEQ ID NO: 10660 - DNA, 31 bp, Homo sapiens
  source 1..31: mol_type = unassigned DNA
agcggagcaaagctgtccagtcccagaaggc

SEQ ID NO: 10661 - RNA, 68 nt, Homo sapiens
  source 1..68: mol_type = unassigned RNA
tagtctctgcctggtaatttggagaattttcccagacatttaccaacacctccaaggtggaacctcta

SEQ ID NO: 10662 - DNA, 68 bp, Homo sapiens
  source 1..68: mol_type = unassigned DNA
tagtctctgcctggtaatttggagaattttcccagacatttaccaacacctccaaggtggaacctcta

SEQ ID NO: 10663 - DNA, 68 bp, Homo sapiens
  source 1..68: mol_type = unassigned DNA
tagaggttccaccttggaggtgttggtaaatgtctgggaaaattctccaaattaccaggcagagacta

SEQ ID NO: 10664 - RNA, 29 nt, Homo sapiens
  source 1..29: mol_type = unassigned RNA
tgagccttgatgagtagagctatgttcca

SEQ ID NO: 10665 - DNA, 29 bp, Homo sapiens
  source 1..29: mol_type = unassigned DNA
tgagccttgatgagtagagctatgttcca

SEQ ID NO: 10666 - DNA, 29 bp, Homo sapiens
  source 1..29: mol_type = unassigned DNA
tggaacatagctctactcatcaaggctca

SEQ ID NO: 10667 - RNA, 128 nt, Homo sapiens
  source 1..128: mol_type = unassigned RNA
gggtttatacgacatatggaaagcattcatttattcactaatatttctgtgtgtctgcttttaggtgttgggggagtgatgacgaataagactgatgttctccatgccctttttctgtgtcagttgat

SEQ ID NO: 10668 - DNA, 128 bp, Homo sapiens
  source 1..128: mol_type = unassigned DNA
gggtttatacgacatatggaaagcattcatttattcactaatatttctgtgtgtctgcttttaggtgttgggggagtgatgacgaataagactgatgttctccatgccctttttctgtgtcagttgat

SEQ ID NO: 10669 - DNA, 128 bp, Homo sapiens
  source 1..128: mol_type = unassigned DNA
atcaactgacacagaaaaagggcatggagaacatcagtcttattcgtcatcactcccccaacacctaaaagcagacacacagaaatattagtgaataaatgaatgctttccatatgtcgtataaaccc

SEQ ID NO: 10670 - RNA, 24 nt, Homo sapiens
  source 1..24: mol_type = unassigned RNA
attcagttaggaatggagtctgca

SEQ ID NO: 10671 - DNA, 24 bp, Homo sapiens
  source 1..24: mol_type = unassigned DNA
attcagttaggaatggagtctgca

SEQ ID NO: 10672 - DNA, 24 bp, Homo sapiens
  source 1..24: mol_type = unassigned DNA
tgcagactccattcctaactgaat

SEQ ID NO: 10673 - RNA, 34 nt, Homo sapiens
  source 1..34: mol_type = unassigned RNA
caggaattctttgggctgaaagtgactgggaaac

SEQ ID NO: 10674 - DNA, 34 bp, Homo sapiens
  source 1..34: mol_type = unassigned DNA
caggaattctttgggctgaaagtgactgggaaac

SEQ ID NO: 10675 - DNA, 34 bp, Homo sapiens
  source 1..34: mol_type = unassigned DNA
gtttcccagtcactttcagcccaaagaattcctg

SEQ ID NO: 10676 - RNA, 23 nt, Homo sapiens
  source 1..23: mol_type = unassigned RNA
tactgcacttgttggcctgtcat

SEQ ID NO: 10677 - DNA, 23 bp, Homo sapiens
  source 1..23: mol_type = unassigned DNA
tactgcacttgttggcctgtcat

SEQ ID NO: 10678 - DNA, 23 bp, Homo sapiens
  source 1..23: mol_type = unassigned DNA
atgacaggccaacaagtgcagta

SEQ ID NO: 10679 - RNA, 28 nt, Homo sapiens
  source 1..28: mol_type = unassigned RNA
cttaggtatgaacaagcgaagaacatct

SEQ ID NO: 10680 - DNA, 28 bp, Homo sapiens
  source 1..28: mol_type = unassigned DNA
cttaggtatgaacaagcgaagaacatct

SEQ ID NO: 10681 - DNA, 28 bp, Homo sapiens
  source 1..28: mol_type = unassigned DNA
agatgttcttcgcttgttcatacctaag

SEQ ID NO: 10682 - RNA, 29 nt, Homo sapiens
  source 1..29: mol_type = unassigned RNA
atgatgaacttgtaggatcaggacaaatg

SEQ ID NO: 10683 - DNA, 29 bp, Homo sapiens
  source 1..29: mol_type = unassigned DNA
atgatgaacttgtaggatcaggacaaatg

SEQ ID NO: 10684 - DNA, 29 bp, Homo sapiens
  source 1..29: mol_type = unassigned DNA
catttgtcctgatcctacaagttcatcat

SEQ ID NO: 10685 - RNA, 124 nt, Homo sapiens
  source 1..124: mol_type = unassigned RNA
ttctaatatggccctggcttacctttttgaatttttttcactgtagtatacatcatatttaaccacaccttattgcttgcaatctgcaatctctgaacaggtcatatcgtattctctctctctc

SEQ ID NO: 10686 - DNA, 124 bp, Homo sapiens
  source 1..124: mol_type = unassigned DNA
ttctaatatggccctggcttacctttttgaatttttttcactgtagtatacatcatatttaaccacaccttattgcttgcaatctgcaatctctgaacaggtcatatcgtattctctctctctc

SEQ ID NO: 10687 - DNA, 124 bp, Homo sapiens
  source 1..124: mol_type = unassigned DNA
gagagagagagaatacgatatgacctgttcagagattgcagattgcaagcaataaggtgtggttaaatatgatgtatactacagtgaaaaaaattcaaaaaggtaagccagggccatattagaa

SEQ ID NO: 10688 - RNA, 73 nt, Homo sapiens
  source 1..73: mol_type = unassigned RNA
agggtaatgaggcatggtccgattgggtcttgcatgatgccagagctggacctgatcggatcctggatcatgc

SEQ ID NO: 10689 - DNA, 73 bp, Homo sapiens
  source 1..73: mol_type = unassigned DNA
agggtaatgaggcatggtccgattgggtcttgcatgatgccagagctggacctgatcggatcctggatcatgc

SEQ ID NO: 10690 - DNA, 73 bp, Homo sapiens
  source 1..73: mol_type = unassigned DNA
gcatgatccaggatccgatcaggtccagctctggcatcatgcaagacccaatcggaccatgcctcattaccct

SEQ ID NO: 10691 - RNA, 97 nt, Homo sapiens
  source 1..97: mol_type = unassigned RNA
ttcatgatcttgtgggggagtcaggctaagaaactggctgctggaacaatgtagtgatagagataaacaggatgagtatggaaaccttgagctgagc

SEQ ID NO: 10692 - DNA, 97 bp, Homo sapiens
  source 1..97: mol_type = unassigned DNA
ttcatgatcttgtgggggagtcaggctaagaaactggctgctggaacaatgtagtgatagagataaacaggatgagtatggaaaccttgagctgagc

SEQ ID NO: 10693 - DNA, 97 bp, Homo sapiens
  source 1..97: mol_type = unassigned DNA
gctcagctcaaggtttccatactcatcctgtttatctctatcactacattgttccagcagccagtttcttagcctgactcccccacaagatcatgaa

SEQ ID NO: 10694 - RNA, 34 nt, Homo sapiens
  source 1..34: mol_type = unassigned RNA
gcggcacccagaggccgtcctgtagccgggccgg

SEQ ID NO: 10695 - DNA, 34 bp, Homo sapiens
  source 1..34: mol_type = unassigned DNA
gcggcacccagaggccgtcctgtagccgggccgg

SEQ ID NO: 10696 - DNA, 34 bp, Homo sapiens
  source 1..34: mol_type = unassigned DNA
ccggcccggctacaggacggcctctgggtgccgc

SEQ ID NO: 10697 - RNA, 31 nt, Homo sapiens
  source 1..31: mol_type = unassigned RNA
tgcccggtttggccagggctcaggacccatt

SEQ ID NO: 10698 - DNA, 31 bp, Homo sapiens
  source 1..31: mol_type = unassigned DNA
tgcccggtttggccagggctcaggacccatt

SEQ ID NO: 10699 - DNA, 31 bp, Homo sapiens
  source 1..31: mol_type = unassigned DNA
aatgggtcctgagccctggccaaaccgggca

SEQ ID NO: 10700 - RNA, 129 nt, Homo sapiens
  source 1..129: mol_type = unassigned RNA
cagggcctgaccacagagctctggctggactctaggtgctttgggtgcaaggtgcttggtgccatttctcgtgatgactgcctgaggtgggcaccccgatacccactggacaagagccgaggccccgag

SEQ ID NO: 10701 - DNA, 129 bp, Homo sapiens
  source 1..129: mol_type = unassigned DNA
cagggcctgaccacagagctctggctggactctaggtgctttgggtgcaaggtgcttggtgccatttctcgtgatgactgcctgaggtgggcaccccgatacccactggacaagagccgaggccccgag

SEQ ID NO: 10702 - DNA, 129 bp, Homo sapiens
  source 1..129: mol_type = unassigned DNA
ctcggggcctcggctcttgtccagtgggtatcggggtgcccacctcaggcagtcatcacgagaaatggcaccaagcaccttgcacccaaagcacctagagtccagccagagctctgtggtcaggccctg

SEQ ID NO: 10703 - RNA, 59 nt, Homo sapiens
  source 1..59: mol_type = unassigned RNA
gaggtatgcctggaatctgagtccacagtggctagtatggcactggtgcaggcctggta

SEQ ID NO: 10704 - DNA, 59 bp, Homo sapiens
  source 1..59: mol_type = unassigned DNA
gaggtatgcctggaatctgagtccacagtggctagtatggcactggtgcaggcctggta

SEQ ID NO: 10705 - DNA, 59 bp, Homo sapiens
  source 1..59: mol_type = unassigned DNA
taccaggcctgcaccagtgccatactagccactgtggactcagattccaggcatacctc

SEQ ID NO: 10706 - RNA, 42 nt, Homo sapiens
  source 1..42: mol_type = unassigned RNA
tgctttaggggttgaggagcaggctggggaaaaagggacaaa

SEQ ID NO: 10707 - DNA, 42 bp, Homo sapiens
  source 1..42: mol_type = unassigned DNA
tgctttaggggttgaggagcaggctggggaaaaagggacaaa

SEQ ID NO: 10708 - DNA, 42 bp, Homo sapiens
  source 1..42: mol_type = unassigned DNA
tttgtccctttttccccagcctgctcctcaacccctaaagca

SEQ ID NO: 10709 - RNA, 30 nt, Homo sapiens
  source 1..30: mol_type = unassigned RNA
ctcccaggactggaaggctgaacgcagcca

SEQ ID NO: 10710 - DNA, 30 bp, Homo sapiens
  source 1..30: mol_type = unassigned DNA
ctcccaggactggaaggctgaacgcagcca

SEQ ID NO: 10711 - DNA, 30 bp, Homo sapiens
  source 1..30: mol_type = unassigned DNA
tggctgcgttcagccttccagtcctgggag

SEQ ID NO: 10712 - RNA, 32 nt, Homo sapiens
  source 1..32: mol_type = unassigned RNA
gtgtcgctccagacctatgatgacttgttagc

SEQ ID NO: 10713 - DNA, 32 bp, Homo sapiens
  source 1..32: mol_type = unassigned DNA
gtgtcgctccagacctatgatgacttgttagc

SEQ ID NO: 10714 - DNA, 32 bp, Homo sapiens
  source 1..32: mol_type = unassigned DNA
gctaacaagtcatcataggtctggagcgacac

SEQ ID NO: 10715 - RNA, 26 nt, Homo sapiens
  source 1..26: mol_type = unassigned RNA
gaaggaggtcatgtcgtcttgggtaa

SEQ ID NO: 10716 - DNA, 26 bp, Homo sapiens
  source 1..26: mol_type = unassigned DNA
gaaggaggtcatgtcgtcttgggtaa

SEQ ID NO: 10717 - DNA, 26 bp, Homo sapiens
  source 1..26: mol_type = unassigned DNA
ttacccaagacgacatgacctccttc

SEQ ID NO: 10718 - RNA, 47 nt, Homo sapiens
  source 1..47: mol_type = unassigned RNA
aatggatgaatggatttttgaaaattggtatatacacagtggaacac

SEQ ID NO: 10719 - DNA, 47 bp, Homo sapiens
  source 1..47: mol_type = unassigned DNA
aatggatgaatggatttttgaaaattggtatatacacagtggaacac

SEQ ID NO: 10720 - DNA, 47 bp, Homo sapiens
  source 1..47: mol_type = unassigned DNA
gtgttccactgtgtatataccaattttcaaaaatccattcatccatt

SEQ ID NO: 10721 - RNA, 32 nt, Homo sapiens
  source 1..32: mol_type = unassigned RNA
caaccttctgaacccagagcaggtggaggctg

SEQ ID NO: 10722 - DNA, 32 bp, Homo sapiens
  source 1..32: mol_type = unassigned DNA
caaccttctgaacccagagcaggtggaggctg

SEQ ID NO: 10723 - DNA, 32 bp, Homo sapiens
  source 1..32: mol_type = unassigned DNA
cagcctccacctgctctgggttcagaaggttg

SEQ ID NO: 10724 - RNA, 52 nt, Homo sapiens
  source 1..52: mol_type = unassigned RNA
ttgggaggaacaaagaattgacagacaggagtgtgtgttggtggcggaggtc

SEQ ID NO: 10725 - DNA, 52 bp, Homo sapiens
  source 1..52: mol_type = unassigned DNA
ttgggaggaacaaagaattgacagacaggagtgtgtgttggtggcggaggtc

SEQ ID NO: 10726 - DNA, 52 bp, Homo sapiens
  source 1..52: mol_type = unassigned DNA
gacctccgccaccaacacacactcctgtctgtcaattctttgttcctcccaa

SEQ ID NO: 10727 - RNA, 50 nt, Homo sapiens
  source 1..50: mol_type = unassigned RNA
ggcccagcagccttggtgagtatagatgtgctttctgggctgcccagagt

SEQ ID NO: 10728 - DNA, 50 bp, Homo sapiens
  source 1..50: mol_type = unassigned DNA
ggcccagcagccttggtgagtatagatgtgctttctgggctgcccagagt

SEQ ID NO: 10729 - DNA, 50 bp, Homo sapiens
  source 1..50: mol_type = unassigned DNA
actctgggcagcccagaaagcacatctatactcaccaaggctgctgggcc

SEQ ID NO: 10730 - RNA, 22 nt, Homo sapiens
  source 1..22: mol_type = unassigned RNA
tgagacagcacctccaaggggc

SEQ ID NO: 10731 - DNA, 22 bp, Homo sapiens
  source 1..22: mol_type = unassigned DNA
tgagacagcacctccaaggggc

SEQ ID NO: 10732 - DNA, 22 bp, Homo sapiens
  source 1..22: mol_type = unassigned DNA
gccccttggaggtgctgtctca

SEQ ID NO: 10733 - RNA, 128 nt, Homo sapiens
  source 1..128: mol_type = unassigned RNA
gatttttttctttttaaatcatccagttcttcagtttccctgctgtagttgctccattcaaatgttccgtcctcccactgagccaaaaccaggagttcatgccatttgtcaaggaattatgtaagcaa

SEQ ID NO: 10734 - DNA, 128 bp, Homo sapiens
  source 1..128: mol_type = unassigned DNA
gatttttttctttttaaatcatccagttcttcagtttccctgctgtagttgctccattcaaatgttccgtcctcccactgagccaaaaccaggagttcatgccatttgtcaaggaattatgtaagcaa

SEQ ID NO: 10735 - DNA, 128 bp, Homo sapiens
  source 1..128: mol_type = unassigned DNA
ttgcttacataattccttgacaaatggcatgaactcctggttttggctcagtgggaggacggaacatttgaatggagcaactacagcagggaaactgaagaactggatgatttaaaaagaaaaaaatc

SEQ ID NO: 10736 - RNA, 59 nt, Homo sapiens
  source 1..59: mol_type = unassigned RNA
gtttatttagctcattgttctgtaggctgtagaagaagcacggtgctgcttggcttctg

SEQ ID NO: 10737 - DNA, 59 bp, Homo sapiens
  source 1..59: mol_type = unassigned DNA
gtttatttagctcattgttctgtaggctgtagaagaagcacggtgctgcttggcttctg

SEQ ID NO: 10738 - DNA, 59 bp, Homo sapiens
  source 1..59: mol_type = unassigned DNA
cagaagccaagcagcaccgtgcttcttctacagcctacagaacaatgagctaaataaac

SEQ ID NO: 10739 - RNA, 38 nt, Homo sapiens
  source 1..38: mol_type = unassigned RNA
cccctctcccgcctgttaacagtcacctccatgtggat

SEQ ID NO: 10740 - DNA, 38 bp, Homo sapiens
  source 1..38: mol_type = unassigned DNA
cccctctcccgcctgttaacagtcacctccatgtggat

SEQ ID NO: 10741 - DNA, 38 bp, Homo sapiens
  source 1..38: mol_type = unassigned DNA
atccacatggaggtgactgttaacaggcgggagagggg

SEQ ID NO: 10742 - RNA, 31 nt, Homo sapiens
  source 1..31: mol_type = unassigned RNA
actttttagctcgtgtggtgattgctgcaca

SEQ ID NO: 10743 - DNA, 31 bp, Homo sapiens
  source 1..31: mol_type = unassigned DNA
actttttagctcgtgtggtgattgctgcaca

SEQ ID NO: 10744 - DNA, 31 bp, Homo sapiens
  source 1..31: mol_type = unassigned DNA
tgtgcagcaatcaccacacgagctaaaaagt

SEQ ID NO: 10745 - RNA, 31 nt, Homo sapiens
  source 1..31: mol_type = unassigned RNA
tgcccttgggcacaagactggaggtgctgac

SEQ ID NO: 10746 - DNA, 31 bp, Homo sapiens
  source 1..31: mol_type = unassigned DNA
tgcccttgggcacaagactggaggtgctgac

SEQ ID NO: 10747 - DNA, 31 bp, Homo sapiens
  source 1..31: mol_type = unassigned DNA
gtcagcacctccagtcttgtgcccaagggca

SEQ ID NO: 10748 - RNA, 19 nt, Homo sapiens
  source 1..19: mol_type = unassigned RNA
cttgatgagtatagctttg

SEQ ID NO: 10749 - DNA, 19 bp, Homo sapiens
  source 1..19: mol_type = unassigned DNA
cttgatgagtatagctttg

SEQ ID NO: 10750 - DNA, 19 bp, Homo sapiens
  source 1..19: mol_type = unassigned DNA
caaagctatactcatcaag

SEQ ID NO: 10751 - RNA, 101 nt, Homo sapiens
  source 1..101: mol_type = unassigned RNA
aaactgaaacctaatcacagaactgtagtatgctgctgctcccccagcagttctcattatccctccatagacatccaggacttagtaataacccacacctc

SEQ ID NO: 10752 - DNA, 101 bp, Homo sapiens
  source 1..101: mol_type = unassigned DNA
aaactgaaacctaatcacagaactgtagtatgctgctgctcccccagcagttctcattatccctccatagacatccaggacttagtaataacccacacctc

SEQ ID NO: 10753 - DNA, 101 bp, Homo sapiens
  source 1..101: mol_type = unassigned DNA
gaggtgtgggttattactaagtcctggatgtctatggagggataatgagaactgctgggggagcagcagcatactacagttctgtgattaggtttcagttt

SEQ ID NO: 10754 - RNA, 24 nt, Homo sapiens
  source 1..24: mol_type = unassigned RNA
gcctccgtttccctggccagctca

SEQ ID NO: 10755 - DNA, 24 bp, Homo sapiens
  source 1..24: mol_type = unassigned DNA
gcctccgtttccctggccagctca

SEQ ID NO: 10756 - DNA, 24 bp, Homo sapiens
  source 1..24: mol_type = unassigned DNA
tgagctggccagggaaacggaggc

SEQ ID NO: 10757 - RNA, 45 nt, Homo sapiens
  source 1..45: mol_type = unassigned RNA
ctgaatccagacatcctgactccagaactttgtcctgcgcttgct

SEQ ID NO: 10758 - DNA, 45 bp, Homo sapiens
  source 1..45: mol_type = unassigned DNA
ctgaatccagacatcctgactccagaactttgtcctgcgcttgct

SEQ ID NO: 10759 - DNA, 45 bp, Homo sapiens
  source 1..45: mol_type = unassigned DNA
agcaagcgcaggacaaagttctggagtcaggatgtctggattcag

SEQ ID NO: 10760 - RNA, 40 nt, Homo sapiens
  source 1..40: mol_type = unassigned RNA
aggctttctacagtcccatgagggaacgactggttaatag

SEQ ID NO: 10761 - DNA, 40 bp, Homo sapiens
  source 1..40: mol_type = unassigned DNA
aggctttctacagtcccatgagggaacgactggttaatag

SEQ ID NO: 10762 - DNA, 40 bp, Homo sapiens
  source 1..40: mol_type = unassigned DNA
ctattaaccagtcgttccctcatgggactgtagaaagcct

SEQ ID NO: 10763 - RNA, 35 nt, Homo sapiens
  source 1..35: mol_type = unassigned RNA
tgcttgcagatgactggattaaactgcaaatatct

SEQ ID NO: 10764 - DNA, 35 bp, Homo sapiens
  source 1..35: mol_type = unassigned DNA
tgcttgcagatgactggattaaactgcaaatatct

SEQ ID NO: 10765 - DNA, 35 bp, Homo sapiens
  source 1..35: mol_type = unassigned DNA
agatatttgcagtttaatccagtcatctgcaagca

SEQ ID NO: 10766 - RNA, 28 nt, Homo sapiens
  source 1..28: mol_type = unassigned RNA
ctcagacaccgagccggggactcgcagc

SEQ ID NO: 10767 - DNA, 28 bp, Homo sapiens
  source 1..28: mol_type = unassigned DNA
ctcagacaccgagccggggactcgcagc

SEQ ID NO: 10768 - DNA, 28 bp, Homo sapiens
  source 1..28: mol_type = unassigned DNA
gctgcgagtccccggctcggtgtctgag

SEQ ID NO: 10769 - RNA, 31 nt, Homo sapiens
  source 1..31: mol_type = unassigned RNA
aagccatgaagtgtcagctggagaacagtgg

SEQ ID NO: 10770 - DNA, 31 bp, Homo sapiens
  source 1..31: mol_type = unassigned DNA
aagccatgaagtgtcagctggagaacagtgg

SEQ ID NO: 10771 - DNA, 31 bp, Homo sapiens
  source 1..31: mol_type = unassigned DNA
ccactgttctccagctgacacttcatggctt

SEQ ID NO: 10772 - RNA, 57 nt, Homo sapiens
  source 1..57: mol_type = unassigned RNA
tatgcaggtggtctggagatctcgctgtaataaatactgtttagaggggctctgtta

SEQ ID NO: 10773 - DNA, 57 bp, Homo sapiens
  source 1..57: mol_type = unassigned DNA
tatgcaggtggtctggagatctcgctgtaataaatactgtttagaggggctctgtta

SEQ ID NO: 10774 - DNA, 57 bp, Homo sapiens
  source 1..57: mol_type = unassigned DNA
taacagagcccctctaaacagtatttattacagcgagatctccagaccacctgcata

SEQ ID NO: 10775 - RNA, 27 nt, Homo sapiens
  source 1..27: mol_type = unassigned RNA
atattgattgtgattacttacatgcca

SEQ ID NO: 10776 - DNA, 27 bp, Homo sapiens
  source 1..27: mol_type = unassigned DNA
atattgattgtgattacttacatgcca

SEQ ID NO: 10777 - DNA, 27 bp, Homo sapiens
  source 1..27: mol_type = unassigned DNA
tggcatgtaagtaatcacaatcaatat

SEQ ID NO: 10778 - RNA, 169 nt, Homo sapiens
  source 1..169: mol_type = unassigned RNA
ttcctcatgctgggcacccacacccctccccaccggaagtctgatgggtggagctgtatgctatgagatacaccagatgtcctgtggctacaagaaactttccaggctgcagccactgtggactccagagcacggcggttcatactgggtaatagcttcttgcgatatg

SEQ ID NO: 10779 - DNA, 169 bp, Homo sapiens
  source 1..169: mol_type = unassigned DNA
ttcctcatgctgggcacccacacccctccccaccggaagtctgatgggtggagctgtatgctatgagatacaccagatgtcctgtggctacaagaaactttccaggctgcagccactgtggactccagagcacggcggttcatactgggtaatagcttcttgcgatatg

SEQ ID NO: 10780 - DNA, 169 bp, Homo sapiens
  source 1..169: mol_type = unassigned DNA
catatcgcaagaagctattacccagtatgaaccgccgtgctctggagtccacagtggctgcagcctggaaagtttcttgtagccacaggacatctggtgtatctcatagcatacagctccacccatcagacttccggtggggaggggtgtgggtgcccagcatgaggaa

SEQ ID NO: 10781 - RNA, 117 nt, Homo sapiens
  source 1..117: mol_type = unassigned RNA
tttggctgctttgttttatttaggttccagtattacagatagttccagtgcctgatgtgtataatctcgtgtgtgtagctttgggaaatttggaaatcagagagatcaggtatgtaa

SEQ ID NO: 10782 - DNA, 117 bp, Homo sapiens
  source 1..117: mol_type = unassigned DNA
tttggctgctttgttttatttaggttccagtattacagatagttccagtgcctgatgtgtataatctcgtgtgtgtagctttgggaaatttggaaatcagagagatcaggtatgtaa

SEQ ID NO: 10783 - DNA, 117 bp, Homo sapiens
  source 1..117: mol_type = unassigned DNA
ttacatacctgatctctctgatttccaaatttcccaaagctacacacacgagattatacacatcaggcactggaactatctgtaatactggaacctaaataaaacaaagcagccaaa

SEQ ID NO: 10784 - RNA, 59 nt, Homo sapiens
  source 1..59: mol_type = unassigned RNA
agccacagagcgctggagctgggaggaaccttccagatccctcaggggctggactgctt

SEQ ID NO: 10785 - DNA, 59 bp, Homo sapiens
  source 1..59: mol_type = unassigned DNA
agccacagagcgctggagctgggaggaaccttccagatccctcaggggctggactgctt

SEQ ID NO: 10786 - DNA, 59 bp, Homo sapiens
  source 1..59: mol_type = unassigned DNA
aagcagtccagcccctgagggatctggaaggttcctcccagctccagcgctctgtggct

SEQ ID NO: 10787 - RNA, 61 nt, Homo sapiens
  source 1..61: mol_type = unassigned RNA
ttctttagttcttatagagatgaggactccctttgttgcccaggctggtctcaaactcctg

SEQ ID NO: 10788 - DNA, 61 bp, Homo sapiens
  source 1..61: mol_type = unassigned DNA
ttctttagttcttatagagatgaggactccctttgttgcccaggctggtctcaaactcctg

SEQ ID NO: 10789 - DNA, 61 bp, Homo sapiens
  source 1..61: mol_type = unassigned DNA
caggagtttgagaccagcctgggcaacaaagggagtcctcatctctataagaactaaagaa

SEQ ID NO: 10790 - RNA, 57 nt, Homo sapiens
  source 1..57: mol_type = unassigned RNA
ttcttattgttaaagcagatatctatgtaactccctctgaatttacttgctcagtat

SEQ ID NO: 10791 - DNA, 57 bp, Homo sapiens
  source 1..57: mol_type = unassigned DNA
ttcttattgttaaagcagatatctatgtaactccctctgaatttacttgctcagtat

SEQ ID NO: 10792 - DNA, 57 bp, Homo sapiens
  source 1..57: mol_type = unassigned DNA
atactgagcaagtaaattcagagggagttacatagatatctgctttaacaataagaa

SEQ ID NO: 10793 - RNA, 32 nt, Homo sapiens
  source 1..32: mol_type = unassigned RNA
catctagtcagtcctctgctcccgtcaattat

SEQ ID NO: 10794 - DNA, 32 bp, Homo sapiens
  source 1..32: mol_type = unassigned DNA
catctagtcagtcctctgctcccgtcaattat

SEQ ID NO: 10795 - DNA, 32 bp, Homo sapiens
  source 1..32: mol_type = unassigned DNA
ataattgacgggagcagaggactgactagatg

SEQ ID NO: 10796 - RNA, 27 nt, Homo sapiens
  source 1..27: mol_type = unassigned RNA
gaggtgccatctgtcttgacagccagg

SEQ ID NO: 10797 - DNA, 27 bp, Homo sapiens
  source 1..27: mol_type = unassigned DNA
gaggtgccatctgtcttgacagccagg

SEQ ID NO: 10798 - DNA, 27 bp, Homo sapiens
  source 1..27: mol_type = unassigned DNA
cctggctgtcaagacagatggcacctc

SEQ ID NO: 10799 - RNA, 49 nt, Homo sapiens
  source 1..49: mol_type = unassigned RNA
ttttgagccttataataaggctagagaggcgaggaaccttgcagatcat

SEQ ID NO: 10800 - DNA, 49 bp, Homo sapiens
  source 1..49: mol_type = unassigned DNA
ttttgagccttataataaggctagagaggcgaggaaccttgcagatcat

SEQ ID NO: 10801 - DNA, 49 bp, Homo sapiens
  source 1..49: mol_type = unassigned DNA
atgatctgcaaggttcctcgcctctctagccttattataaggctcaaaa

SEQ ID NO: 10802 - RNA, 29 nt, Homo sapiens
  source 1..29: mol_type = unassigned RNA
tatacctgcagctgaactgaatggtactt

SEQ ID NO: 10803 - DNA, 29 bp, Homo sapiens
  source 1..29: mol_type = unassigned DNA
tatacctgcagctgaactgaatggtactt

SEQ ID NO: 10804 - DNA, 29 bp, Homo sapiens
  source 1..29: mol_type = unassigned DNA
aagtaccattcagttcagctgcaggtata

SEQ ID NO: 10805 - RNA, 31 nt, Homo sapiens
  source 1..31: mol_type = unassigned RNA
cacctggtgaatggccggatggactttgcct

SEQ ID NO: 10806 - DNA, 31 bp, Homo sapiens
  source 1..31: mol_type = unassigned DNA
cacctggtgaatggccggatggactttgcct

SEQ ID NO: 10807 - DNA, 31 bp, Homo sapiens
  source 1..31: mol_type = unassigned DNA
aggcaaagtccatccggccattcaccaggtg

SEQ ID NO: 10808 - RNA, 30 nt, Homo sapiens
  source 1..30: mol_type = unassigned RNA
tcctccctggacaatcagacgaattctccc

SEQ ID NO: 10809 - DNA, 30 bp, Homo sapiens
  source 1..30: mol_type = unassigned DNA
tcctccctggacaatcagacgaattctccc

SEQ ID NO: 10810 - DNA, 30 bp, Homo sapiens
  source 1..30: mol_type = unassigned DNA
gggagaattcgtctgattgtccagggagga

SEQ ID NO: 10811 - RNA, 28 nt, Homo sapiens
  source 1..28: mol_type = unassigned RNA
tcccccagccaggccccaccaggaatct

SEQ ID NO: 10812 - DNA, 28 bp, Homo sapiens
  source 1..28: mol_type = unassigned DNA
tcccccagccaggccccaccaggaatct

SEQ ID NO: 10813 - DNA, 28 bp, Homo sapiens
  source 1..28: mol_type = unassigned DNA
agattcctggtggggcctggctggggga

SEQ ID NO: 10814 - RNA, 48 nt, Homo sapiens
  source 1..48: mol_type = unassigned RNA
tgttctttatgtagaattgctgtctatgattgtactttgaatcgcttg

SEQ ID NO: 10815 - DNA, 48 bp, Homo sapiens
  source 1..48: mol_type = unassigned DNA
tgttctttatgtagaattgctgtctatgattgtactttgaatcgcttg

SEQ ID NO: 10816 - DNA, 48 bp, Homo sapiens
  source 1..48: mol_type = unassigned DNA
caagcgattcaaagtacaatcatagacagcaattctacataaagaaca

SEQ ID NO: 10817 - RNA, 52 nt, Homo sapiens
  source 1..52: mol_type = unassigned RNA
ccgcctcctggcccacgcctgcccgcgctctgcccaccagcgcctccatcgg

SEQ ID NO: 10818 - DNA, 52 bp, Homo sapiens
  source 1..52: mol_type = unassigned DNA
ccgcctcctggcccacgcctgcccgcgctctgcccaccagcgcctccatcgg

SEQ ID NO: 10819 - DNA, 52 bp, Homo sapiens
  source 1..52: mol_type = unassigned DNA
ccgatggaggcgctggtgggcagagcgcgggcaggcgtgggccaggaggcgg

SEQ ID NO: 10820 - RNA, 30 nt, Homo sapiens
  source 1..30: mol_type = unassigned RNA
attccatggcaccgtcaaggctgagaatgg

SEQ ID NO: 10821 - DNA, 30 bp, Homo sapiens
  source 1..30: mol_type = unassigned DNA
attccatggcaccgtcaaggctgagaatgg

SEQ ID NO: 10822 - DNA, 30 bp, Homo sapiens
  source 1..30: mol_type = unassigned DNA
ccattctcagccttgacggtgccatggaat

SEQ ID NO: 10823 - RNA, 28 nt, Homo sapiens
  source 1..28: mol_type = unassigned RNA
atatcgacattgtggctgtggtgaatga

SEQ ID NO: 10824 - DNA, 28 bp, Homo sapiens
  source 1..28: mol_type = unassigned DNA
atatcgacattgtggctgtggtgaatga

SEQ ID NO: 10825 - DNA, 28 bp, Homo sapiens
  source 1..28: mol_type = unassigned DNA
tcattcaccacagccacaatgtcgatat

SEQ ID NO: 10826 - RNA, 54 nt, Homo sapiens
  source 1..54: mol_type = unassigned RNA
cattccaggtggtgagtttgtagtgtggtggtttgagttcagttcaggaggaca

SEQ ID NO: 10827 - DNA, 54 bp, Homo sapiens
  source 1..54: mol_type = unassigned DNA
cattccaggtggtgagtttgtagtgtggtggtttgagttcagttcaggaggaca

SEQ ID NO: 10828 - DNA, 54 bp, Homo sapiens
  source 1..54: mol_type = unassigned DNA
tgtcctcctgaactgaactcaaaccaccacactacaaactcaccacctggaatg

SEQ ID NO: 10829 - RNA, 29 nt, Homo sapiens
  source 1..29: mol_type = unassigned RNA
tgcaatgactgtcactctggctagcacct

SEQ ID NO: 10830 - DNA, 29 bp, Homo sapiens
  source 1..29: mol_type = unassigned DNA
tgcaatgactgtcactctggctagcacct

SEQ ID NO: 10831 - DNA, 29 bp, Homo sapiens
  source 1..29: mol_type = unassigned DNA
aggtgctagccagagtgacagtcattgca

SEQ ID NO: 10832 - RNA, 44 nt, Homo sapiens
  source 1..44: mol_type = unassigned RNA
aaaccacagatgctctgaaagaagtcgtgggctgcagcacacac

SEQ ID NO: 10833 - DNA, 44 bp, Homo sapiens
  source 1..44: mol_type = unassigned DNA
aaaccacagatgctctgaaagaagtcgtgggctgcagcacacac

SEQ ID NO: 10834 - DNA, 44 bp, Homo sapiens
  source 1..44: mol_type = unassigned DNA
gtgtgtgctgcagcccacgacttctttcagagcatctgtggttt

SEQ ID NO: 10835 - RNA, 24 nt, Homo sapiens
  source 1..24: mol_type = unassigned RNA
aggaactacgtattgacagacaat

SEQ ID NO: 10836 - DNA, 24 bp, Homo sapiens
  source 1..24: mol_type = unassigned DNA
aggaactacgtattgacagacaat

SEQ ID NO: 10837 - DNA, 24 bp, Homo sapiens
  source 1..24: mol_type = unassigned DNA
attgtctgtcaatacgtagttcct

SEQ ID NO: 10838 - RNA, 24 nt, Homo sapiens
  source 1..24: mol_type = unassigned RNA
gtgcatgtttatatgggctctgat

SEQ ID NO: 10839 - DNA, 24 bp, Homo sapiens
  source 1..24: mol_type = unassigned DNA
gtgcatgtttatatgggctctgat

SEQ ID NO: 10840 - DNA, 24 bp, Homo sapiens
  source 1..24: mol_type = unassigned DNA
atcagagcccatataaacatgcac

SEQ ID NO: 10841 - RNA, 65 nt, Homo sapiens
  source 1..65: mol_type = unassigned RNA
actttttatgatggggctgtgtgggacctgacctgactcttgctaaccagatttctaaagccatc

SEQ ID NO: 10842 - DNA, 65 bp, Homo sapiens
  source 1..65: mol_type = unassigned DNA
actttttatgatggggctgtgtgggacctgacctgactcttgctaaccagatttctaaagccatc

SEQ ID NO: 10843 - DNA, 65 bp, Homo sapiens
  source 1..65: mol_type = unassigned DNA
gatggctttagaaatctggttagcaagagtcaggtcaggtcccacacagccccatcataaaaagt

SEQ ID NO: 10844 - RNA, 35 nt, Homo sapiens
  source 1..35: mol_type = unassigned RNA
gcacgtgtgccagctgccggaggaccagaagggca

SEQ ID NO: 10845 - DNA, 35 bp, Homo sapiens
  source 1..35: mol_type = unassigned DNA
gcacgtgtgccagctgccggaggaccagaagggca

SEQ ID NO: 10846 - DNA, 35 bp, Homo sapiens
  source 1..35: mol_type = unassigned DNA
tgcccttctggtcctccggcagctggcacacgtgc

SEQ ID NO: 10847 - RNA, 29 nt, Homo sapiens
  source 1..29: mol_type = unassigned RNA
ttgccgatatggagctgctgagccacata

SEQ ID NO: 10848 - DNA, 29 bp, Homo sapiens
  source 1..29: mol_type = unassigned DNA
ttgccgatatggagctgctgagccacata

SEQ ID NO: 10849 - DNA, 29 bp, Homo sapiens
  source 1..29: mol_type = unassigned DNA
tatgtggctcagcagctccatatcggcaa

SEQ ID NO: 10850 - RNA, 30 nt, Homo sapiens
  source 1..30: mol_type = unassigned RNA
gttttctcctttcccctcagaactttgaca

SEQ ID NO: 10851 - DNA, 30 bp, Homo sapiens
  source 1..30: mol_type = unassigned DNA
gttttctcctttcccctcagaactttgaca

SEQ ID NO: 10852 - DNA, 30 bp, Homo sapiens
  source 1..30: mol_type = unassigned DNA
tgtcaaagttctgaggggaaaggagaaaac

SEQ ID NO: 10853 - RNA, 165 nt, Homo sapiens
  source 1..165: mol_type = unassigned RNA
aacaggaaagcccttcttgtatgtcaatgccacagacctggatgatccggccactcccaatggccagctttattaccagattgtcatccagcttcccatgatcaacaatgtcatgtactttcagatcaacaacaaaacgggagccatctctcttacccgagaggg

SEQ ID NO: 10854 - DNA, 165 bp, Homo sapiens
  source 1..165: mol_type = unassigned DNA
aacaggaaagcccttcttgtatgtcaatgccacagacctggatgatccggccactcccaatggccagctttattaccagattgtcatccagcttcccatgatcaacaatgtcatgtactttcagatcaacaacaaaacgggagccatctctcttacccgagaggg

SEQ ID NO: 10855 - DNA, 165 bp, Homo sapiens
  source 1..165: mol_type = unassigned DNA
ccctctcgggtaagagagatggctcccgttttgttgttgatctgaaagtacatgacattgttgatcatgggaagctggatgacaatctggtaataaagctggccattgggagtggccggatcatccaggtctgtggcattgacatacaagaagggctttcctgtt

SEQ ID NO: 10856 - RNA, 21 nt, Homo sapiens
  source 1..21: mol_type = unassigned RNA
tgtttgtatcatttacatgga

SEQ ID NO: 10857 - DNA, 21 bp, Homo sapiens
  source 1..21: mol_type = unassigned DNA
tgtttgtatcatttacatgga

SEQ ID NO: 10858 - DNA, 21 bp, Homo sapiens
  source 1..21: mol_type = unassigned DNA
tccatgtaaatgatacaaaca

SEQ ID NO: 10859 - RNA, 38 nt, Homo sapiens
  source 1..38: mol_type = unassigned RNA
ctgcccttctgagctggatggaatcccttattctccca

SEQ ID NO: 10860 - DNA, 38 bp, Homo sapiens
  source 1..38: mol_type = unassigned DNA
ctgcccttctgagctggatggaatcccttattctccca

SEQ ID NO: 10861 - DNA, 38 bp, Homo sapiens
  source 1..38: mol_type = unassigned DNA
tgggagaataagggattccatccagctcagaagggcag

SEQ ID NO: 10862 - RNA, 103 nt, Homo sapiens
  source 1..103: mol_type = unassigned RNA
attattatccctggctgctgcttatcatctctggtagccaggtgtctaaccttcctgtaatctaactgacaatgcatctccttgatgtctctttttttgcttg

SEQ ID NO: 10863 - DNA, 103 bp, Homo sapiens
  source 1..103: mol_type = unassigned DNA
attattatccctggctgctgcttatcatctctggtagccaggtgtctaaccttcctgtaatctaactgacaatgcatctccttgatgtctctttttttgcttg

SEQ ID NO: 10864 - DNA, 103 bp, Homo sapiens
  source 1..103: mol_type = unassigned DNA
caagcaaaaaaagagacatcaaggagatgcattgtcagttagattacaggaaggttagacacctggctaccagagatgataagcagcagccagggataataat

SEQ ID NO: 10865 - RNA, 31 nt, Homo sapiens
  source 1..31: mol_type = unassigned RNA
aggtccaggctggccagatggatgtgaagct

SEQ ID NO: 10866 - DNA, 31 bp, Homo sapiens
  source 1..31: mol_type = unassigned DNA
aggtccaggctggccagatggatgtgaagct

SEQ ID NO: 10867 - DNA, 31 bp, Homo sapiens
  source 1..31: mol_type = unassigned DNA
agcttcacatccatctggccagcctggacct

SEQ ID NO: 10868 - RNA, 18 nt, Homo sapiens
  source 1..18: mol_type = unassigned RNA
aagccagaaggggtgtaa

SEQ ID NO: 10869 - DNA, 18 bp, Homo sapiens
  source 1..18: mol_type = unassigned DNA
aagccagaaggggtgtaa

SEQ ID NO: 10870 - DNA, 18 bp, Homo sapiens
  source 1..18: mol_type = unassigned DNA
ttacaccccttctggctt

SEQ ID NO: 10871 - RNA, 30 nt, Homo sapiens
  source 1..30: mol_type = unassigned RNA
gccctctgagagtgagctgtgggacatgtg

SEQ ID NO: 10872 - DNA, 30 bp, Homo sapiens
  source 1..30: mol_type = unassigned DNA
gccctctgagagtgagctgtgggacatgtg

SEQ ID NO: 10873 - DNA, 30 bp, Homo sapiens
  source 1..30: mol_type = unassigned DNA
cacatgtcccacagctcactctcagagggc

SEQ ID NO: 10874 - RNA, 31 nt, Homo sapiens
  source 1..31: mol_type = unassigned RNA
ataaaaactgagagcactttgaaaacaacac

SEQ ID NO: 10875 - DNA, 31 bp, Homo sapiens
  source 1..31: mol_type = unassigned DNA
ataaaaactgagagcactttgaaaacaacac

SEQ ID NO: 10876 - DNA, 31 bp, Homo sapiens
  source 1..31: mol_type = unassigned DNA
gtgttgttttcaaagtgctctcagtttttat

SEQ ID NO: 10877 - RNA, 25 nt, Homo sapiens
  source 1..25: mol_type = unassigned RNA
aaaggatttcaacttacttcaccaa

SEQ ID NO: 10878 - DNA, 25 bp, Homo sapiens
  source 1..25: mol_type = unassigned DNA
aaaggatttcaacttacttcaccaa

SEQ ID NO: 10879 - DNA, 25 bp, Homo sapiens
  source 1..25: mol_type = unassigned DNA
ttggtgaagtaagttgaaatccttt

SEQ ID NO: 10880 - RNA, 67 nt, Homo sapiens
  source 1..67: mol_type = unassigned RNA
agctctatactttggttacttatgtacctgttaccactttcaaaatctacagacactccatgtggat

SEQ ID NO: 10881 - DNA, 67 bp, Homo sapiens
  source 1..67: mol_type = unassigned DNA
agctctatactttggttacttatgtacctgttaccactttcaaaatctacagacactccatgtggat

SEQ ID NO: 10882 - DNA, 67 bp, Homo sapiens
  source 1..67: mol_type = unassigned DNA
atccacatggagtgtctgtagattttgaaagtggtaacaggtacataagtaaccaaagtatagagct

SEQ ID NO: 10883 - RNA, 32 nt, Homo sapiens
  source 1..32: mol_type = unassigned RNA
tctctggggacacgggctgtgggaagaccacg

SEQ ID NO: 10884 - DNA, 32 bp, Homo sapiens
  source 1..32: mol_type = unassigned DNA
tctctggggacacgggctgtgggaagaccacg

SEQ ID NO: 10885 - DNA, 32 bp, Homo sapiens
  source 1..32: mol_type = unassigned DNA
cgtggtcttcccacagcccgtgtccccagaga

SEQ ID NO: 10886 - RNA, 30 nt, Homo sapiens
  source 1..30: mol_type = unassigned RNA
tggtgagcatggccattggcgtccggctgc

SEQ ID NO: 10887 - DNA, 30 bp, Homo sapiens
  source 1..30: mol_type = unassigned DNA
tggtgagcatggccattggcgtccggctgc

SEQ ID NO: 10888 - DNA, 30 bp, Homo sapiens
  source 1..30: mol_type = unassigned DNA
gcagccggacgccaatggccatgctcacca

SEQ ID NO: 10889 - RNA, 59 nt, Homo sapiens
  source 1..59: mol_type = unassigned RNA
ccacactccttcgaggtctgccttcctatcccctgccacctcctccagcatctcgttcc

SEQ ID NO: 10890 - DNA, 59 bp, Homo sapiens
  source 1..59: mol_type = unassigned DNA
ccacactccttcgaggtctgccttcctatcccctgccacctcctccagcatctcgttcc

SEQ ID NO: 10891 - DNA, 59 bp, Homo sapiens
  source 1..59: mol_type = unassigned DNA
ggaacgagatgctggaggaggtggcaggggataggaaggcagacctcgaaggagtgtgg

SEQ ID NO: 10892 - RNA, 52 nt, Homo sapiens
  source 1..52: mol_type = unassigned RNA
ggaggctgaggcaggagaaccgcttgaacccaggtggcggaagttgcagtga

SEQ ID NO: 10893 - DNA, 52 bp, Homo sapiens
  source 1..52: mol_type = unassigned DNA
ggaggctgaggcaggagaaccgcttgaacccaggtggcggaagttgcagtga

SEQ ID NO: 10894 - DNA, 52 bp, Homo sapiens
  source 1..52: mol_type = unassigned DNA
tcactgcaacttccgccacctgggttcaagcggttctcctgcctcagcctcc

SEQ ID NO: 10895 - RNA, 31 nt, Homo sapiens
  source 1..31: mol_type = unassigned RNA
aaggtgtgtctgggccagagggactgggctg

SEQ ID NO: 10896 - DNA, 31 bp, Homo sapiens
  source 1..31: mol_type = unassigned DNA
aaggtgtgtctgggccagagggactgggctg

SEQ ID NO: 10897 - DNA, 31 bp, Homo sapiens
  source 1..31: mol_type = unassigned DNA
cagcccagtccctctggcccagacacacctt

SEQ ID NO: 10898 - RNA, 56 nt, Homo sapiens
  source 1..56: mol_type = unassigned RNA
aatttcggcgaattaaaagtacgaaaggggcttagtggaattgaagaccgccccat

SEQ ID NO: 10899 - DNA, 56 bp, Homo sapiens
  source 1..56: mol_type = unassigned DNA
aatttcggcgaattaaaagtacgaaaggggcttagtggaattgaagaccgccccat

SEQ ID NO: 10900 - DNA, 56 bp, Homo sapiens
  source 1..56: mol_type = unassigned DNA
atggggcggtcttcaattccactaagcccctttcgtacttttaattcgccgaaatt

SEQ ID NO: 10901 - RNA, 31 nt, Homo sapiens
  source 1..31: mol_type = unassigned RNA
ccacagaatcctctgcgccggctgcacagca

SEQ ID NO: 10902 - DNA, 31 bp, Homo sapiens
  source 1..31: mol_type = unassigned DNA
ccacagaatcctctgcgccggctgcacagca

SEQ ID NO: 10903 - DNA, 31 bp, Homo sapiens
  source 1..31: mol_type = unassigned DNA
tgctgtgcagccggcgcagaggattctgtgg

SEQ ID NO: 10904 - RNA, 65 nt, Homo sapiens
  source 1..65: mol_type = unassigned RNA
tctctctacctcttctgagacattgtgagtttggtctgcatgaactctaagattccttcctgttc

SEQ ID NO: 10905 - DNA, 65 bp, Homo sapiens
  source 1..65: mol_type = unassigned DNA
tctctctacctcttctgagacattgtgagtttggtctgcatgaactctaagattccttcctgttc

SEQ ID NO: 10906 - DNA, 65 bp, Homo sapiens
  source 1..65: mol_type = unassigned DNA
gaacaggaaggaatcttagagttcatgcagaccaaactcacaatgtctcagaagaggtagagaga

SEQ ID NO: 10907 - RNA, 79 nt, Homo sapiens
  source 1..79: mol_type = unassigned RNA
ttagataaattcctgggttgcagcccaacttcatcacttactagcactgtgactttggacaagttcatctcgagcctga

SEQ ID NO: 10908 - DNA, 79 bp, Homo sapiens
  source 1..79: mol_type = unassigned DNA
ttagataaattcctgggttgcagcccaacttcatcacttactagcactgtgactttggacaagttcatctcgagcctga

SEQ ID NO: 10909 - DNA, 79 bp, Homo sapiens
  source 1..79: mol_type = unassigned DNA
tcaggctcgagatgaacttgtccaaagtcacagtgctagtaagtgatgaagttgggctgcaacccaggaatttatctaa

SEQ ID NO: 10910 - RNA, 31 nt, Homo sapiens
  source 1..31: mol_type = unassigned RNA
gactatacactccagacctcgcttagcatgt

SEQ ID NO: 10911 - DNA, 31 bp, Homo sapiens
  source 1..31: mol_type = unassigned DNA
gactatacactccagacctcgcttagcatgt

SEQ ID NO: 10912 - DNA, 31 bp, Homo sapiens
  source 1..31: mol_type = unassigned DNA
acatgctaagcgaggtctggagtgtatagtc

SEQ ID NO: 10913 - RNA, 32 nt, Homo sapiens
  source 1..32: mol_type = unassigned RNA
atagactttcttgactgagctgtgctaataac

SEQ ID NO: 10914 - DNA, 32 bp, Homo sapiens
  source 1..32: mol_type = unassigned DNA
atagactttcttgactgagctgtgctaataac

SEQ ID NO: 10915 - DNA, 32 bp, Homo sapiens
  source 1..32: mol_type = unassigned DNA
gttattagcacagctcagtcaagaaagtctat

SEQ ID NO: 10916 - RNA, 29 nt, Homo sapiens
  source 1..29: mol_type = unassigned RNA
ccacaaattgaccggcggtcaggattgaa

SEQ ID NO: 10917 - DNA, 29 bp, Homo sapiens
  source 1..29: mol_type = unassigned DNA
ccacaaattgaccggcggtcaggattgaa

SEQ ID NO: 10918 - DNA, 29 bp, Homo sapiens
  source 1..29: mol_type = unassigned DNA
ttcaatcctgaccgccggtcaatttgtgg

SEQ ID NO: 10919 - RNA, 45 nt, Homo sapiens
  source 1..45: mol_type = unassigned RNA
cggaaagccgcacggacctctgccttggaaagccacgtattgtcc

SEQ ID NO: 10920 - DNA, 45 bp, Homo sapiens
  source 1..45: mol_type = unassigned DNA
cggaaagccgcacggacctctgccttggaaagccacgtattgtcc

SEQ ID NO: 10921 - DNA, 45 bp, Homo sapiens
  source 1..45: mol_type = unassigned DNA
ggacaatacgtggctttccaaggcagaggtccgtgcggctttccg

SEQ ID NO: 10922 - RNA, 26 nt, Homo sapiens
  source 1..26: mol_type = unassigned RNA
gaagtgtgaacgtgggaaacctgagt

SEQ ID NO: 10923 - DNA, 26 bp, Homo sapiens
  source 1..26: mol_type = unassigned DNA
gaagtgtgaacgtgggaaacctgagt

SEQ ID NO: 10924 - DNA, 26 bp, Homo sapiens
  source 1..26: mol_type = unassigned DNA
actcaggtttcccacgttcacacttc

SEQ ID NO: 10925 - RNA, 28 nt, Homo sapiens
  source 1..28: mol_type = unassigned RNA
tcaagttctggacctgggcatgacatcc

SEQ ID NO: 10926 - DNA, 28 bp, Homo sapiens
  source 1..28: mol_type = unassigned DNA
tcaagttctggacctgggcatgacatcc

SEQ ID NO: 10927 - DNA, 28 bp, Homo sapiens
  source 1..28: mol_type = unassigned DNA
ggatgtcatgcccaggtccagaacttga

SEQ ID NO: 10928 - RNA, 32 nt, Homo sapiens
  source 1..32: mol_type = unassigned RNA
ctgctattagagtgtgggtaagtagatctttt

SEQ ID NO: 10929 - DNA, 32 bp, Homo sapiens
  source 1..32: mol_type = unassigned DNA
ctgctattagagtgtgggtaagtagatctttt

SEQ ID NO: 10930 - DNA, 32 bp, Homo sapiens
  source 1..32: mol_type = unassigned DNA
aaaagatctacttacccacactctaatagcag

SEQ ID NO: 10931 - RNA, 29 nt, Homo sapiens
  source 1..29: mol_type = unassigned RNA
aatacatgtctagaactgatccagcaatt

SEQ ID NO: 10932 - DNA, 29 bp, Homo sapiens
  source 1..29: mol_type = unassigned DNA
aatacatgtctagaactgatccagcaatt

SEQ ID NO: 10933 - DNA, 29 bp, Homo sapiens
  source 1..29: mol_type = unassigned DNA
aattgctggatcagttctagacatgtatt

SEQ ID NO: 10934 - RNA, 27 nt, Homo sapiens
  source 1..27: mol_type = unassigned RNA
cagccagaaggggtgcaagatatgtta

SEQ ID NO: 10935 - DNA, 27 bp, Homo sapiens
  source 1..27: mol_type = unassigned DNA
cagccagaaggggtgcaagatatgtta

SEQ ID NO: 10936 - DNA, 27 bp, Homo sapiens
  source 1..27: mol_type = unassigned DNA
taacatatcttgcaccccttctggctg

SEQ ID NO: 10937 - RNA, 29 nt, Homo sapiens
  source 1..29: mol_type = unassigned RNA
agcctgcaacaggaactctgccccagttt

SEQ ID NO: 10938 - DNA, 29 bp, Homo sapiens
  source 1..29: mol_type = unassigned DNA
agcctgcaacaggaactctgccccagttt

SEQ ID NO: 10939 - DNA, 29 bp, Homo sapiens
  source 1..29: mol_type = unassigned DNA
aaactggggcagagttcctgttgcaggct

SEQ ID NO: 10940 - RNA, 43 nt, Homo sapiens
  source 1..43: mol_type = unassigned RNA
tctcccgatagtttcagaccaggggaagcccccatgttgtatg

SEQ ID NO: 10941 - DNA, 43 bp, Homo sapiens
  source 1..43: mol_type = unassigned DNA
tctcccgatagtttcagaccaggggaagcccccatgttgtatg

SEQ ID NO: 10942 - DNA, 43 bp, Homo sapiens
  source 1..43: mol_type = unassigned DNA
catacaacatgggggcttcccctggtctgaaactatcgggaga

SEQ ID NO: 10943 - RNA, 29 nt, Homo sapiens
  source 1..29: mol_type = unassigned RNA
gttcttcaccacgatcagactccggagtc

SEQ ID NO: 10944 - DNA, 29 bp, Homo sapiens
  source 1..29: mol_type = unassigned DNA
gttcttcaccacgatcagactccggagtc

SEQ ID NO: 10945 - DNA, 29 bp, Homo sapiens
  source 1..29: mol_type = unassigned DNA
gactccggagtctgatcgtggtgaagaac

SEQ ID NO: 10946 - RNA, 31 nt, Homo sapiens
  source 1..31: mol_type = unassigned RNA
cattttttaggggttgggggacagagaagaa

SEQ ID NO: 10947 - DNA, 31 bp, Homo sapiens
  source 1..31: mol_type = unassigned DNA
cattttttaggggttgggggacagagaagaa

SEQ ID NO: 10948 - DNA, 31 bp, Homo sapiens
  source 1..31: mol_type = unassigned DNA
ttcttctctgtcccccaacccctaaaaaatg

SEQ ID NO: 10949 - RNA, 30 nt, Homo sapiens
  source 1..30: mol_type = unassigned RNA
ccccggacaccaggccggccccgggctcca

SEQ ID NO: 10950 - DNA, 30 bp, Homo sapiens
  source 1..30: mol_type = unassigned DNA
ccccggacaccaggccggccccgggctcca

SEQ ID NO: 10951 - DNA, 30 bp, Homo sapiens
  source 1..30: mol_type = unassigned DNA
tggagcccggggccggcctggtgtccgggg

SEQ ID NO: 10952 - RNA, 39 nt, Homo sapiens
  source 1..39: mol_type = unassigned RNA
caagctacaagaactctcccaatccactacaacatttat

SEQ ID NO: 10953 - DNA, 39 bp, Homo sapiens
  source 1..39: mol_type = unassigned DNA
caagctacaagaactctcccaatccactacaacatttat

SEQ ID NO: 10954 - DNA, 39 bp, Homo sapiens
  source 1..39: mol_type = unassigned DNA
ataaatgttgtagtggattgggagagttcttgtagcttg

SEQ ID NO: 10955 - RNA, 26 nt, Homo sapiens
  source 1..26: mol_type = unassigned RNA
gattattgcatttttcagatcaaaaa

SEQ ID NO: 10956 - DNA, 26 bp, Homo sapiens
  source 1..26: mol_type = unassigned DNA
gattattgcatttttcagatcaaaaa

SEQ ID NO: 10957 - DNA, 26 bp, Homo sapiens
  source 1..26: mol_type = unassigned DNA
tttttgatctgaaaaatgcaataatc

SEQ ID NO: 10958 - RNA, 31 nt, Homo sapiens
  source 1..31: mol_type = unassigned RNA
ggagtcccttggactgagaagtgaaccagcc

SEQ ID NO: 10959 - DNA, 31 bp, Homo sapiens
  source 1..31: mol_type = unassigned DNA
ggagtcccttggactgagaagtgaaccagcc

SEQ ID NO: 10960 - DNA, 31 bp, Homo sapiens
  source 1..31: mol_type = unassigned DNA
ggctggttcacttctcagtccaagggactcc

SEQ ID NO: 10961 - RNA, 24 nt, Homo sapiens
  source 1..24: mol_type = unassigned RNA
atagtttcagaccaggggaagccc

SEQ ID NO: 10962 - DNA, 24 bp, Homo sapiens
  source 1..24: mol_type = unassigned DNA
atagtttcagaccaggggaagccc

SEQ ID NO: 10963 - DNA, 24 bp, Homo sapiens
  source 1..24: mol_type = unassigned DNA
gggcttcccctggtctgaaactat

SEQ ID NO: 10964 - RNA, 95 nt, Homo sapiens
  source 1..95: mol_type = unassigned RNA
catcttcactaccttgtagaaggctggggctcatttaaaaggagaaaccgaaagggtcatcatctctgccccctctgctgatgcccccatgtttg

SEQ ID NO: 10965 - DNA, 95 bp, Homo sapiens
  source 1..95: mol_type = unassigned DNA
catcttcactaccttgtagaaggctggggctcatttaaaaggagaaaccgaaagggtcatcatctctgccccctctgctgatgcccccatgtttg

SEQ ID NO: 10966 - DNA, 95 bp, Homo sapiens
  source 1..95: mol_type = unassigned DNA
caaacatgggggcatcagcagagggggcagagatgatgaccctttcggtttctccttttaaatgagccccagccttctacaaggtagtgaagatg

SEQ ID NO: 10967 - RNA, 29 nt, Homo sapiens
  source 1..29: mol_type = unassigned RNA
tccagctggaactcagcaagcaaacacaa

SEQ ID NO: 10968 - DNA, 29 bp, Homo sapiens
  source 1..29: mol_type = unassigned DNA
tccagctggaactcagcaagcaaacacaa

SEQ ID NO: 10969 - DNA, 29 bp, Homo sapiens
  source 1..29: mol_type = unassigned DNA
ttgtgtttgcttgctgagttccagctgga

SEQ ID NO: 10970 - RNA, 25 nt, Homo sapiens
  source 1..25: mol_type = unassigned RNA
caccaggtgactggttaaacaaaca

SEQ ID NO: 10971 - DNA, 25 bp, Homo sapiens
  source 1..25: mol_type = unassigned DNA
caccaggtgactggttaaacaaaca

SEQ ID NO: 10972 - DNA, 25 bp, Homo sapiens
  source 1..25: mol_type = unassigned DNA
tgtttgtttaaccagtcacctggtg

SEQ ID NO: 10973 - RNA, 31 nt, Homo sapiens
  source 1..31: mol_type = unassigned RNA
ccctactttgagaccagtgccaaggaggcca

SEQ ID NO: 10974 - DNA, 31 bp, Homo sapiens
  source 1..31: mol_type = unassigned DNA
ccctactttgagaccagtgccaaggaggcca

SEQ ID NO: 10975 - DNA, 31 bp, Homo sapiens
  source 1..31: mol_type = unassigned DNA
tggcctccttggcactggtctcaaagtaggg

SEQ ID NO: 10976 - RNA, 77 nt, Homo sapiens
  source 1..77: mol_type = unassigned RNA
aactgggttgggctgggttcagagacctggactgtgactgagctgagggaaagagtagagtccagtagagaaaggga

SEQ ID NO: 10977 - DNA, 77 bp, Homo sapiens
  source 1..77: mol_type = unassigned DNA
aactgggttgggctgggttcagagacctggactgtgactgagctgagggaaagagtagagtccagtagagaaaggga

SEQ ID NO: 10978 - DNA, 77 bp, Homo sapiens
  source 1..77: mol_type = unassigned DNA
tccctttctctactggactctactctttccctcagctcagtcacagtccaggtctctgaacccagcccaacccagtt

SEQ ID NO: 10979 - RNA, 154 nt, Homo sapiens
  source 1..154: mol_type = unassigned RNA
ttgtttttttgttttctctttagattatagatgaaatcttaaagatcaatgaagataccagagtacatggccttgcccttcagatctctgagaacttgtttagcaacaaagtcctcaatgccttgaaaccagaaaaagatgtggatgggtaaga

SEQ ID NO: 10980 - DNA, 154 bp, Homo sapiens
  source 1..154: mol_type = unassigned DNA
ttgtttttttgttttctctttagattatagatgaaatcttaaagatcaatgaagataccagagtacatggccttgcccttcagatctctgagaacttgtttagcaacaaagtcctcaatgccttgaaaccagaaaaagatgtggatgggtaaga

SEQ ID NO: 10981 - DNA, 154 bp, Homo sapiens
  source 1..154: mol_type = unassigned DNA
tcttacccatccacatctttttctggtttcaaggcattgaggactttgttgctaaacaagttctcagagatctgaagggcaaggccatgtactctggtatcttcattgatctttaagatttcatctataatctaaagagaaaacaaaaaaacaa

SEQ ID NO: 10982 - RNA, 40 nt, Homo sapiens
  source 1..40: mol_type = unassigned RNA
taatcacctccttgacttcagtctttgtcctcggagatcc

SEQ ID NO: 10983 - DNA, 40 bp, Homo sapiens
  source 1..40: mol_type = unassigned DNA
taatcacctccttgacttcagtctttgtcctcggagatcc

SEQ ID NO: 10984 - DNA, 40 bp, Homo sapiens
  source 1..40: mol_type = unassigned DNA
ggatctccgaggacaaagactgaagtcaaggaggtgatta

SEQ ID NO: 10985 - RNA, 106 nt, Homo sapiens
  source 1..106: mol_type = unassigned RNA
ctcaggccctgaggctggagagactgctgccaccccagctggcctagcctaccctgcaggggtgagctggtggggcagcgcccccctccggcttcacattttcttc

SEQ ID NO: 10986 - DNA, 106 bp, Homo sapiens
  source 1..106: mol_type = unassigned DNA
ctcaggccctgaggctggagagactgctgccaccccagctggcctagcctaccctgcaggggtgagctggtggggcagcgcccccctccggcttcacattttcttc

SEQ ID NO: 10987 - DNA, 106 bp, Homo sapiens
  source 1..106: mol_type = unassigned DNA
gaagaaaatgtgaagccggaggggggcgctgccccaccagctcacccctgcagggtaggctaggccagctggggtggcagcagtctctccagcctcagggcctgag

SEQ ID NO: 10988 - RNA, 26 nt, Homo sapiens
  source 1..26: mol_type = unassigned RNA
actacaaatggagtcgggtacaggtg

SEQ ID NO: 10989 - DNA, 26 bp, Homo sapiens
  source 1..26: mol_type = unassigned DNA
actacaaatggagtcgggtacaggtg

SEQ ID NO: 10990 - DNA, 26 bp, Homo sapiens
  source 1..26: mol_type = unassigned DNA
cacctgtacccgactccatttgtagt

SEQ ID NO: 10991 - RNA, 69 nt, Homo sapiens
  source 1..69: mol_type = unassigned RNA
caaaaagagtaggtagatacattggaacttcttgacgtgatctcaaaaaacctcattgtaatatgctgc

SEQ ID NO: 10992 - DNA, 69 bp, Homo sapiens
  source 1..69: mol_type = unassigned DNA
caaaaagagtaggtagatacattggaacttcttgacgtgatctcaaaaaacctcattgtaatatgctgc

SEQ ID NO: 10993 - DNA, 69 bp, Homo sapiens
  source 1..69: mol_type = unassigned DNA
gcagcatattacaatgaggttttttgagatcacgtcaagaagttccaatgtatctacctactctttttg

SEQ ID NO: 10994 - RNA, 26 nt, Homo sapiens
  source 1..26: mol_type = unassigned RNA
cttggaatgagccatgctactggtac

SEQ ID NO: 10995 - DNA, 26 bp, Homo sapiens
  source 1..26: mol_type = unassigned DNA
cttggaatgagccatgctactggtac

SEQ ID NO: 10996 - DNA, 26 bp, Homo sapiens
  source 1..26: mol_type = unassigned DNA
gtaccagtagcatggctcattccaag

SEQ ID NO: 10997 - RNA, 28 nt, Homo sapiens
  source 1..28: mol_type = unassigned RNA
tgttctccttggcacagacccgggcggg

SEQ ID NO: 10998 - DNA, 28 bp, Homo sapiens
  source 1..28: mol_type = unassigned DNA
tgttctccttggcacagacccgggcggg

SEQ ID NO: 10999 - DNA, 28 bp, Homo sapiens
  source 1..28: mol_type = unassigned DNA
cccgcccgggtctgtgccaaggagaaca

SEQ ID NO: 11000 - RNA, 30 nt, Homo sapiens
  source 1..30: mol_type = unassigned RNA
gcccagcatgtagattctggactaacagac

SEQ ID NO: 11001 - DNA, 30 bp, Homo sapiens
  source 1..30: mol_type = unassigned DNA
gcccagcatgtagattctggactaacagac

SEQ ID NO: 11002 - DNA, 30 bp, Homo sapiens
  source 1..30: mol_type = unassigned DNA
gtctgttagtccagaatctacatgctgggc

SEQ ID NO: 11003 - RNA, 36 nt, Homo sapiens
  source 1..36: mol_type = unassigned RNA
ttacatgactctaagactataagaaaatctgatggc

SEQ ID NO: 11004 - DNA, 36 bp, Homo sapiens
  source 1..36: mol_type = unassigned DNA
ttacatgactctaagactataagaaaatctgatggc

SEQ ID NO: 11005 - DNA, 36 bp, Homo sapiens
  source 1..36: mol_type = unassigned DNA
gccatcagattttcttatagtcttagagtcatgtaa

SEQ ID NO: 11006 - RNA, 23 nt, Homo sapiens
  source 1..23: mol_type = unassigned RNA
cataaaccaaagctttggaatac

SEQ ID NO: 11007 - DNA, 23 bp, Homo sapiens
  source 1..23: mol_type = unassigned DNA
cataaaccaaagctttggaatac

SEQ ID NO: 11008 - DNA, 23 bp, Homo sapiens
  source 1..23: mol_type = unassigned DNA
gtattccaaagctttggtttatg

SEQ ID NO: 11009 - RNA, 28 nt, Homo sapiens
  source 1..28: mol_type = unassigned RNA
acccactgagagcccactctgagcaaga

SEQ ID NO: 11010 - DNA, 28 bp, Homo sapiens
  source 1..28: mol_type = unassigned DNA
acccactgagagcccactctgagcaaga

SEQ ID NO: 11011 - DNA, 28 bp, Homo sapiens
  source 1..28: mol_type = unassigned DNA
tcttgctcagagtgggctctcagtgggt

SEQ ID NO: 11012 - RNA, 32 nt, Homo sapiens
  source 1..32: mol_type = unassigned RNA
atttctcactttcagtcggctttctttgccct

SEQ ID NO: 11013 - DNA, 32 bp, Homo sapiens
  source 1..32: mol_type = unassigned DNA
atttctcactttcagtcggctttctttgccct

SEQ ID NO: 11014 - DNA, 32 bp, Homo sapiens
  source 1..32: mol_type = unassigned DNA
agggcaaagaaagccgactgaaagtgagaaat

SEQ ID NO: 11015 - RNA, 31 nt, Homo sapiens
  source 1..31: mol_type = unassigned RNA
atggtggtggtgggggtgggttcctattagg

SEQ ID NO: 11016 - DNA, 31 bp, Homo sapiens
  source 1..31: mol_type = unassigned DNA
atggtggtggtgggggtgggttcctattagg

SEQ ID NO: 11017 - DNA, 31 bp, Homo sapiens
  source 1..31: mol_type = unassigned DNA
cctaataggaacccacccccaccaccaccat

SEQ ID NO: 11018 - RNA, 30 nt, Homo sapiens
  source 1..30: mol_type = unassigned RNA
acccactctgagatgacagtggctgacttc

SEQ ID NO: 11019 - DNA, 30 bp, Homo sapiens
  source 1..30: mol_type = unassigned DNA
acccactctgagatgacagtggctgacttc

SEQ ID NO: 11020 - DNA, 30 bp, Homo sapiens
  source 1..30: mol_type = unassigned DNA
gaagtcagccactgtcatctcagagtgggt

SEQ ID NO: 11021 - RNA, 28 nt, Homo sapiens
  source 1..28: mol_type = unassigned RNA
tgtggccttggagaacgtggacaccact

SEQ ID NO: 11022 - DNA, 28 bp, Homo sapiens
  source 1..28: mol_type = unassigned DNA
tgtggccttggagaacgtggacaccact

SEQ ID NO: 11023 - DNA, 28 bp, Homo sapiens
  source 1..28: mol_type = unassigned DNA
agtggtgtccacgttctccaaggccaca

SEQ ID NO: 11024 - RNA, 26 nt, Homo sapiens
  source 1..26: mol_type = unassigned RNA
tctgagctgtgcattgacagaccttt

SEQ ID NO: 11025 - DNA, 26 bp, Homo sapiens
  source 1..26: mol_type = unassigned DNA
tctgagctgtgcattgacagaccttt

SEQ ID NO: 11026 - DNA, 26 bp, Homo sapiens
  source 1..26: mol_type = unassigned DNA
aaaggtctgtcaatgcacagctcaga

SEQ ID NO: 11027 - RNA, 50 nt, Homo sapiens
  source 1..50: mol_type = unassigned RNA
agctactcttgcagaactctgattaccatatctctttcagtccaggccca

SEQ ID NO: 11028 - DNA, 50 bp, Homo sapiens
  source 1..50: mol_type = unassigned DNA
agctactcttgcagaactctgattaccatatctctttcagtccaggccca

SEQ ID NO: 11029 - DNA, 50 bp, Homo sapiens
  source 1..50: mol_type = unassigned DNA
tgggcctggactgaaagagatatggtaatcagagttctgcaagagtagct

SEQ ID NO: 11030 - RNA, 24 nt, Homo sapiens
  source 1..24: mol_type = unassigned RNA
ggaagcccttgccagaagtccctc

SEQ ID NO: 11031 - DNA, 24 bp, Homo sapiens
  source 1..24: mol_type = unassigned DNA
ggaagcccttgccagaagtccctc

SEQ ID NO: 11032 - DNA, 24 bp, Homo sapiens
  source 1..24: mol_type = unassigned DNA
gagggacttctggcaagggcttcc

SEQ ID NO: 11033 - RNA, 28 nt, Homo sapiens
  source 1..28: mol_type = unassigned RNA
aaaatttgtgctggttgtagtcacctct

SEQ ID NO: 11034 - DNA, 28 bp, Homo sapiens
  source 1..28: mol_type = unassigned DNA
aaaatttgtgctggttgtagtcacctct

SEQ ID NO: 11035 - DNA, 28 bp, Homo sapiens
  source 1..28: mol_type = unassigned DNA
agaggtgactacaaccagcacaaatttt

SEQ ID NO: 11036 - RNA, 30 nt, Homo sapiens
  source 1..30: mol_type = unassigned RNA
ggcaagtttccaggtacagggtgacctact

SEQ ID NO: 11037 - DNA, 30 bp, Homo sapiens
  source 1..30: mol_type = unassigned DNA
ggcaagtttccaggtacagggtgacctact

SEQ ID NO: 11038 - DNA, 30 bp, Homo sapiens
  source 1..30: mol_type = unassigned DNA
agtaggtcaccctgtacctggaaacttgcc

SEQ ID NO: 11039 - RNA, 24 nt, Homo sapiens
  source 1..24: mol_type = unassigned RNA
gcagcagagtccagtgtccagctc

SEQ ID NO: 11040 - DNA, 24 bp, Homo sapiens
  source 1..24: mol_type = unassigned DNA
gcagcagagtccagtgtccagctc

SEQ ID NO: 11041 - DNA, 24 bp, Homo sapiens
  source 1..24: mol_type = unassigned DNA
gagctggacactggactctgctgc

SEQ ID NO: 11042 - RNA, 43 nt, Homo sapiens
  source 1..43: mol_type = unassigned RNA
caaacgcacaccaggctggctgaggggctcaagggagtagctg

SEQ ID NO: 11043 - DNA, 43 bp, Homo sapiens
  source 1..43: mol_type = unassigned DNA
caaacgcacaccaggctggctgaggggctcaagggagtagctg

SEQ ID NO: 11044 - DNA, 43 bp, Homo sapiens
  source 1..43: mol_type = unassigned DNA
cagctactcccttgagcccctcagccagcctggtgtgcgtttg

SEQ ID NO: 11045 - RNA, 27 nt, Homo sapiens
  source 1..27: mol_type = unassigned RNA
tctctatagtccagtgtgctgggaaga

SEQ ID NO: 11046 - DNA, 27 bp, Homo sapiens
  source 1..27: mol_type = unassigned DNA
tctctatagtccagtgtgctgggaaga

SEQ ID NO: 11047 - DNA, 27 bp, Homo sapiens
  source 1..27: mol_type = unassigned DNA
tcttcccagcacactggactatagaga

SEQ ID NO: 11048 - RNA, 26 nt, Homo sapiens
  source 1..26: mol_type = unassigned RNA
ttgagatagagtggttgtgtgaaaat

SEQ ID NO: 11049 - DNA, 26 bp, Homo sapiens
  source 1..26: mol_type = unassigned DNA
ttgagatagagtggttgtgtgaaaat

SEQ ID NO: 11050 - DNA, 26 bp, Homo sapiens
  source 1..26: mol_type = unassigned DNA
attttcacacaaccactctatctcaa

SEQ ID NO: 11051 - RNA, 55 nt, Homo sapiens
  source 1..55: mol_type = unassigned RNA
gctctgtcttccagattgttacttctttatctagctgtatctaagttgttaatcc

SEQ ID NO: 11052 - DNA, 55 bp, Homo sapiens
  source 1..55: mol_type = unassigned DNA
gctctgtcttccagattgttacttctttatctagctgtatctaagttgttaatcc

SEQ ID NO: 11053 - DNA, 55 bp, Homo sapiens
  source 1..55: mol_type = unassigned DNA
ggattaacaacttagatacagctagataaagaagtaacaatctggaagacagagc

SEQ ID NO: 11054 - RNA, 45 nt, Homo sapiens
  source 1..45: mol_type = unassigned RNA
ggccttttaacctgtgacagtgccaaagtcatgttctaggagttc

SEQ ID NO: 11055 - DNA, 45 bp, Homo sapiens
  source 1..45: mol_type = unassigned DNA
ggccttttaacctgtgacagtgccaaagtcatgttctaggagttc

SEQ ID NO: 11056 - DNA, 45 bp, Homo sapiens
  source 1..45: mol_type = unassigned DNA
gaactcctagaacatgactttggcactgtcacaggttaaaaggcc

SEQ ID NO: 11057 - RNA, 144 nt, Homo sapiens
  source 1..144: mol_type = unassigned RNA
tgacagctgtgggggatatgggacagagatacaggaaggaggagcctggccagggttgcagagtgcagtaaaatcagactggggagctgagagagccctcttggagaggctttgaaatgcaggccggggagtctggacttacag

SEQ ID NO: 11058 - DNA, 144 bp, Homo sapiens
  source 1..144: mol_type = unassigned DNA
tgacagctgtgggggatatgggacagagatacaggaaggaggagcctggccagggttgcagagtgcagtaaaatcagactggggagctgagagagccctcttggagaggctttgaaatgcaggccggggagtctggacttacag

SEQ ID NO: 11059 - DNA, 144 bp, Homo sapiens
  source 1..144: mol_type = unassigned DNA
ctgtaagtccagactccccggcctgcatttcaaagcctctccaagagggctctctcagctccccagtctgattttactgcactctgcaaccctggccaggctcctccttcctgtatctctgtcccatatcccccacagctgtca

SEQ ID NO: 11060 - RNA, 55 nt, Homo sapiens
  source 1..55: mol_type = unassigned RNA
gctcttcgctgctggactttggaaactcaccagggagttggctgtgctttggagc

SEQ ID NO: 11061 - DNA, 55 bp, Homo sapiens
  source 1..55: mol_type = unassigned DNA
gctcttcgctgctggactttggaaactcaccagggagttggctgtgctttggagc

SEQ ID NO: 11062 - DNA, 55 bp, Homo sapiens
  source 1..55: mol_type = unassigned DNA
gctccaaagcacagccaactccctggtgagtttccaaagtccagcagcgaagagc

SEQ ID NO: 11063 - RNA, 81 nt, Homo sapiens
  source 1..81: mol_type = unassigned RNA
tcttttggtatgtggcagtatggaactctaggccttgactcttgcttcaaccagaacatctctgcatccagtcttaagatt

SEQ ID NO: 11064 - DNA, 81 bp, Homo sapiens
  source 1..81: mol_type = unassigned DNA
tcttttggtatgtggcagtatggaactctaggccttgactcttgcttcaaccagaacatctctgcatccagtcttaagatt

SEQ ID NO: 11065 - DNA, 81 bp, Homo sapiens
  source 1..81: mol_type = unassigned DNA
aatcttaagactggatgcagagatgttctggttgaagcaagagtcaaggcctagagttccatactgccacataccaaaaga

SEQ ID NO: 11066 - RNA, 32 nt, Homo sapiens
  source 1..32: mol_type = unassigned RNA
cacaatggtgtttgtttctctagctttatttt

SEQ ID NO: 11067 - DNA, 32 bp, Homo sapiens
  source 1..32: mol_type = unassigned DNA
cacaatggtgtttgtttctctagctttatttt

SEQ ID NO: 11068 - DNA, 32 bp, Homo sapiens
  source 1..32: mol_type = unassigned DNA
aaaataaagctagagaaacaaacaccattgtg

SEQ ID NO: 11069 - RNA, 75 nt, Homo sapiens
  source 1..75: mol_type = unassigned RNA
gagaaaattttcttttatctagtctttggttacctagttgtacagtgtaggagaggcaaaattaaatgcttgatt

SEQ ID NO: 11070 - DNA, 75 bp, Homo sapiens
  source 1..75: mol_type = unassigned DNA
gagaaaattttcttttatctagtctttggttacctagttgtacagtgtaggagaggcaaaattaaatgcttgatt

SEQ ID NO: 11071 - DNA, 75 bp, Homo sapiens
  source 1..75: mol_type = unassigned DNA
aatcaagcatttaattttgcctctcctacactgtacaactaggtaaccaaagactagataaaagaaaattttctc

SEQ ID NO: 11072 - RNA, 27 nt, Homo sapiens
  source 1..27: mol_type = unassigned RNA
ccacagaaccatggagttggcttcgaa

SEQ ID NO: 11073 - DNA, 27 bp, Homo sapiens
  source 1..27: mol_type = unassigned DNA
ccacagaaccatggagttggcttcgaa

SEQ ID NO: 11074 - DNA, 27 bp, Homo sapiens
  source 1..27: mol_type = unassigned DNA
ttcgaagccaactccatggttctgtgg

SEQ ID NO: 11075 - RNA, 52 nt, Homo sapiens
  source 1..52: mol_type = unassigned RNA
tcctccagtgaggcggctacatattcatggagttggctgactcactgaggcc

SEQ ID NO: 11076 - DNA, 52 bp, Homo sapiens
  source 1..52: mol_type = unassigned DNA
tcctccagtgaggcggctacatattcatggagttggctgactcactgaggcc

SEQ ID NO: 11077 - DNA, 52 bp, Homo sapiens
  source 1..52: mol_type = unassigned DNA
ggcctcagtgagtcagccaactccatgaatatgtagccgcctcactggagga

SEQ ID NO: 11078 - RNA, 27 nt, Homo sapiens
  source 1..27: mol_type = unassigned RNA
ccccacaagatagtcaagtgtccagcc

SEQ ID NO: 11079 - DNA, 27 bp, Homo sapiens
  source 1..27: mol_type = unassigned DNA
ccccacaagatagtcaagtgtccagcc

SEQ ID NO: 11080 - DNA, 27 bp, Homo sapiens
  source 1..27: mol_type = unassigned DNA
ggctggacacttgactatcttgtgggg

SEQ ID NO: 11081 - RNA, 55 nt, Homo sapiens
  source 1..55: mol_type = unassigned RNA
aagttatatcaaacaggttttctggtgcaatgatgatgatctgagccatgaaaaa

SEQ ID NO: 11082 - DNA, 55 bp, Homo sapiens
  source 1..55: mol_type = unassigned DNA
aagttatatcaaacaggttttctggtgcaatgatgatgatctgagccatgaaaaa

SEQ ID NO: 11083 - DNA, 55 bp, Homo sapiens
  source 1..55: mol_type = unassigned DNA
tttttcatggctcagatcatcatcattgcaccagaaaacctgtttgatataactt

SEQ ID NO: 11084 - RNA, 35 nt, Homo sapiens
  source 1..35: mol_type = unassigned RNA
gtctagggagactcgagatgtccagtgtccagctg

SEQ ID NO: 11085 - DNA, 35 bp, Homo sapiens
  source 1..35: mol_type = unassigned DNA
gtctagggagactcgagatgtccagtgtccagctg

SEQ ID NO: 11086 - DNA, 35 bp, Homo sapiens
  source 1..35: mol_type = unassigned DNA
cagctggacactggacatctcgagtctccctagac

SEQ ID NO: 11087 - RNA, 24 nt, Homo sapiens
  source 1..24: mol_type = unassigned RNA
ccctactagtccagtgcccaggcc

SEQ ID NO: 11088 - DNA, 24 bp, Homo sapiens
  source 1..24: mol_type = unassigned DNA
ccctactagtccagtgcccaggcc

SEQ ID NO: 11089 - DNA, 24 bp, Homo sapiens
  source 1..24: mol_type = unassigned DNA
ggcctgggcactggactagtaggg

SEQ ID NO: 11090 - RNA, 25 nt, Homo sapiens
  source 1..25: mol_type = unassigned RNA
atagcaaagtcatgctctagttgtt

SEQ ID NO: 11091 - DNA, 25 bp, Homo sapiens
  source 1..25: mol_type = unassigned DNA
atagcaaagtcatgctctagttgtt

SEQ ID NO: 11092 - DNA, 25 bp, Homo sapiens
  source 1..25: mol_type = unassigned DNA
aacaactagagcatgactttgctat

SEQ ID NO: 11093 - RNA, 29 nt, Homo sapiens
  source 1..29: mol_type = unassigned RNA
ttttttttttgcttgggaatgctaaaaaa

SEQ ID NO: 11094 - DNA, 29 bp, Homo sapiens
  source 1..29: mol_type = unassigned DNA
ttttttttttgcttgggaatgctaaaaaa

SEQ ID NO: 11095 - DNA, 29 bp, Homo sapiens
  source 1..29: mol_type = unassigned DNA
ttttttagcattcccaagcaaaaaaaaaa

SEQ ID NO: 11096 - RNA, 27 nt, Homo sapiens
  source 1..27: mol_type = unassigned RNA
tgttccaagtcttggtctagtagtttt

SEQ ID NO: 11097 - DNA, 27 bp, Homo sapiens
  source 1..27: mol_type = unassigned DNA
tgttccaagtcttggtctagtagtttt

SEQ ID NO: 11098 - DNA, 27 bp, Homo sapiens
  source 1..27: mol_type = unassigned DNA
aaaactactagaccaagacttggaaca

SEQ ID NO: 11099 - RNA, 36 nt, Homo sapiens
  source 1..36: mol_type = unassigned RNA
atgtttctttggttctcttgatgaatggtaacaaaa

SEQ ID NO: 11100 - DNA, 36 bp, Homo sapiens
  source 1..36: mol_type = unassigned DNA
atgtttctttggttctcttgatgaatggtaacaaaa

SEQ ID NO: 11101 - DNA, 36 bp, Homo sapiens
  source 1..36: mol_type = unassigned DNA
ttttgttaccattcatcaagagaaccaaagaaacat

SEQ ID NO: 11102 - RNA, 52 nt, Homo sapiens
  source 1..52: mol_type = unassigned RNA
ttctcagccttaaacctccagaaatagtccagtgtccagcatgatgagattc

SEQ ID NO: 11103 - DNA, 52 bp, Homo sapiens
  source 1..52: mol_type = unassigned DNA
ttctcagccttaaacctccagaaatagtccagtgtccagcatgatgagattc

SEQ ID NO: 11104 - DNA, 52 bp, Homo sapiens
  source 1..52: mol_type = unassigned DNA
gaatctcatcatgctggacactggactatttctggaggtttaaggctgagaa

SEQ ID NO: 11105 - RNA, 38 nt, Homo sapiens
  source 1..38: mol_type = unassigned RNA
ctctattttccagtgtccaggaactgtaaccctcagtt

SEQ ID NO: 11106 - DNA, 38 bp, Homo sapiens
  source 1..38: mol_type = unassigned DNA
ctctattttccagtgtccaggaactgtaaccctcagtt

SEQ ID NO: 11107 - DNA, 38 bp, Homo sapiens
  source 1..38: mol_type = unassigned DNA
aactgagggttacagttcctggacactggaaaatagag

SEQ ID NO: 11108 - RNA, 35 nt, Homo sapiens
  source 1..35: mol_type = unassigned RNA
ttcctttttatctcgctgtgtggcacaatgaaaaa

SEQ ID NO: 11109 - DNA, 35 bp, Homo sapiens
  source 1..35: mol_type = unassigned DNA
ttcctttttatctcgctgtgtggcacaatgaaaaa

SEQ ID NO: 11110 - DNA, 35 bp, Homo sapiens
  source 1..35: mol_type = unassigned DNA
tttttcattgtgccacacagcgagataaaaaggaa

SEQ ID NO: 11111 - RNA, 35 nt, Homo sapiens
  source 1..35: mol_type = unassigned RNA
gaatcgtattaataagcaaccatgagttggatgtg

SEQ ID NO: 11112 - DNA, 35 bp, Homo sapiens
  source 1..35: mol_type = unassigned DNA
gaatcgtattaataagcaaccatgagttggatgtg

SEQ ID NO: 11113 - DNA, 35 bp, Homo sapiens
  source 1..35: mol_type = unassigned DNA
cacatccaactcatggttgcttattaatacgattc

SEQ ID NO: 11114 - RNA, 67 nt, Homo sapiens
  source 1..67: mol_type = unassigned RNA
aatgagtgaggacagcaagtgtgtgttgctggaagcaagatggagttggctgtgtcagatttctctt

SEQ ID NO: 11115 - DNA, 67 bp, Homo sapiens
  source 1..67: mol_type = unassigned DNA
aatgagtgaggacagcaagtgtgtgttgctggaagcaagatggagttggctgtgtcagatttctctt

SEQ ID NO: 11116 - DNA, 67 bp, Homo sapiens
  source 1..67: mol_type = unassigned DNA
aagagaaatctgacacagccaactccatcttgcttccagcaacacacacttgctgtcctcactcatt

SEQ ID NO: 11117 - RNA, 37 nt, Homo sapiens
  source 1..37: mol_type = unassigned RNA
acagttgttttaaagtcattgtctagtagatctgcca

SEQ ID NO: 11118 - DNA, 37 bp, Homo sapiens
  source 1..37: mol_type = unassigned DNA
acagttgttttaaagtcattgtctagtagatctgcca

SEQ ID NO: 11119 - DNA, 37 bp, Homo sapiens
  source 1..37: mol_type = unassigned DNA
tggcagatctactagacaatgactttaaaacaactgt

SEQ ID NO: 11120 - RNA, 43 nt, Homo sapiens
  source 1..43: mol_type = unassigned RNA
cactattgtctagtgtccaggacactagggcccaggatgtggc

SEQ ID NO: 11121 - DNA, 43 bp, Homo sapiens
  source 1..43: mol_type = unassigned DNA
cactattgtctagtgtccaggacactagggcccaggatgtggc

SEQ ID NO: 11122 - DNA, 43 bp, Homo sapiens
  source 1..43: mol_type = unassigned DNA
gccacatcctgggccctagtgtcctggacactagacaatagtg

SEQ ID NO: 11123 - RNA, 62 nt, Homo sapiens
  source 1..62: mol_type = unassigned RNA
tccaataagcatggagttgtctgttttaacacgctgctgtcttggcctggcccttctacctg

SEQ ID NO: 11124 - DNA, 62 bp, Homo sapiens
  source 1..62: mol_type = unassigned DNA
tccaataagcatggagttgtctgttttaacacgctgctgtcttggcctggcccttctacctg

SEQ ID NO: 11125 - DNA, 62 bp, Homo sapiens
  source 1..62: mol_type = unassigned DNA
caggtagaagggccaggccaagacagcagcgtgttaaaacagacaactccatgcttattgga

SEQ ID NO: 11126 - RNA, 34 nt, Homo sapiens
  source 1..34: mol_type = unassigned RNA
tatttggattacctagctgtatgtctgaatcatc

SEQ ID NO: 11127 - DNA, 34 bp, Homo sapiens
  source 1..34: mol_type = unassigned DNA
tatttggattacctagctgtatgtctgaatcatc

SEQ ID NO: 11128 - DNA, 34 bp, Homo sapiens
  source 1..34: mol_type = unassigned DNA
gatgattcagacatacagctaggtaatccaaata

SEQ ID NO: 11129 - RNA, 27 nt, Homo sapiens
  source 1..27: mol_type = unassigned RNA
cattctattccagtgtccagggaatat

SEQ ID NO: 11130 - DNA, 27 bp, Homo sapiens
  source 1..27: mol_type = unassigned DNA
cattctattccagtgtccagggaatat

SEQ ID NO: 11131 - DNA, 27 bp, Homo sapiens
  source 1..27: mol_type = unassigned DNA
atattccctggacactggaatagaatg

SEQ ID NO: 11132 - RNA, 39 nt, Homo sapiens
  source 1..39: mol_type = unassigned RNA
gggcacggagctcagctggagggtctctggaaaggtgga

SEQ ID NO: 11133 - DNA, 39 bp, Homo sapiens
  source 1..39: mol_type = unassigned DNA
gggcacggagctcagctggagggtctctggaaaggtgga

SEQ ID NO: 11134 - DNA, 39 bp, Homo sapiens
  source 1..39: mol_type = unassigned DNA
tccacctttccagagaccctccagctgagctccgtgccc

SEQ ID NO: 11135 - RNA, 26 nt, Homo sapiens
  source 1..26: mol_type = unassigned RNA
gtttatttagttatctcctttatgat

SEQ ID NO: 11136 - DNA, 26 bp, Homo sapiens
  source 1..26: mol_type = unassigned DNA
gtttatttagttatctcctttatgat

SEQ ID NO: 11137 - DNA, 26 bp, Homo sapiens
  source 1..26: mol_type = unassigned DNA
atcataaaggagataactaaataaac

SEQ ID NO: 11138 - RNA, 43 nt, Homo sapiens
  source 1..43: mol_type = unassigned RNA
gcagttctactgcccaattccttgggttctctacatgtatgat

SEQ ID NO: 11139 - DNA, 43 bp, Homo sapiens
  source 1..43: mol_type = unassigned DNA
gcagttctactgcccaattccttgggttctctacatgtatgat

SEQ ID NO: 11140 - DNA, 43 bp, Homo sapiens
  source 1..43: mol_type = unassigned DNA
atcatacatgtagagaacccaaggaattgggcagtagaactgc

SEQ ID NO: 11141 - RNA, 40 nt, Homo sapiens
  source 1..40: mol_type = unassigned RNA
agccttgattgagacttgttttgttatctagcgtatggtc

SEQ ID NO: 11142 - DNA, 40 bp, Homo sapiens
  source 1..40: mol_type = unassigned DNA
agccttgattgagacttgttttgttatctagcgtatggtc

SEQ ID NO: 11143 - DNA, 40 bp, Homo sapiens
  source 1..40: mol_type = unassigned DNA
gaccatacgctagataacaaaacaagtctcaatcaaggct

SEQ ID NO: 11144 - RNA, 75 nt, Homo sapiens
  source 1..75: mol_type = unassigned RNA
ccattctaactggtgtgagatcgtatctcattgggattttgatttgcatttctctgatggccagtgatggtgagc

SEQ ID NO: 11145 - DNA, 75 bp, Homo sapiens
  source 1..75: mol_type = unassigned DNA
ccattctaactggtgtgagatcgtatctcattgggattttgatttgcatttctctgatggccagtgatggtgagc

SEQ ID NO: 11146 - DNA, 75 bp, Homo sapiens
  source 1..75: mol_type = unassigned DNA
gctcaccatcactggccatcagagaaatgcaaatcaaaatcccaatgagatacgatctcacaccagttagaatgg

SEQ ID NO: 11147 - RNA, 27 nt, Homo sapiens
  source 1..27: mol_type = unassigned RNA
gtatacagtcctttggagcagtggttt

SEQ ID NO: 11148 - DNA, 27 bp, Homo sapiens
  source 1..27: mol_type = unassigned DNA
gtatacagtcctttggagcagtggttt

SEQ ID NO: 11149 - DNA, 27 bp, Homo sapiens
  source 1..27: mol_type = unassigned DNA
aaaccactgctccaaaggactgtatac

SEQ ID NO: 11150 - RNA, 30 nt, Homo sapiens
  source 1..30: mol_type = unassigned RNA
gcagtggtccattgcagcagaggtttttag

SEQ ID NO: 11151 - DNA, 30 bp, Homo sapiens
  source 1..30: mol_type = unassigned DNA
gcagtggtccattgcagcagaggtttttag

SEQ ID NO: 11152 - DNA, 30 bp, Homo sapiens
  source 1..30: mol_type = unassigned DNA
ctaaaaacctctgctgcaatggaccactgc

SEQ ID NO: 11153 - RNA, 48 nt, Homo sapiens
  source 1..48: mol_type = unassigned RNA
gccattaccatggagttggatgtgctatgggcccaggcattgccagca

SEQ ID NO: 11154 - DNA, 48 bp, Homo sapiens
  source 1..48: mol_type = unassigned DNA
gccattaccatggagttggatgtgctatgggcccaggcattgccagca

SEQ ID NO: 11155 - DNA, 48 bp, Homo sapiens
  source 1..48: mol_type = unassigned DNA
tgctggcaatgcctgggcccatagcacatccaactccatggtaatggc

SEQ ID NO: 11156 - RNA, 28 nt, Homo sapiens
  source 1..28: mol_type = unassigned RNA
taatctaacactggagttggctgtcaga

SEQ ID NO: 11157 - DNA, 28 bp, Homo sapiens
  source 1..28: mol_type = unassigned DNA
taatctaacactggagttggctgtcaga

SEQ ID NO: 11158 - DNA, 28 bp, Homo sapiens
  source 1..28: mol_type = unassigned DNA
tctgacagccaactccagtgttagatta

SEQ ID NO: 11159 - RNA, 34 nt, Homo sapiens
  source 1..34: mol_type = unassigned RNA
tctagttaagccctttcccttgtctggtctcaat

SEQ ID NO: 11160 - DNA, 34 bp, Homo sapiens
  source 1..34: mol_type = unassigned DNA
tctagttaagccctttcccttgtctggtctcaat

SEQ ID NO: 11161 - DNA, 34 bp, Homo sapiens
  source 1..34: mol_type = unassigned DNA
attgagaccagacaagggaaagggcttaactaga

SEQ ID NO: 11162 - RNA, 51 nt, Homo sapiens
  source 1..51: mol_type = unassigned RNA
tattcattgtactgctgatttaaaaattaactatggatttggctgtccata

SEQ ID NO: 11163 - DNA, 51 bp, Homo sapiens
  source 1..51: mol_type = unassigned DNA
tattcattgtactgctgatttaaaaattaactatggatttggctgtccata

SEQ ID NO: 11164 - DNA, 51 bp, Homo sapiens
  source 1..51: mol_type = unassigned DNA
tatggacagccaaatccatagttaatttttaaatcagcagtacaatgaata

SEQ ID NO: 11165 - RNA, 44 nt, Homo sapiens
  source 1..44: mol_type = unassigned RNA
cttgcagtgtctttgtctggctttcctattagagtgatgttggt

SEQ ID NO: 11166 - DNA, 44 bp, Homo sapiens
  source 1..44: mol_type = unassigned DNA
cttgcagtgtctttgtctggctttcctattagagtgatgttggt

SEQ ID NO: 11167 - DNA, 44 bp, Homo sapiens
  source 1..44: mol_type = unassigned DNA
accaacatcactctaataggaaagccagacaaagacactgcaag

SEQ ID NO: 11168 - RNA, 25 nt, Homo sapiens
  source 1..25: mol_type = unassigned RNA
tcagctttttatctagctttatgag

SEQ ID NO: 11169 - DNA, 25 bp, Homo sapiens
  source 1..25: mol_type = unassigned DNA
tcagctttttatctagctttatgag

SEQ ID NO: 11170 - DNA, 25 bp, Homo sapiens
  source 1..25: mol_type = unassigned DNA
ctcataaagctagataaaaagctga

SEQ ID NO: 11171 - RNA, 44 nt, Homo sapiens
  source 1..44: mol_type = unassigned RNA
ctgtcccactctgcccttctctctgacaaggaaggggttattaa

SEQ ID NO: 11172 - DNA, 44 bp, Homo sapiens
  source 1..44: mol_type = unassigned DNA
ctgtcccactctgcccttctctctgacaaggaaggggttattaa

SEQ ID NO: 11173 - DNA, 44 bp, Homo sapiens
  source 1..44: mol_type = unassigned DNA
ttaataaccccttccttgtcagagagaagggcagagtgggacag

SEQ ID NO: 11174 - RNA, 40 nt, Homo sapiens
  source 1..40: mol_type = unassigned RNA
taaaggtcagttgaggaaatgtctgtatgtttggaatggc

SEQ ID NO: 11175 - DNA, 40 bp, Homo sapiens
  source 1..40: mol_type = unassigned DNA
taaaggtcagttgaggaaatgtctgtatgtttggaatggc

SEQ ID NO: 11176 - DNA, 40 bp, Homo sapiens
  source 1..40: mol_type = unassigned DNA
gccattccaaacatacagacatttcctcaactgaccttta

SEQ ID NO: 11177 - RNA, 31 nt, Homo sapiens
  source 1..31: mol_type = unassigned RNA
tgagttctttatctgctgtatgagctacaca

SEQ ID NO: 11178 - DNA, 31 bp, Homo sapiens
  source 1..31: mol_type = unassigned DNA
tgagttctttatctgctgtatgagctacaca

SEQ ID NO: 11179 - DNA, 31 bp, Homo sapiens
  source 1..31: mol_type = unassigned DNA
tgtgtagctcatacagcagataaagaactca

SEQ ID NO: 11180 - RNA, 53 nt, Homo sapiens
  source 1..53: mol_type = unassigned RNA
ctcccaaatatgatccatggacatctagatgaaggacgcttggcacagaagca

SEQ ID NO: 11181 - DNA, 53 bp, Homo sapiens
  source 1..53: mol_type = unassigned DNA
ctcccaaatatgatccatggacatctagatgaaggacgcttggcacagaagca

SEQ ID NO: 11182 - DNA, 53 bp, Homo sapiens
  source 1..53: mol_type = unassigned DNA
tgcttctgtgccaagcgtccttcatctagatgtccatggatcatatttgggag

SEQ ID NO: 11183 - RNA, 30 nt, Homo sapiens
  source 1..30: mol_type = unassigned RNA
catgataggatatgggacagagagtaggaa

SEQ ID NO: 11184 - DNA, 30 bp, Homo sapiens
  source 1..30: mol_type = unassigned DNA
catgataggatatgggacagagagtaggaa

SEQ ID NO: 11185 - DNA, 30 bp, Homo sapiens
  source 1..30: mol_type = unassigned DNA
ttcctactctctgtcccatatcctatcatg

SEQ ID NO: 11186 - RNA, 26 nt, Homo sapiens
  source 1..26: mol_type = unassigned RNA
tgtttcagtggagttaagttcagact

SEQ ID NO: 11187 - DNA, 26 bp, Homo sapiens
  source 1..26: mol_type = unassigned DNA
tgtttcagtggagttaagttcagact

SEQ ID NO: 11188 - DNA, 26 bp, Homo sapiens
  source 1..26: mol_type = unassigned DNA
agtctgaacttaactccactgaaaca

SEQ ID NO: 11189 - RNA, 24 nt, Homo sapiens
  source 1..24: mol_type = unassigned RNA
taggttatctgtctaatgctgaaa

SEQ ID NO: 11190 - DNA, 24 bp, Homo sapiens
  source 1..24: mol_type = unassigned DNA
taggttatctgtctaatgctgaaa

SEQ ID NO: 11191 - DNA, 24 bp, Homo sapiens
  source 1..24: mol_type = unassigned DNA
tttcagcattagacagataaccta

SEQ ID NO: 11192 - RNA, 27 nt, Homo sapiens
  source 1..27: mol_type = unassigned RNA
gcatagccagatatgggagtgagatcc

SEQ ID NO: 11193 - DNA, 27 bp, Homo sapiens
  source 1..27: mol_type = unassigned DNA
gcatagccagatatgggagtgagatcc

SEQ ID NO: 11194 - DNA, 27 bp, Homo sapiens
  source 1..27: mol_type = unassigned DNA
ggatctcactcccatatctggctatgc

SEQ ID NO: 11195 - RNA, 47 nt, Homo sapiens
  source 1..47: mol_type = unassigned RNA
atatgttggtgttgtagcttttggagtagttcgttctgcagccgtaa

SEQ ID NO: 11196 - DNA, 47 bp, Homo sapiens
  source 1..47: mol_type = unassigned DNA
atatgttggtgttgtagcttttggagtagttcgttctgcagccgtaa

SEQ ID NO: 11197 - DNA, 47 bp, Homo sapiens
  source 1..47: mol_type = unassigned DNA
ttacggctgcagaacgaactactccaaaagctacaacaccaacatat

SEQ ID NO: 11198 - RNA, 25 nt, Homo sapiens
  source 1..25: mol_type = unassigned RNA
ttatttagtagatttgtggttataa

SEQ ID NO: 11199 - DNA, 25 bp, Homo sapiens
  source 1..25: mol_type = unassigned DNA
ttatttagtagatttgtggttataa

SEQ ID NO: 11200 - DNA, 25 bp, Homo sapiens
  source 1..25: mol_type = unassigned DNA
ttataaccacaaatctactaaataa

SEQ ID NO: 11201 - RNA, 71 nt, Homo sapiens
  source 1..71: mol_type = unassigned RNA
ctctaatttaggtgttatcagtattctcgatgctcttttgatctctatctgtctgatccctgtgtttctta

SEQ ID NO: 11202 - DNA, 71 bp, Homo sapiens
  source 1..71: mol_type = unassigned DNA
ctctaatttaggtgttatcagtattctcgatgctcttttgatctctatctgtctgatccctgtgtttctta

SEQ ID NO: 11203 - DNA, 71 bp, Homo sapiens
  source 1..71: mol_type = unassigned DNA
taagaaacacagggatcagacagatagagatcaaaagagcatcgagaatactgataacacctaaattagag

SEQ ID NO: 11204 - RNA, 31 nt, Homo sapiens
  source 1..31: mol_type = unassigned RNA
acagggcttcagaggaagaacctgaatatgg

SEQ ID NO: 11205 - DNA, 31 bp, Homo sapiens
  source 1..31: mol_type = unassigned DNA
acagggcttcagaggaagaacctgaatatgg

SEQ ID NO: 11206 - DNA, 31 bp, Homo sapiens
  source 1..31: mol_type = unassigned DNA
ccatattcaggttcttcctctgaagccctgt

SEQ ID NO: 11207 - RNA, 20 nt, Homo sapiens
  source 1..20: mol_type = unassigned RNA
acaagatatgggagtgagag

SEQ ID NO: 11208 - DNA, 20 bp, Homo sapiens
  source 1..20: mol_type = unassigned DNA
acaagatatgggagtgagag

SEQ ID NO: 11209 - DNA, 20 bp, Homo sapiens
  source 1..20: mol_type = unassigned DNA
ctctcactcccatatcttgt

SEQ ID NO: 11210 - RNA, 59 nt, Homo sapiens
  source 1..59: mol_type = unassigned RNA
caacttcttttgcctgctgccacgtaagacatccctttgctcttccttcgcctttcacc

SEQ ID NO: 11211 - DNA, 59 bp, Homo sapiens
  source 1..59: mol_type = unassigned DNA
caacttcttttgcctgctgccacgtaagacatccctttgctcttccttcgcctttcacc

SEQ ID NO: 11212 - DNA, 59 bp, Homo sapiens
  source 1..59: mol_type = unassigned DNA
ggtgaaaggcgaaggaagagcaaagggatgtcttacgtggcagcaggcaaaagaagttg

SEQ ID NO: 11213 - RNA, 25 nt, Homo sapiens
  source 1..25: mol_type = unassigned RNA
cgtctgtgttttctaactgtatgtt

SEQ ID NO: 11214 - DNA, 25 bp, Homo sapiens
  source 1..25: mol_type = unassigned DNA
cgtctgtgttttctaactgtatgtt

SEQ ID NO: 11215 - DNA, 25 bp, Homo sapiens
  source 1..25: mol_type = unassigned DNA
aacatacagttagaaaacacagacg

SEQ ID NO: 11216 - RNA, 25 nt, Homo sapiens
  source 1..25: mol_type = unassigned RNA
ttatttagtagtttttgtgttttaa

SEQ ID NO: 11217 - DNA, 25 bp, Homo sapiens
  source 1..25: mol_type = unassigned DNA
ttatttagtagtttttgtgttttaa

SEQ ID NO: 11218 - DNA, 25 bp, Homo sapiens
  source 1..25: mol_type = unassigned DNA
ttaaaacacaaaaactactaaataa

SEQ ID NO: 11219 - RNA, 25 nt, Homo sapiens
  source 1..25: mol_type = unassigned RNA
ttctagtagccttttggtggagaat

SEQ ID NO: 11220 - DNA, 25 bp, Homo sapiens
  source 1..25: mol_type = unassigned DNA
ttctagtagccttttggtggagaat

SEQ ID NO: 11221 - DNA, 25 bp, Homo sapiens
  source 1..25: mol_type = unassigned DNA
attctccaccaaaaggctactagaa

SEQ ID NO: 11222 - RNA, 26 nt, Homo sapiens
  source 1..26: mol_type = unassigned RNA
ttatttaggaggattgtatagtcatt

SEQ ID NO: 11223 - DNA, 26 bp, Homo sapiens
  source 1..26: mol_type = unassigned DNA
ttatttaggaggattgtatagtcatt

SEQ ID NO: 11224 - DNA, 26 bp, Homo sapiens
  source 1..26: mol_type = unassigned DNA
aatgactatacaatcctcctaaataa

SEQ ID NO: 11225 - RNA, 34 nt, Homo sapiens
  source 1..34: mol_type = unassigned RNA
ccagaaaaaagaactcgaaaacttggctgcaatg

SEQ ID NO: 11226 - DNA, 34 bp, Homo sapiens
  source 1..34: mol_type = unassigned DNA
ccagaaaaaagaactcgaaaacttggctgcaatg

SEQ ID NO: 11227 - DNA, 34 bp, Homo sapiens
  source 1..34: mol_type = unassigned DNA
cattgcagccaagttttcgagttcttttttctgg

SEQ ID NO: 11228 - RNA, 60 nt, Homo sapiens
  source 1..60: mol_type = unassigned RNA
tatgtgactatcgggggcaggttcccccagtaaataaggtctttgagtgacttacatgga

SEQ ID NO: 11229 - DNA, 60 bp, Homo sapiens
  source 1..60: mol_type = unassigned DNA
tatgtgactatcgggggcaggttcccccagtaaataaggtctttgagtgacttacatgga

SEQ ID NO: 11230 - DNA, 60 bp, Homo sapiens
  source 1..60: mol_type = unassigned DNA
tccatgtaagtcactcaaagaccttatttactgggggaacctgcccccgatagtcacata

SEQ ID NO: 11231 - RNA, 50 nt, Homo sapiens
  source 1..50: mol_type = unassigned RNA
tgatatagcagactctacaaaatggcttggcacagaagacgccctgctcc

SEQ ID NO: 11232 - DNA, 50 bp, Homo sapiens
  source 1..50: mol_type = unassigned DNA
tgatatagcagactctacaaaatggcttggcacagaagacgccctgctcc

SEQ ID NO: 11233 - DNA, 50 bp, Homo sapiens
  source 1..50: mol_type = unassigned DNA
ggagcagggcgtcttctgtgccaagccattttgtagagtctgctatatca

SEQ ID NO: 11234 - RNA, 24 nt, Homo sapiens
  source 1..24: mol_type = unassigned RNA
ataatttattagtttgtataggat

SEQ ID NO: 11235 - DNA, 24 bp, Homo sapiens
  source 1..24: mol_type = unassigned DNA
ataatttattagtttgtataggat

SEQ ID NO: 11236 - DNA, 24 bp, Homo sapiens
  source 1..24: mol_type = unassigned DNA
atcctatacaaactaataaattat

SEQ ID NO: 11237 - RNA, 25 nt, Homo sapiens
  source 1..25: mol_type = unassigned RNA
tttaattattagtttatatagttgt

SEQ ID NO: 11238 - DNA, 25 bp, Homo sapiens
  source 1..25: mol_type = unassigned DNA
tttaattattagtttatatagttgt

SEQ ID NO: 11239 - DNA, 25 bp, Homo sapiens
  source 1..25: mol_type = unassigned DNA
acaactatataaactaataattaaa

SEQ ID NO: 11240 - RNA, 23 nt, Homo sapiens
  source 1..23: mol_type = unassigned RNA
ttggagactattgaagcctaggg

SEQ ID NO: 11241 - DNA, 23 bp, Homo sapiens
  source 1..23: mol_type = unassigned DNA
ttggagactattgaagcctaggg

SEQ ID NO: 11242 - DNA, 23 bp, Homo sapiens
  source 1..23: mol_type = unassigned DNA
ccctaggcttcaatagtctccaa

SEQ ID NO: 11243 - RNA, 26 nt, Homo sapiens
  source 1..26: mol_type = unassigned RNA
ttagttagttggttgtgaggcatctt

SEQ ID NO: 11244 - DNA, 26 bp, Homo sapiens
  source 1..26: mol_type = unassigned DNA
ttagttagttggttgtgaggcatctt

SEQ ID NO: 11245 - DNA, 26 bp, Homo sapiens
  source 1..26: mol_type = unassigned DNA
aagatgcctcacaaccaactaactaa

SEQ ID NO: 11246 - RNA, 33 nt, Homo sapiens
  source 1..33: mol_type = unassigned RNA
cgtaagtttgttgtagatattgaacgtagtaca

SEQ ID NO: 11247 - DNA, 33 bp, Homo sapiens
  source 1..33: mol_type = unassigned DNA
cgtaagtttgttgtagatattgaacgtagtaca

SEQ ID NO: 11248 - DNA, 33 bp, Homo sapiens
  source 1..33: mol_type = unassigned DNA
tgtactacgttcaatatctacaacaaacttacg

SEQ ID NO: 11249 - RNA, 30 nt, Homo sapiens
  source 1..30: mol_type = unassigned RNA
gttagaattccagtaagtgcggtaggaaaa

SEQ ID NO: 11250 - DNA, 30 bp, Homo sapiens
  source 1..30: mol_type = unassigned DNA
gttagaattccagtaagtgcggtaggaaaa

SEQ ID NO: 11251 - DNA, 30 bp, Homo sapiens
  source 1..30: mol_type = unassigned DNA
ttttcctaccgcacttactggaattctaac

SEQ ID NO: 11252 - RNA, 21 nt, Homo sapiens
  source 1..21: mol_type = unassigned RNA
ttatttagtaatttgtatagc

SEQ ID NO: 11253 - DNA, 21 bp, Homo sapiens
  source 1..21: mol_type = unassigned DNA
ttatttagtaatttgtatagc

SEQ ID NO: 11254 - DNA, 21 bp, Homo sapiens
  source 1..21: mol_type = unassigned DNA
gctatacaaattactaaataa

SEQ ID NO: 11255 - RNA, 25 nt, Homo sapiens
  source 1..25: mol_type = unassigned RNA
tgtatttagtagtttgtattgttag

SEQ ID NO: 11256 - DNA, 25 bp, Homo sapiens
  source 1..25: mol_type = unassigned DNA
tgtatttagtagtttgtattgttag

SEQ ID NO: 11257 - DNA, 25 bp, Homo sapiens
  source 1..25: mol_type = unassigned DNA
ctaacaatacaaactactaaataca

SEQ ID NO: 11258 - RNA, 22 nt, Homo sapiens
  source 1..22: mol_type = unassigned RNA
caagatcacttggcaaagaagg

SEQ ID NO: 11259 - DNA, 22 bp, Homo sapiens
  source 1..22: mol_type = unassigned DNA
caagatcacttggcaaagaagg

SEQ ID NO: 11260 - DNA, 22 bp, Homo sapiens
  source 1..22: mol_type = unassigned DNA
ccttctttgccaagtgatcttg

SEQ ID NO: 11261 - RNA, 88 nt, Homo sapiens
  source 1..88: mol_type = unassigned RNA
acacacatttatatttatttctctatctgtatgtatattaaaataagcatgggtttatactggtatctctgactaatccagcaccaca

SEQ ID NO: 11262 - DNA, 88 bp, Homo sapiens
  source 1..88: mol_type = unassigned DNA
acacacatttatatttatttctctatctgtatgtatattaaaataagcatgggtttatactggtatctctgactaatccagcaccaca

SEQ ID NO: 11263 - DNA, 88 bp, Homo sapiens
  source 1..88: mol_type = unassigned DNA
tgtggtgctggattagtcagagataccagtataaacccatgcttattttaatatacatacagatagagaaataaatataaatgtgtgt

SEQ ID NO: 11264 - RNA, 44 nt, Homo sapiens
  source 1..44: mol_type = unassigned RNA
tgatactttgtactctgtgggtagtatattcacaaaatcattga

SEQ ID NO: 11265 - DNA, 44 bp, Homo sapiens
  source 1..44: mol_type = unassigned DNA
tgatactttgtactctgtgggtagtatattcacaaaatcattga

SEQ ID NO: 11266 - DNA, 44 bp, Homo sapiens
  source 1..44: mol_type = unassigned DNA
tcaatgattttgtgaatatactacccacagagtacaaagtatca

SEQ ID NO: 11267 - RNA, 36 nt, Homo sapiens
  source 1..36: mol_type = unassigned RNA
agggatggtagttcatcaggattagttagctaaagc

SEQ ID NO: 11268 - DNA, 36 bp, Homo sapiens
  source 1..36: mol_type = unassigned DNA
agggatggtagttcatcaggattagttagctaaagc

SEQ ID NO: 11269 - DNA, 36 bp, Homo sapiens
  source 1..36: mol_type = unassigned DNA
gctttagctaactaatcctgatgaactaccatccct

SEQ ID NO: 11270 - RNA, 44 nt, Homo sapiens
  source 1..44: mol_type = unassigned RNA
tagaagaccacctgggaatacaggttctataggcttaaaaaaaa

SEQ ID NO: 11271 - DNA, 44 bp, Homo sapiens
  source 1..44: mol_type = unassigned DNA
tagaagaccacctgggaatacaggttctataggcttaaaaaaaa

SEQ ID NO: 11272 - DNA, 44 bp, Homo sapiens
  source 1..44: mol_type = unassigned DNA
ttttttttaagcctatagaacctgtattcccaggtggtcttcta

SEQ ID NO: 11273 - RNA, 23 nt, Homo sapiens
  source 1..23: mol_type = unassigned RNA
tggttctttgctgggagatgagt

SEQ ID NO: 11274 - DNA, 23 bp, Homo sapiens
  source 1..23: mol_type = unassigned DNA
tggttctttgctgggagatgagt

SEQ ID NO: 11275 - DNA, 23 bp, Homo sapiens
  source 1..23: mol_type = unassigned DNA
actcatctcccagcaaagaacca

SEQ ID NO: 11276 - RNA, 40 nt, Homo sapiens
  source 1..40: mol_type = unassigned RNA
ttcttggttatctagctaaatttgccaattttgtttgtct

SEQ ID NO: 11277 - DNA, 40 bp, Homo sapiens
  source 1..40: mol_type = unassigned DNA
ttcttggttatctagctaaatttgccaattttgtttgtct

SEQ ID NO: 11278 - DNA, 40 bp, Homo sapiens
  source 1..40: mol_type = unassigned DNA
agacaaacaaaattggcaaatttagctagataaccaagaa

SEQ ID NO: 11279 - RNA, 50 nt, Homo sapiens
  source 1..50: mol_type = unassigned RNA
atctcagattatttagtaggttttagtagttttagagctctgtttttatt

SEQ ID NO: 11280 - DNA, 50 bp, Homo sapiens
  source 1..50: mol_type = unassigned DNA
atctcagattatttagtaggttttagtagttttagagctctgtttttatt

SEQ ID NO: 11281 - DNA, 50 bp, Homo sapiens
  source 1..50: mol_type = unassigned DNA
aataaaaacagagctctaaaactactaaaacctactaaataatctgagat

SEQ ID NO: 11282 - RNA, 63 nt, Homo sapiens
  source 1..63: mol_type = unassigned RNA
ccctgtataggagtttgagacctagttcatgtcttctgtgatgaagactggctgaggagacaa

SEQ ID NO: 11283 - DNA, 63 bp, Homo sapiens
  source 1..63: mol_type = unassigned DNA
ccctgtataggagtttgagacctagttcatgtcttctgtgatgaagactggctgaggagacaa

SEQ ID NO: 11284 - DNA, 63 bp, Homo sapiens
  source 1..63: mol_type = unassigned DNA
ttgtctcctcagccagtcttcatcacagaagacatgaactaggtctcaaactcctatacaggg

SEQ ID NO: 11285 - RNA, 30 nt, Homo sapiens
  source 1..30: mol_type = unassigned RNA
attctctatctgagaactgatagaaaacag

SEQ ID NO: 11286 - DNA, 30 bp, Homo sapiens
  source 1..30: mol_type = unassigned DNA
attctctatctgagaactgatagaaaacag

SEQ ID NO: 11287 - DNA, 30 bp, Homo sapiens
  source 1..30: mol_type = unassigned DNA
ctgttttctatcagttctcagatagagaat

SEQ ID NO: 11288 - RNA, 31 nt, Homo sapiens
  source 1..31: mol_type = unassigned RNA
ctacccaagggcagaaagtagaacttactat

SEQ ID NO: 11289 - DNA, 31 bp, Homo sapiens
  source 1..31: mol_type = unassigned DNA
ctacccaagggcagaaagtagaacttactat

SEQ ID NO: 11290 - DNA, 31 bp, Homo sapiens
  source 1..31: mol_type = unassigned DNA
atagtaagttctactttctgcccttgggtag

SEQ ID NO: 11291 - RNA, 77 nt, Homo sapiens
  source 1..77: mol_type = unassigned RNA
actgaccagctctgtaaccttgggaacataacttaacccatctggaccttggtttctatctgtatgatgactcaggg

SEQ ID NO: 11292 - DNA, 77 bp, Homo sapiens
  source 1..77: mol_type = unassigned DNA
actgaccagctctgtaaccttgggaacataacttaacccatctggaccttggtttctatctgtatgatgactcaggg

SEQ ID NO: 11293 - DNA, 77 bp, Homo sapiens
  source 1..77: mol_type = unassigned DNA
ccctgagtcatcatacagatagaaaccaaggtccagatgggttaagttatgttcccaaggttacagagctggtcagt

SEQ ID NO: 11294 - RNA, 25 nt, Homo sapiens
  source 1..25: mol_type = unassigned RNA
ttttacttgttgatcagaggaattt

SEQ ID NO: 11295 - DNA, 25 bp, Homo sapiens
  source 1..25: mol_type = unassigned DNA
ttttacttgttgatcagaggaattt

SEQ ID NO: 11296 - DNA, 25 bp, Homo sapiens
  source 1..25: mol_type = unassigned DNA
aaattcctctgatcaacaagtaaaa

SEQ ID NO: 11297 - RNA, 89 nt, Homo sapiens
  source 1..89: mol_type = unassigned RNA
atcccagttccacggtttctagctgtgtgacctttaacatgtttcctcatctataaaacaagaactcaaactataaaaataattatatt

SEQ ID NO: 11298 - DNA, 89 bp, Homo sapiens
  source 1..89: mol_type = unassigned DNA
atcccagttccacggtttctagctgtgtgacctttaacatgtttcctcatctataaaacaagaactcaaactataaaaataattatatt

SEQ ID NO: 11299 - DNA, 89 bp, Homo sapiens
  source 1..89: mol_type = unassigned DNA
aatataattatttttatagtttgagttcttgttttatagatgaggaaacatgttaaaggtcacacagctagaaaccgtggaactgggat

SEQ ID NO: 11300 - RNA, 24 nt, Homo sapiens
  source 1..24: mol_type = unassigned RNA
agtacagaaaccctgaaaattcaa

SEQ ID NO: 11301 - DNA, 24 bp, Homo sapiens
  source 1..24: mol_type = unassigned DNA
agtacagaaaccctgaaaattcaa

SEQ ID NO: 11302 - DNA, 24 bp, Homo sapiens
  source 1..24: mol_type = unassigned DNA
ttgaattttcagggtttctgtact

SEQ ID NO: 11303 - RNA, 37 nt, Homo sapiens
  source 1..37: mol_type = unassigned RNA
gtgcagtgtttatcaagctgtctgacatgacaaccca

SEQ ID NO: 11304 - DNA, 37 bp, Homo sapiens
  source 1..37: mol_type = unassigned DNA
gtgcagtgtttatcaagctgtctgacatgacaaccca

SEQ ID NO: 11305 - DNA, 37 bp, Homo sapiens
  source 1..37: mol_type = unassigned DNA
tgggttgtcatgtcagacagcttgataaacactgcac

SEQ ID NO: 11306 - RNA, 37 nt, Homo sapiens
  source 1..37: mol_type = unassigned RNA
ctgcaaaggttatctactgtatgagtccaatcatatg

SEQ ID NO: 11307 - DNA, 37 bp, Homo sapiens
  source 1..37: mol_type = unassigned DNA
ctgcaaaggttatctactgtatgagtccaatcatatg

SEQ ID NO: 11308 - DNA, 37 bp, Homo sapiens
  source 1..37: mol_type = unassigned DNA
catatgattggactcatacagtagataacctttgcag

SEQ ID NO: 11309 - RNA, 41 nt, Homo sapiens
  source 1..41: mol_type = unassigned RNA
atctccttgtccctgttgcccaatgggcatagggtctacct

SEQ ID NO: 11310 - DNA, 41 bp, Homo sapiens
  source 1..41: mol_type = unassigned DNA
atctccttgtccctgttgcccaatgggcatagggtctacct

SEQ ID NO: 11311 - DNA, 41 bp, Homo sapiens
  source 1..41: mol_type = unassigned DNA
aggtagaccctatgcccattgggcaacagggacaaggagat

SEQ ID NO: 11312 - RNA, 64 nt, Homo sapiens
  source 1..64: mol_type = unassigned RNA
tgaattcacttatcagatctaggaactttttggatgagtctagggttttctagctatatgatca

SEQ ID NO: 11313 - DNA, 64 bp, Homo sapiens
  source 1..64: mol_type = unassigned DNA
tgaattcacttatcagatctaggaactttttggatgagtctagggttttctagctatatgatca

SEQ ID NO: 11314 - DNA, 64 bp, Homo sapiens
  source 1..64: mol_type = unassigned DNA
tgatcatatagctagaaaaccctagactcatccaaaaagttcctagatctgataagtgaattca

SEQ ID NO: 11315 - RNA, 24 nt, Homo sapiens
  source 1..24: mol_type = unassigned RNA
ttatgtattattttgtctatttct

SEQ ID NO: 11316 - DNA, 24 bp, Homo sapiens
  source 1..24: mol_type = unassigned DNA
ttatgtattattttgtctatttct

SEQ ID NO: 11317 - DNA, 24 bp, Homo sapiens
  source 1..24: mol_type = unassigned DNA
agaaatagacaaaataatacataa

SEQ ID NO: 11318 - RNA, 34 nt, Homo sapiens
  source 1..34: mol_type = unassigned RNA
aggggtggcctttgccttggtcttcagagatctt

SEQ ID NO: 11319 - DNA, 34 bp, Homo sapiens
  source 1..34: mol_type = unassigned DNA
aggggtggcctttgccttggtcttcagagatctt

SEQ ID NO: 11320 - DNA, 34 bp, Homo sapiens
  source 1..34: mol_type = unassigned DNA
aagatctctgaagaccaaggcaaaggccacccct

SEQ ID NO: 11321 - RNA, 26 nt, Homo sapiens
  source 1..26: mol_type = unassigned RNA
tgtctaactgtattccatggggttgc

SEQ ID NO: 11322 - DNA, 26 bp, Homo sapiens
  source 1..26: mol_type = unassigned DNA
tgtctaactgtattccatggggttgc

SEQ ID NO: 11323 - DNA, 26 bp, Homo sapiens
  source 1..26: mol_type = unassigned DNA
gcaaccccatggaatacagttagaca

SEQ ID NO: 11324 - RNA, 67 nt, Homo sapiens
  source 1..67: mol_type = unassigned RNA
aaaaaaagaatgttgtagcagagtgataactctgtgggtgtgtagctgtattttaaagtggtaaaca

SEQ ID NO: 11325 - DNA, 67 bp, Homo sapiens
  source 1..67: mol_type = unassigned DNA
aaaaaaagaatgttgtagcagagtgataactctgtgggtgtgtagctgtattttaaagtggtaaaca

SEQ ID NO: 11326 - DNA, 67 bp, Homo sapiens
  source 1..67: mol_type = unassigned DNA
tgtttaccactttaaaatacagctacacacccacagagttatcactctgctacaacattcttttttt

SEQ ID NO: 11327 - RNA, 23 nt, Homo sapiens
  source 1..23: mol_type = unassigned RNA
tgctttaaaatgttgtatagttt

SEQ ID NO: 11328 - DNA, 23 bp, Homo sapiens
  source 1..23: mol_type = unassigned DNA
tgctttaaaatgttgtatagttt

SEQ ID NO: 11329 - DNA, 23 bp, Homo sapiens
  source 1..23: mol_type = unassigned DNA
aaactatacaacattttaaagca

SEQ ID NO: 11330 - RNA, 29 nt, Homo sapiens
  source 1..29: mol_type = unassigned RNA
aatgttttgctttagtagttttatagttt

SEQ ID NO: 11331 - DNA, 29 bp, Homo sapiens
  source 1..29: mol_type = unassigned DNA
aatgttttgctttagtagttttatagttt

SEQ ID NO: 11332 - DNA, 29 bp, Homo sapiens
  source 1..29: mol_type = unassigned DNA
aaactataaaactactaaagcaaaacatt

SEQ ID NO: 11333 - RNA, 25 nt, Homo sapiens
  source 1..25: mol_type = unassigned RNA
ttttgttagtagtttgtgtgtttga

SEQ ID NO: 11334 - DNA, 25 bp, Homo sapiens
  source 1..25: mol_type = unassigned DNA
ttttgttagtagtttgtgtgtttga

SEQ ID NO: 11335 - DNA, 25 bp, Homo sapiens
  source 1..25: mol_type = unassigned DNA
tcaaacacacaaactactaacaaaa

SEQ ID NO: 11336 - RNA, 27 nt, Homo sapiens
  source 1..27: mol_type = unassigned RNA
gatgtagactattgaatgtagaataca

SEQ ID NO: 11337 - DNA, 27 bp, Homo sapiens
  source 1..27: mol_type = unassigned DNA
gatgtagactattgaatgtagaataca

SEQ ID NO: 11338 - DNA, 27 bp, Homo sapiens
  source 1..27: mol_type = unassigned DNA
tgtattctacattcaatagtctacatc

SEQ ID NO: 11339 - RNA, 38 nt, Homo sapiens
  source 1..38: mol_type = unassigned RNA
ttagttattggtttgtataatttccttggaacacaaaa

SEQ ID NO: 11340 - DNA, 38 bp, Homo sapiens
  source 1..38: mol_type = unassigned DNA
ttagttattggtttgtataatttccttggaacacaaaa

SEQ ID NO: 11341 - DNA, 38 bp, Homo sapiens
  source 1..38: mol_type = unassigned DNA
ttttgtgttccaaggaaattatacaaaccaataactaa

SEQ ID NO: 11342 - RNA, 44 nt, Homo sapiens
  source 1..44: mol_type = unassigned RNA
actttcttcttaatgctgtattatctagtatgttgtatctttat

SEQ ID NO: 11343 - DNA, 44 bp, Homo sapiens
  source 1..44: mol_type = unassigned DNA
actttcttcttaatgctgtattatctagtatgttgtatctttat

SEQ ID NO: 11344 - DNA, 44 bp, Homo sapiens
  source 1..44: mol_type = unassigned DNA
ataaagatacaacatactagataatacagcattaagaagaaagt

SEQ ID NO: 11345 - RNA, 22 nt, Homo sapiens
  source 1..22: mol_type = unassigned RNA
tgcctggtttctagctgtatct

SEQ ID NO: 11346 - DNA, 22 bp, Homo sapiens
  source 1..22: mol_type = unassigned DNA
tgcctggtttctagctgtatct

SEQ ID NO: 11347 - DNA, 22 bp, Homo sapiens
  source 1..22: mol_type = unassigned DNA
agatacagctagaaaccaggca

SEQ ID NO: 11348 - RNA, 35 nt, Homo sapiens
  source 1..35: mol_type = unassigned RNA
atctgccactggtgttgttatttagctgtttgagt

SEQ ID NO: 11349 - DNA, 35 bp, Homo sapiens
  source 1..35: mol_type = unassigned DNA
atctgccactggtgttgttatttagctgtttgagt

SEQ ID NO: 11350 - DNA, 35 bp, Homo sapiens
  source 1..35: mol_type = unassigned DNA
actcaaacagctaaataacaacaccagtggcagat

SEQ ID NO: 11351 - RNA, 27 nt, Homo sapiens
  source 1..27: mol_type = unassigned RNA
cagccaggtagccatagtggagaacag

SEQ ID NO: 11352 - DNA, 27 bp, Homo sapiens
  source 1..27: mol_type = unassigned DNA
cagccaggtagccatagtggagaacag

SEQ ID NO: 11353 - DNA, 27 bp, Homo sapiens
  source 1..27: mol_type = unassigned DNA
ctgttctccactatggctacctggctg

SEQ ID NO: 11354 - RNA, 38 nt, Homo sapiens
  source 1..38: mol_type = unassigned RNA
taaggataatggaaattaggtttctcactgatggtgaa

SEQ ID NO: 11355 - DNA, 38 bp, Homo sapiens
  source 1..38: mol_type = unassigned DNA
taaggataatggaaattaggtttctcactgatggtgaa

SEQ ID NO: 11356 - DNA, 38 bp, Homo sapiens
  source 1..38: mol_type = unassigned DNA
ttcaccatcagtgagaaacctaatttccattatcctta

SEQ ID NO: 11357 - RNA, 26 nt, Homo sapiens
  source 1..26: mol_type = unassigned RNA
gttcttttattaactagctgtattct

SEQ ID NO: 11358 - DNA, 26 bp, Homo sapiens
  source 1..26: mol_type = unassigned DNA
gttcttttattaactagctgtattct

SEQ ID NO: 11359 - DNA, 26 bp, Homo sapiens
  source 1..26: mol_type = unassigned DNA
agaatacagctagttaataaaagaac

SEQ ID NO: 11360 - RNA, 88 nt, Homo sapiens
  source 1..88: mol_type = unassigned RNA
gcccaggagcctggtgggaataggggctgtaggctgtattcttacagtgtatcgggttctcacgactggtgctcagacctgtggatct

SEQ ID NO: 11361 - DNA, 88 bp, Homo sapiens
  source 1..88: mol_type = unassigned DNA
gcccaggagcctggtgggaataggggctgtaggctgtattcttacagtgtatcgggttctcacgactggtgctcagacctgtggatct

SEQ ID NO: 11362 - DNA, 88 bp, Homo sapiens
  source 1..88: mol_type = unassigned DNA
agatccacaggtctgagcaccagtcgtgagaacccgatacactgtaagaatacagcctacagcccctattcccaccaggctcctgggc

SEQ ID NO: 11363 - RNA, 22 nt, Homo sapiens
  source 1..22: mol_type = unassigned RNA
atagtgactattgaaagtaggt

SEQ ID NO: 11364 - DNA, 22 bp, Homo sapiens
  source 1..22: mol_type = unassigned DNA
atagtgactattgaaagtaggt

SEQ ID NO: 11365 - DNA, 22 bp, Homo sapiens
  source 1..22: mol_type = unassigned DNA
acctactttcaatagtcactat

SEQ ID NO: 11366 - RNA, 31 nt, Homo sapiens
  source 1..31: mol_type = unassigned RNA
ttgactgtagtgaaccatgctactgtgaaca

SEQ ID NO: 11367 - DNA, 31 bp, Homo sapiens
  source 1..31: mol_type = unassigned DNA
ttgactgtagtgaaccatgctactgtgaaca

SEQ ID NO: 11368 - DNA, 31 bp, Homo sapiens
  source 1..31: mol_type = unassigned DNA
tgttcacagtagcatggttcactacagtcaa

SEQ ID NO: 11369 - RNA, 112 nt, Homo sapiens
  source 1..112: mol_type = unassigned RNA
tctacttgtatctaactgaatgtccatgactgagtggttattagctgggtgtggtggcacacacctgtggtcccagctactggggggctgcggtgggaggattgcttgagcc

SEQ ID NO: 11370 - DNA, 112 bp, Homo sapiens
  source 1..112: mol_type = unassigned DNA
tctacttgtatctaactgaatgtccatgactgagtggttattagctgggtgtggtggcacacacctgtggtcccagctactggggggctgcggtgggaggattgcttgagcc

SEQ ID NO: 11371 - DNA, 112 bp, Homo sapiens
  source 1..112: mol_type = unassigned DNA
ggctcaagcaatcctcccaccgcagccccccagtagctgggaccacaggtgtgtgccaccacacccagctaataaccactcagtcatggacattcagttagatacaagtaga

SEQ ID NO: 11372 - RNA, 23 nt, Homo sapiens
  source 1..23: mol_type = unassigned RNA
tcctagttaactggtctcttgtt

SEQ ID NO: 11373 - DNA, 23 bp, Homo sapiens
  source 1..23: mol_type = unassigned DNA
tcctagttaactggtctcttgtt

SEQ ID NO: 11374 - DNA, 23 bp, Homo sapiens
  source 1..23: mol_type = unassigned DNA
aacaagagaccagttaactagga

SEQ ID NO: 11375 - RNA, 171 nt, Homo sapiens
  source 1..171: mol_type = unassigned RNA
ccacattgcatttagttgtcatgactccttatgctgttccaacctgtgacagttctaatgaggacatttaaaggaagtgtgcccctcgcccaccaaaaggaagaaagagccatagactctgaatgtaattccaaaaatatctttgtctctgtagctgtcttgtcaactatg

SEQ ID NO: 11376 - DNA, 171 bp, Homo sapiens
  source 1..171: mol_type = unassigned DNA
ccacattgcatttagttgtcatgactccttatgctgttccaacctgtgacagttctaatgaggacatttaaaggaagtgtgcccctcgcccaccaaaaggaagaaagagccatagactctgaatgtaattccaaaaatatctttgtctctgtagctgtcttgtcaactatg

SEQ ID NO: 11377 - DNA, 171 bp, Homo sapiens
  source 1..171: mol_type = unassigned DNA
catagttgacaagacagctacagagacaaagatatttttggaattacattcagagtctatggctctttcttccttttggtgggcgaggggcacacttcctttaaatgtcctcattagaactgtcacaggttggaacagcataaggagtcatgacaactaaatgcaatgtgg

SEQ ID NO: 11378 - RNA, 27 nt, Homo sapiens
  source 1..27: mol_type = unassigned RNA
gaggagtttggaggctgtaagagcacc

SEQ ID NO: 11379 - DNA, 27 bp, Homo sapiens
  source 1..27: mol_type = unassigned DNA
gaggagtttggaggctgtaagagcacc

SEQ ID NO: 11380 - DNA, 27 bp, Homo sapiens
  source 1..27: mol_type = unassigned DNA
ggtgctcttacagcctccaaactcctc

SEQ ID NO: 11381 - RNA, 42 nt, Homo sapiens
  source 1..42: mol_type = unassigned RNA
tttaaccattctgactggtgtgagatcgtatctcattttgat

SEQ ID NO: 11382 - DNA, 42 bp, Homo sapiens
  source 1..42: mol_type = unassigned DNA
tttaaccattctgactggtgtgagatcgtatctcattttgat

SEQ ID NO: 11383 - DNA, 42 bp, Homo sapiens
  source 1..42: mol_type = unassigned DNA
atcaaaatgagatacgatctcacaccagtcagaatggttaaa

SEQ ID NO: 11384 - RNA, 23 nt, Homo sapiens
  source 1..23: mol_type = unassigned RNA
tctttttttgtctagctgtttgt

SEQ ID NO: 11385 - DNA, 23 bp, Homo sapiens
  source 1..23: mol_type = unassigned DNA
tctttttttgtctagctgtttgt

SEQ ID NO: 11386 - DNA, 23 bp, Homo sapiens
  source 1..23: mol_type = unassigned DNA
acaaacagctagacaaaaaaaga

SEQ ID NO: 11387 - RNA, 29 nt, Homo sapiens
  source 1..29: mol_type = unassigned RNA
tctcagtgggacttctgactggaacagtc

SEQ ID NO: 11388 - DNA, 29 bp, Homo sapiens
  source 1..29: mol_type = unassigned DNA
tctcagtgggacttctgactggaacagtc

SEQ ID NO: 11389 - DNA, 29 bp, Homo sapiens
  source 1..29: mol_type = unassigned DNA
gactgttccagtcagaagtcccactgaga

SEQ ID NO: 11390 - RNA, 75 nt, Homo sapiens
  source 1..75: mol_type = unassigned RNA
aacatccactgcaatcactttcatacctgtagtacattcgttatctctgtgtctctgccacttaatcttcacagt

SEQ ID NO: 11391 - DNA, 75 bp, Homo sapiens
  source 1..75: mol_type = unassigned DNA
aacatccactgcaatcactttcatacctgtagtacattcgttatctctgtgtctctgccacttaatcttcacagt

SEQ ID NO: 11392 - DNA, 75 bp, Homo sapiens
  source 1..75: mol_type = unassigned DNA
actgtgaagattaagtggcagagacacagagataacgaatgtactacaggtatgaaagtgattgcagtggatgtt

SEQ ID NO: 11393 - RNA, 28 nt, Homo sapiens
  source 1..28: mol_type = unassigned RNA
gggctccctgttgctttaggcttagaaa

SEQ ID NO: 11394 - DNA, 28 bp, Homo sapiens
  source 1..28: mol_type = unassigned DNA
gggctccctgttgctttaggcttagaaa

SEQ ID NO: 11395 - DNA, 28 bp, Homo sapiens
  source 1..28: mol_type = unassigned DNA
tttctaagcctaaagcaacagggagccc

SEQ ID NO: 11396 - RNA, 37 nt, Homo sapiens
  source 1..37: mol_type = unassigned RNA
tattaatgatgctacctgacttccaaggctagataat

SEQ ID NO: 11397 - DNA, 37 bp, Homo sapiens
  source 1..37: mol_type = unassigned DNA
tattaatgatgctacctgacttccaaggctagataat

SEQ ID NO: 11398 - DNA, 37 bp, Homo sapiens
  source 1..37: mol_type = unassigned DNA
attatctagccttggaagtcaggtagcatcattaata

SEQ ID NO: 11399 - RNA, 30 nt, Homo sapiens
  source 1..30: mol_type = unassigned RNA
atttgcggttatctagccgcatgtgtaagt

SEQ ID NO: 11400 - DNA, 30 bp, Homo sapiens
  source 1..30: mol_type = unassigned DNA
atttgcggttatctagccgcatgtgtaagt

SEQ ID NO: 11401 - DNA, 30 bp, Homo sapiens
  source 1..30: mol_type = unassigned DNA
acttacacatgcggctagataaccgcaaat

SEQ ID NO: 11402 - RNA, 64 nt, Homo sapiens
  source 1..64: mol_type = unassigned RNA
gctcactgtttctagtggaaagaggcacattaactctttcagaccactagaatccatttaccaa

SEQ ID NO: 11403 - DNA, 64 bp, Homo sapiens
  source 1..64: mol_type = unassigned DNA
gctcactgtttctagtggaaagaggcacattaactctttcagaccactagaatccatttaccaa

SEQ ID NO: 11404 - DNA, 64 bp, Homo sapiens
  source 1..64: mol_type = unassigned DNA
ttggtaaatggattctagtggtctgaaagagttaatgtgcctctttccactagaaacagtgagc

SEQ ID NO: 11405 - RNA, 63 nt, Homo sapiens
  source 1..63: mol_type = unassigned RNA
aatgtgagtatttgctaatttgtaagttgtgtggttgagtttatctgattacttcatgacatc

SEQ ID NO: 11406 - DNA, 63 bp, Homo sapiens
  source 1..63: mol_type = unassigned DNA
aatgtgagtatttgctaatttgtaagttgtgtggttgagtttatctgattacttcatgacatc

SEQ ID NO: 11407 - DNA, 63 bp, Homo sapiens
  source 1..63: mol_type = unassigned DNA
gatgtcatgaagtaatcagataaactcaaccacacaacttacaaattagcaaatactcacatt

SEQ ID NO: 11408 - RNA, 38 nt, Homo sapiens
  source 1..38: mol_type = unassigned RNA
aagattttgagtcagagacattgtaagggcaatgtagg

SEQ ID NO: 11409 - DNA, 38 bp, Homo sapiens
  source 1..38: mol_type = unassigned DNA
aagattttgagtcagagacattgtaagggcaatgtagg

SEQ ID NO: 11410 - DNA, 38 bp, Homo sapiens
  source 1..38: mol_type = unassigned DNA
cctacattgcccttacaatgtctctgactcaaaatctt

SEQ ID NO: 11411 - RNA, 23 nt, Homo sapiens
  source 1..23: mol_type = unassigned RNA
atttttgttatgaattacattga

SEQ ID NO: 11412 - DNA, 23 bp, Homo sapiens
  source 1..23: mol_type = unassigned DNA
atttttgttatgaattacattga

SEQ ID NO: 11413 - DNA, 23 bp, Homo sapiens
  source 1..23: mol_type = unassigned DNA
tcaatgtaattcataacaaaaat

SEQ ID NO: 11414 - RNA, 26 nt, Homo sapiens
  source 1..26: mol_type = unassigned RNA
ccctcaataccgggtctgtagggcca

SEQ ID NO: 11415 - DNA, 26 bp, Homo sapiens
  source 1..26: mol_type = unassigned DNA
ccctcaataccgggtctgtagggcca

SEQ ID NO: 11416 - DNA, 26 bp, Homo sapiens
  source 1..26: mol_type = unassigned DNA
tggccctacagacccggtattgaggg

SEQ ID NO: 11417 - RNA, 57 nt, Homo sapiens
  source 1..57: mol_type = unassigned RNA
tcttcttgcatctgttgatcaatggacccatttgcttgtgtcacaagtacttctcct

SEQ ID NO: 11418 - DNA, 57 bp, Homo sapiens
  source 1..57: mol_type = unassigned DNA
tcttcttgcatctgttgatcaatggacccatttgcttgtgtcacaagtacttctcct

SEQ ID NO: 11419 - DNA, 57 bp, Homo sapiens
  source 1..57: mol_type = unassigned DNA
aggagaagtacttgtgacacaagcaaatgggtccattgatcaacagatgcaagaaga

SEQ ID NO: 11420 - RNA, 27 nt, Homo sapiens
  source 1..27: mol_type = unassigned RNA
ggttctatgtcaacatattgccaaaca

SEQ ID NO: 11421 - DNA, 27 bp, Homo sapiens
  source 1..27: mol_type = unassigned DNA
ggttctatgtcaacatattgccaaaca

SEQ ID NO: 11422 - DNA, 27 bp, Homo sapiens
  source 1..27: mol_type = unassigned DNA
tgtttggcaatatgttgacatagaacc

SEQ ID NO: 11423 - RNA, 43 nt, Homo sapiens
  source 1..43: mol_type = unassigned RNA
tctcacactgtcctgagacatgccactggttcaaggggctgtc

SEQ ID NO: 11424 - DNA, 43 bp, Homo sapiens
  source 1..43: mol_type = unassigned DNA
tctcacactgtcctgagacatgccactggttcaaggggctgtc

SEQ ID NO: 11425 - DNA, 43 bp, Homo sapiens
  source 1..43: mol_type = unassigned DNA
gacagccccttgaaccagtggcatgtctcaggacagtgtgaga

SEQ ID NO: 11426 - RNA, 29 nt, Homo sapiens
  source 1..29: mol_type = unassigned RNA
taaggtctagtaggttggtggtttgtttt

SEQ ID NO: 11427 - DNA, 29 bp, Homo sapiens
  source 1..29: mol_type = unassigned DNA
taaggtctagtaggttggtggtttgtttt

SEQ ID NO: 11428 - DNA, 29 bp, Homo sapiens
  source 1..29: mol_type = unassigned DNA
aaaacaaaccaccaacctactagacctta

SEQ ID NO: 11429 - RNA, 25 nt, Homo sapiens
  source 1..25: mol_type = unassigned RNA
agctttgtttgtctaactgtatggg

SEQ ID NO: 11430 - DNA, 25 bp, Homo sapiens
  source 1..25: mol_type = unassigned DNA
agctttgtttgtctaactgtatggg

SEQ ID NO: 11431 - DNA, 25 bp, Homo sapiens
  source 1..25: mol_type = unassigned DNA
cccatacagttagacaaacaaagct

SEQ ID NO: 11432 - RNA, 58 nt, Homo sapiens
  source 1..58: mol_type = unassigned RNA
tagtgtattagtttgttcagtaattcagtgaggaactatcaggatctatctcggcttg

SEQ ID NO: 11433 - DNA, 58 bp, Homo sapiens
  source 1..58: mol_type = unassigned DNA
tagtgtattagtttgttcagtaattcagtgaggaactatcaggatctatctcggcttg

SEQ ID NO: 11434 - DNA, 58 bp, Homo sapiens
  source 1..58: mol_type = unassigned DNA
caagccgagatagatcctgatagttcctcactgaattactgaacaaactaatacacta

SEQ ID NO: 11435 - RNA, 31 nt, Homo sapiens
  source 1..31: mol_type = unassigned RNA
catcaactaagctccttgagaacatgggctt

SEQ ID NO: 11436 - DNA, 31 bp, Homo sapiens
  source 1..31: mol_type = unassigned DNA
catcaactaagctccttgagaacatgggctt

SEQ ID NO: 11437 - DNA, 31 bp, Homo sapiens
  source 1..31: mol_type = unassigned DNA
aagcccatgttctcaaggagcttagttgatg

SEQ ID NO: 11438 - RNA, 33 nt, Homo sapiens
  source 1..33: mol_type = unassigned RNA
aagacgcagcctgtcagcggtgcataatggatc

SEQ ID NO: 11439 - DNA, 33 bp, Homo sapiens
  source 1..33: mol_type = unassigned DNA
aagacgcagcctgtcagcggtgcataatggatc

SEQ ID NO: 11440 - DNA, 33 bp, Homo sapiens
  source 1..33: mol_type = unassigned DNA
gatccattatgcaccgctgacaggctgcgtctt

SEQ ID NO: 11441 - RNA, 56 nt, Homo sapiens
  source 1..56: mol_type = unassigned RNA
agacaaggggatgatcatgaagcagccatgatctgatctcattgccgtttttgact

SEQ ID NO: 11442 - DNA, 56 bp, Homo sapiens
  source 1..56: mol_type = unassigned DNA
agacaaggggatgatcatgaagcagccatgatctgatctcattgccgtttttgact

SEQ ID NO: 11443 - DNA, 56 bp, Homo sapiens
  source 1..56: mol_type = unassigned DNA
agtcaaaaacggcaatgagatcagatcatggctgcttcatgatcatccccttgtct

SEQ ID NO: 11444 - RNA, 78 nt, Homo sapiens
  source 1..78: mol_type = unassigned RNA
tttcactggattaaagttatttatttatatgtctgtctctggcactatactgagctctttgaggtcagggattatggc

SEQ ID NO: 11445 - DNA, 78 bp, Homo sapiens
  source 1..78: mol_type = unassigned DNA
tttcactggattaaagttatttatttatatgtctgtctctggcactatactgagctctttgaggtcagggattatggc

SEQ ID NO: 11446 - DNA, 78 bp, Homo sapiens
  source 1..78: mol_type = unassigned DNA
gccataatccctgacctcaaagagctcagtatagtgccagagacagacatataaataaataactttaatccagtgaaa

SEQ ID NO: 11447 - RNA, 59 nt, Homo sapiens
  source 1..59: mol_type = unassigned RNA
caactaatggatgataggaggccttcttcttgttccttgactagttattagctgtatgg

SEQ ID NO: 11448 - DNA, 59 bp, Homo sapiens
  source 1..59: mol_type = unassigned DNA
caactaatggatgataggaggccttcttcttgttccttgactagttattagctgtatgg

SEQ ID NO: 11449 - DNA, 59 bp, Homo sapiens
  source 1..59: mol_type = unassigned DNA
ccatacagctaataactagtcaaggaacaagaagaaggcctcctatcatccattagttg

SEQ ID NO: 11450 - RNA, 34 nt, Homo sapiens
  source 1..34: mol_type = unassigned RNA
actttctgtggctcaatggacttaatgtagaaga

SEQ ID NO: 11451 - DNA, 34 bp, Homo sapiens
  source 1..34: mol_type = unassigned DNA
actttctgtggctcaatggacttaatgtagaaga

SEQ ID NO: 11452 - DNA, 34 bp, Homo sapiens
  source 1..34: mol_type = unassigned DNA
tcttctacattaagtccattgagccacagaaagt

SEQ ID NO: 11453 - RNA, 94 nt, Homo sapiens
  source 1..94: mol_type = unassigned RNA
tgtggcatctgggtcttgaggtccttgttcattctctgtggctgggctgcatataggttgcccacagagactggacatgtgactctgaggcacc

SEQ ID NO: 11454 - DNA, 94 bp, Homo sapiens
  source 1..94: mol_type = unassigned DNA
tgtggcatctgggtcttgaggtccttgttcattctctgtggctgggctgcatataggttgcccacagagactggacatgtgactctgaggcacc

SEQ ID NO: 11455 - DNA, 94 bp, Homo sapiens
  source 1..94: mol_type = unassigned DNA
ggtgcctcagagtcacatgtccagtctctgtgggcaacctatatgcagcccagccacagagaatgaacaaggacctcaagacccagatgccaca

SEQ ID NO: 11456 - RNA, 57 nt, Homo sapiens
  source 1..57: mol_type = unassigned RNA
aattttggatagttgcaccatggttgtaagagcaaaatggaatgctgatagaggaaa

SEQ ID NO: 11457 - DNA, 57 bp, Homo sapiens
  source 1..57: mol_type = unassigned DNA
aattttggatagttgcaccatggttgtaagagcaaaatggaatgctgatagaggaaa

SEQ ID NO: 11458 - DNA, 57 bp, Homo sapiens
  source 1..57: mol_type = unassigned DNA
tttcctctatcagcattccattttgctcttacaaccatggtgcaactatccaaaatt

SEQ ID NO: 11459 - RNA, 30 nt, Homo sapiens
  source 1..30: mol_type = unassigned RNA
gcccagagcctggactggggtaggatgcgt

SEQ ID NO: 11460 - DNA, 30 bp, Homo sapiens
  source 1..30: mol_type = unassigned DNA
gcccagagcctggactggggtaggatgcgt

SEQ ID NO: 11461 - DNA, 30 bp, Homo sapiens
  source 1..30: mol_type = unassigned DNA
acgcatcctaccccagtccaggctctgggc

SEQ ID NO: 11462 - RNA, 32 nt, Homo sapiens
  source 1..32: mol_type = unassigned RNA
ggcatatgaaaacctgaacgacaaggatcaag

SEQ ID NO: 11463 - DNA, 32 bp, Homo sapiens
  source 1..32: mol_type = unassigned DNA
ggcatatgaaaacctgaacgacaaggatcaag

SEQ ID NO: 11464 - DNA, 32 bp, Homo sapiens
  source 1..32: mol_type = unassigned DNA
cttgatccttgtcgttcaggttttcatatgcc

SEQ ID NO: 11465 - RNA, 95 nt, Homo sapiens
  source 1..95: mol_type = unassigned RNA
cccatacttctccaccttccacccctgtcatacccttcaatcaagcactatagtgaagcactttaccttcctctctaaccgtgtagaggtcaaat

SEQ ID NO: 11466 - DNA, 95 bp, Homo sapiens
  source 1..95: mol_type = unassigned DNA
cccatacttctccaccttccacccctgtcatacccttcaatcaagcactatagtgaagcactttaccttcctctctaaccgtgtagaggtcaaat

SEQ ID NO: 11467 - DNA, 95 bp, Homo sapiens
  source 1..95: mol_type = unassigned DNA
atttgacctctacacggttagagaggaaggtaaagtgcttcactatagtgcttgattgaagggtatgacaggggtggaaggtggagaagtatggg

SEQ ID NO: 11468 - RNA, 40 nt, Homo sapiens
  source 1..40: mol_type = unassigned RNA
agaggcatggagggtagtgggaccatctcaggctgtgacg

SEQ ID NO: 11469 - DNA, 40 bp, Homo sapiens
  source 1..40: mol_type = unassigned DNA
agaggcatggagggtagtgggaccatctcaggctgtgacg

SEQ ID NO: 11470 - DNA, 40 bp, Homo sapiens
  source 1..40: mol_type = unassigned DNA
cgtcacagcctgagatggtcccactaccctccatgcctct

SEQ ID NO: 11471 - RNA, 42 nt, Homo sapiens
  source 1..42: mol_type = unassigned RNA
caagtctctgttgtgaaatggaccaggcagtgcttctgcatg

SEQ ID NO: 11472 - DNA, 42 bp, Homo sapiens
  source 1..42: mol_type = unassigned DNA
caagtctctgttgtgaaatggaccaggcagtgcttctgcatg

SEQ ID NO: 11473 - DNA, 42 bp, Homo sapiens
  source 1..42: mol_type = unassigned DNA
catgcagaagcactgcctggtccatttcacaacagagacttg

SEQ ID NO: 11474 - RNA, 178 nt, Homo sapiens
  source 1..178: mol_type = unassigned RNA
atgtgcttctatttttttcctacttcagagccattgactaatagttgagtataacacaggttgtgtttccgggctgctgaaacatgacactaatattttcaaagaactgtggaagcctaaaaggaagccaatgagaaataactaaatgagagtttaggactgcagccttcattttcat

SEQ ID NO: 11475 - DNA, 178 bp, Homo sapiens
  source 1..178: mol_type = unassigned DNA
atgtgcttctatttttttcctacttcagagccattgactaatagttgagtataacacaggttgtgtttccgggctgctgaaacatgacactaatattttcaaagaactgtggaagcctaaaaggaagccaatgagaaataactaaatgagagtttaggactgcagccttcattttcat

SEQ ID NO: 11476 - DNA, 178 bp, Homo sapiens
  source 1..178: mol_type = unassigned DNA
atgaaaatgaaggctgcagtcctaaactctcatttagttatttctcattggcttccttttaggcttccacagttctttgaaaatattagtgtcatgtttcagcagcccggaaacacaacctgtgttatactcaactattagtcaatggctctgaagtaggaaaaaaatagaagcacat

SEQ ID NO: 11477 - RNA, 23 nt, Homo sapiens
  source 1..23: mol_type = unassigned RNA
attctactgagccgtctactgag

SEQ ID NO: 11478 - DNA, 23 bp, Homo sapiens
  source 1..23: mol_type = unassigned DNA
attctactgagccgtctactgag

SEQ ID NO: 11479 - DNA, 23 bp, Homo sapiens
  source 1..23: mol_type = unassigned DNA
ctcagtagacggctcagtagaat

SEQ ID NO: 11480 - RNA, 31 nt, Homo sapiens
  source 1..31: mol_type = unassigned RNA
ttggatacccttgctgtaggctaattcaccc

SEQ ID NO: 11481 - DNA, 31 bp, Homo sapiens
  source 1..31: mol_type = unassigned DNA
ttggatacccttgctgtaggctaattcaccc

SEQ ID NO: 11482 - DNA, 31 bp, Homo sapiens
  source 1..31: mol_type = unassigned DNA
gggtgaattagcctacagcaagggtatccaa

SEQ ID NO: 11483 - RNA, 110 nt, Homo sapiens
  source 1..110: mol_type = unassigned RNA
taatatggagtagtgtggttgatcagacttaagcactgtcactgatgctgatatgctgggagaacctagtcagggttcttctatgaaggtatgacctggcttcctacccc

SEQ ID NO: 11484 - DNA, 110 bp, Homo sapiens
  source 1..110: mol_type = unassigned DNA
taatatggagtagtgtggttgatcagacttaagcactgtcactgatgctgatatgctgggagaacctagtcagggttcttctatgaaggtatgacctggcttcctacccc

SEQ ID NO: 11485 - DNA, 110 bp, Homo sapiens
  source 1..110: mol_type = unassigned DNA
ggggtaggaagccaggtcataccttcatagaagaaccctgactaggttctcccagcatatcagcatcagtgacagtgcttaagtctgatcaaccacactactccatatta

SEQ ID NO: 11486 - RNA, 28 nt, Homo sapiens
  source 1..28: mol_type = unassigned RNA
ccgacagggtgtgaacatgacatgctgt

SEQ ID NO: 11487 - DNA, 28 bp, Homo sapiens
  source 1..28: mol_type = unassigned DNA
ccgacagggtgtgaacatgacatgctgt

SEQ ID NO: 11488 - DNA, 28 bp, Homo sapiens
  source 1..28: mol_type = unassigned DNA
acagcatgtcatgttcacaccctgtcgg

SEQ ID NO: 11489 - RNA, 30 nt, Homo sapiens
  source 1..30: mol_type = unassigned RNA
gcatgtttgtcttatcggactaccattgtg

SEQ ID NO: 11490 - DNA, 30 bp, Homo sapiens
  source 1..30: mol_type = unassigned DNA
gcatgtttgtcttatcggactaccattgtg

SEQ ID NO: 11491 - DNA, 30 bp, Homo sapiens
  source 1..30: mol_type = unassigned DNA
cacaatggtagtccgataagacaaacatgc

SEQ ID NO: 11492 - RNA, 41 nt, Homo sapiens
  source 1..41: mol_type = unassigned RNA
ctcttagtttatctaggtgcatggggtgcaggaggggatga

SEQ ID NO: 11493 - DNA, 41 bp, Homo sapiens
  source 1..41: mol_type = unassigned DNA
ctcttagtttatctaggtgcatggggtgcaggaggggatga

SEQ ID NO: 11494 - DNA, 41 bp, Homo sapiens
  source 1..41: mol_type = unassigned DNA
tcatcccctcctgcaccccatgcacctagataaactaagag

SEQ ID NO: 11495 - RNA, 29 nt, Homo sapiens
  source 1..29: mol_type = unassigned RNA
gccgggcggaccaggctgtgggcatgcag

SEQ ID NO: 11496 - DNA, 29 bp, Homo sapiens
  source 1..29: mol_type = unassigned DNA
gccgggcggaccaggctgtgggcatgcag

SEQ ID NO: 11497 - DNA, 29 bp, Homo sapiens
  source 1..29: mol_type = unassigned DNA
ctgcatgcccacagcctggtccgcccggc

SEQ ID NO: 11498 - RNA, 24 nt, Homo sapiens
  source 1..24: mol_type = unassigned RNA
aacgtacttctctttggtgggtct

SEQ ID NO: 11499 - DNA, 24 bp, Homo sapiens
  source 1..24: mol_type = unassigned DNA
aacgtacttctctttggtgggtct

SEQ ID NO: 11500 - DNA, 24 bp, Homo sapiens
  source 1..24: mol_type = unassigned DNA
agacccaccaaagagaagtacgtt

SEQ ID NO: 11501 - RNA, 22 nt, Homo sapiens
  source 1..22: mol_type = unassigned RNA
gagcaagtggagcaatggaaaa

SEQ ID NO: 11502 - DNA, 22 bp, Homo sapiens
  source 1..22: mol_type = unassigned DNA
gagcaagtggagcaatggaaaa

SEQ ID NO: 11503 - DNA, 22 bp, Homo sapiens
  source 1..22: mol_type = unassigned DNA
ttttccattgctccacttgctc

SEQ ID NO: 11504 - RNA, 38 nt, Homo sapiens
  source 1..38: mol_type = unassigned RNA
gatgggcgataggttgtgtggtgggtagaataatgttt

SEQ ID NO: 11505 - DNA, 38 bp, Homo sapiens
  source 1..38: mol_type = unassigned DNA
gatgggcgataggttgtgtggtgggtagaataatgttt

SEQ ID NO: 11506 - DNA, 38 bp, Homo sapiens
  source 1..38: mol_type = unassigned DNA
aaacattattctacccaccacacaacctatcgcccatc

SEQ ID NO: 11507 - RNA, 24 nt, Homo sapiens
  source 1..24: mol_type = unassigned RNA
tctatgtttatctatctgtcagaa

SEQ ID NO: 11508 - DNA, 24 bp, Homo sapiens
  source 1..24: mol_type = unassigned DNA
tctatgtttatctatctgtcagaa

SEQ ID NO: 11509 - DNA, 24 bp, Homo sapiens
  source 1..24: mol_type = unassigned DNA
ttctgacagatagataaacataga

SEQ ID NO: 11510 - RNA, 24 nt, Homo sapiens
  source 1..24: mol_type = unassigned RNA
aaagtttatttgaatgatgttgag

SEQ ID NO: 11511 - DNA, 24 bp, Homo sapiens
  source 1..24: mol_type = unassigned DNA
aaagtttatttgaatgatgttgag

SEQ ID NO: 11512 - DNA, 24 bp, Homo sapiens
  source 1..24: mol_type = unassigned DNA
ctcaacatcattcaaataaacttt

SEQ ID NO: 11513 - RNA, 37 nt, Homo sapiens
  source 1..37: mol_type = unassigned RNA
taggttgaatccaattgtctgtaatgactcagatgga

SEQ ID NO: 11514 - DNA, 37 bp, Homo sapiens
  source 1..37: mol_type = unassigned DNA
taggttgaatccaattgtctgtaatgactcagatgga

SEQ ID NO: 11515 - DNA, 37 bp, Homo sapiens
  source 1..37: mol_type = unassigned DNA
tccatctgagtcattacagacaattggattcaaccta

SEQ ID NO: 11516 - RNA, 52 nt, Homo sapiens
  source 1..52: mol_type = unassigned RNA
aagtttattagactgattttaatttcagactccaatactgtagctattacca

SEQ ID NO: 11517 - DNA, 52 bp, Homo sapiens
  source 1..52: mol_type = unassigned DNA
aagtttattagactgattttaatttcagactccaatactgtagctattacca

SEQ ID NO: 11518 - DNA, 52 bp, Homo sapiens
  source 1..52: mol_type = unassigned DNA
tggtaatagctacagtattggagtctgaaattaaaatcagtctaataaactt

SEQ ID NO: 11519 - RNA, 49 nt, Homo sapiens
  source 1..49: mol_type = unassigned RNA
cattcttaggaagagtcaggctgtggggctgcctgtgttctagcttttg

SEQ ID NO: 11520 - DNA, 49 bp, Homo sapiens
  source 1..49: mol_type = unassigned DNA
cattcttaggaagagtcaggctgtggggctgcctgtgttctagcttttg

SEQ ID NO: 11521 - DNA, 49 bp, Homo sapiens
  source 1..49: mol_type = unassigned DNA
caaaagctagaacacaggcagccccacagcctgactcttcctaagaatg

SEQ ID NO: 11522 - RNA, 67 nt, Homo sapiens
  source 1..67: mol_type = unassigned RNA
tgatactctgaagtcttggaatatgaatgaatatctaatagactttgtagagtattgaacatagatt

SEQ ID NO: 11523 - DNA, 67 bp, Homo sapiens
  source 1..67: mol_type = unassigned DNA
tgatactctgaagtcttggaatatgaatgaatatctaatagactttgtagagtattgaacatagatt

SEQ ID NO: 11524 - DNA, 67 bp, Homo sapiens
  source 1..67: mol_type = unassigned DNA
aatctatgttcaatactctacaaagtctattagatattcattcatattccaagacttcagagtatca

SEQ ID NO: 11525 - RNA, 33 nt, Homo sapiens
  source 1..33: mol_type = unassigned RNA
tagatggtgcctaagttccgtcccaggctgcag

SEQ ID NO: 11526 - DNA, 33 bp, Homo sapiens
  source 1..33: mol_type = unassigned DNA
tagatggtgcctaagttccgtcccaggctgcag

SEQ ID NO: 11527 - DNA, 33 bp, Homo sapiens
  source 1..33: mol_type = unassigned DNA
ctgcagcctgggacggaacttaggcaccatcta

SEQ ID NO: 11528 - RNA, 26 nt, Homo sapiens
  source 1..26: mol_type = unassigned RNA
taagcaattggaagaattcactgaaa

SEQ ID NO: 11529 - DNA, 26 bp, Homo sapiens
  source 1..26: mol_type = unassigned DNA
taagcaattggaagaattcactgaaa

SEQ ID NO: 11530 - DNA, 26 bp, Homo sapiens
  source 1..26: mol_type = unassigned DNA
tttcagtgaattcttccaattgctta

SEQ ID NO: 11531 - RNA, 35 nt, Homo sapiens
  source 1..35: mol_type = unassigned RNA
ttgacatatttagaccattcgcatttacagtgatg

SEQ ID NO: 11532 - DNA, 35 bp, Homo sapiens
  source 1..35: mol_type = unassigned DNA
ttgacatatttagaccattcgcatttacagtgatg

SEQ ID NO: 11533 - DNA, 35 bp, Homo sapiens
  source 1..35: mol_type = unassigned DNA
catcactgtaaatgcgaatggtctaaatatgtcaa

SEQ ID NO: 11534 - RNA, 23 nt, Homo sapiens
  source 1..23: mol_type = unassigned RNA
ttatttattactttgtatagatc

SEQ ID NO: 11535 - DNA, 23 bp, Homo sapiens
  source 1..23: mol_type = unassigned DNA
ttatttattactttgtatagatc

SEQ ID NO: 11536 - DNA, 23 bp, Homo sapiens
  source 1..23: mol_type = unassigned DNA
gatctatacaaagtaataaataa

SEQ ID NO: 11537 - RNA, 22 nt, Homo sapiens
  source 1..22: mol_type = unassigned RNA
agtcttggttgacttacattga

SEQ ID NO: 11538 - DNA, 22 bp, Homo sapiens
  source 1..22: mol_type = unassigned DNA
agtcttggttgacttacattga

SEQ ID NO: 11539 - DNA, 22 bp, Homo sapiens
  source 1..22: mol_type = unassigned DNA
tcaatgtaagtcaaccaagact

SEQ ID NO: 11540 - RNA, 89 nt, Homo sapiens
  source 1..89: mol_type = unassigned RNA
tgcttgggttatctagatttataattgcctttgaaattccatcctcgttggagctggtaagaagggcttgactgaaagtttgaaggaat

SEQ ID NO: 11541 - DNA, 89 bp, Homo sapiens
  source 1..89: mol_type = unassigned DNA
tgcttgggttatctagatttataattgcctttgaaattccatcctcgttggagctggtaagaagggcttgactgaaagtttgaaggaat

SEQ ID NO: 11542 - DNA, 89 bp, Homo sapiens
  source 1..89: mol_type = unassigned DNA
attccttcaaactttcagtcaagcccttcttaccagctccaacgaggatggaatttcaaaggcaattataaatctagataacccaagca

SEQ ID NO: 11543 - RNA, 32 nt, Homo sapiens
  source 1..32: mol_type = unassigned RNA
ttagttaggaggttgttggtaagttactgaat

SEQ ID NO: 11544 - DNA, 32 bp, Homo sapiens
  source 1..32: mol_type = unassigned DNA
ttagttaggaggttgttggtaagttactgaat

SEQ ID NO: 11545 - DNA, 32 bp, Homo sapiens
  source 1..32: mol_type = unassigned DNA
attcagtaacttaccaacaacctcctaactaa

SEQ ID NO: 11546 - RNA, 24 nt, Homo sapiens
  source 1..24: mol_type = unassigned RNA
tttagtaattagtttgtatagaag

SEQ ID NO: 11547 - DNA, 24 bp, Homo sapiens
  source 1..24: mol_type = unassigned DNA
tttagtaattagtttgtatagaag

SEQ ID NO: 11548 - DNA, 24 bp, Homo sapiens
  source 1..24: mol_type = unassigned DNA
cttctatacaaactaattactaaa

SEQ ID NO: 11549 - RNA, 24 nt, Homo sapiens
  source 1..24: mol_type = unassigned RNA
tgagtttttattttgtattgtttt

SEQ ID NO: 11550 - DNA, 24 bp, Homo sapiens
  source 1..24: mol_type = unassigned DNA
tgagtttttattttgtattgtttt

SEQ ID NO: 11551 - DNA, 24 bp, Homo sapiens
  source 1..24: mol_type = unassigned DNA
aaaacaatacaaaataaaaactca

SEQ ID NO: 11552 - RNA, 24 nt, Homo sapiens
  source 1..24: mol_type = unassigned RNA
ttatttattaatttgtattgttag

SEQ ID NO: 11553 - DNA, 24 bp, Homo sapiens
  source 1..24: mol_type = unassigned DNA
ttatttattaatttgtattgttag

SEQ ID NO: 11554 - DNA, 24 bp, Homo sapiens
  source 1..24: mol_type = unassigned DNA
ctaacaatacaaattaataaataa

SEQ ID NO: 11555 - RNA, 35 nt, Homo sapiens
  source 1..35: mol_type = unassigned RNA
ttatttagtagattgtaatgtcctcgattggagaa

SEQ ID NO: 11556 - DNA, 35 bp, Homo sapiens
  source 1..35: mol_type = unassigned DNA
ttatttagtagattgtaatgtcctcgattggagaa

SEQ ID NO: 11557 - DNA, 35 bp, Homo sapiens
  source 1..35: mol_type = unassigned DNA
ttctccaatcgaggacattacaatctactaaataa

SEQ ID NO: 11558 - RNA, 31 nt, Homo sapiens
  source 1..31: mol_type = unassigned RNA
ggggtacgtggcctcggcagttggagcttag

SEQ ID NO: 11559 - DNA, 31 bp, Homo sapiens
  source 1..31: mol_type = unassigned DNA
ggggtacgtggcctcggcagttggagcttag

SEQ ID NO: 11560 - DNA, 31 bp, Homo sapiens
  source 1..31: mol_type = unassigned DNA
ctaagctccaactgccgaggccacgtacccc

SEQ ID NO: 11561 - RNA, 24 nt, Homo sapiens
  source 1..24: mol_type = unassigned RNA
atattttgtaggttgtatagaggc

SEQ ID NO: 11562 - DNA, 24 bp, Homo sapiens
  source 1..24: mol_type = unassigned DNA
atattttgtaggttgtatagaggc

SEQ ID NO: 11563 - DNA, 24 bp, Homo sapiens
  source 1..24: mol_type = unassigned DNA
gcctctatacaacctacaaaatat

SEQ ID NO: 11564 - RNA, 24 nt, Homo sapiens
  source 1..24: mol_type = unassigned RNA
taatgtattattttgtatagctga

SEQ ID NO: 11565 - DNA, 24 bp, Homo sapiens
  source 1..24: mol_type = unassigned DNA
taatgtattattttgtatagctga

SEQ ID NO: 11566 - DNA, 24 bp, Homo sapiens
  source 1..24: mol_type = unassigned DNA
tcagctatacaaaataatacatta

SEQ ID NO: 11567 - RNA, 33 nt, Homo sapiens
  source 1..33: mol_type = unassigned RNA
tttttgtagcattttggagttgtatagttcatg

SEQ ID NO: 11568 - DNA, 33 bp, Homo sapiens
  source 1..33: mol_type = unassigned DNA
tttttgtagcattttggagttgtatagttcatg

SEQ ID NO: 11569 - DNA, 33 bp, Homo sapiens
  source 1..33: mol_type = unassigned DNA
catgaactatacaactccaaaatgctacaaaaa

SEQ ID NO: 11570 - RNA, 53 nt, Homo sapiens
  source 1..53: mol_type = unassigned RNA
tttgtgcccaggaacctgagccactgaagcctgtcagtggccagagttccatt

SEQ ID NO: 11571 - DNA, 53 bp, Homo sapiens
  source 1..53: mol_type = unassigned DNA
tttgtgcccaggaacctgagccactgaagcctgtcagtggccagagttccatt

SEQ ID NO: 11572 - DNA, 53 bp, Homo sapiens
  source 1..53: mol_type = unassigned DNA
aatggaactctggccactgacaggcttcagtggctcaggttcctgggcacaaa

SEQ ID NO: 11573 - RNA, 28 nt, Homo sapiens
  source 1..28: mol_type = unassigned RNA
aatcacatctgagcacaagctgtctcca

SEQ ID NO: 11574 - DNA, 28 bp, Homo sapiens
  source 1..28: mol_type = unassigned DNA
aatcacatctgagcacaagctgtctcca

SEQ ID NO: 11575 - DNA, 28 bp, Homo sapiens
  source 1..28: mol_type = unassigned DNA
tggagacagcttgtgctcagatgtgatt

SEQ ID NO: 11576 - RNA, 29 nt, Homo sapiens
  source 1..29: mol_type = unassigned RNA
ttattatagatcgacgcgacaccagcgcc

SEQ ID NO: 11577 - DNA, 29 bp, Homo sapiens
  source 1..29: mol_type = unassigned DNA
ttattatagatcgacgcgacaccagcgcc

SEQ ID NO: 11578 - DNA, 29 bp, Homo sapiens
  source 1..29: mol_type = unassigned DNA
ggcgctggtgtcgcgtcgatctataataa

SEQ ID NO: 11579 - RNA, 44 nt, Homo sapiens
  source 1..44: mol_type = unassigned RNA
catcagatgttttgactatggactgtggctcagggcctggtctt

SEQ ID NO: 11580 - DNA, 44 bp, Homo sapiens
  source 1..44: mol_type = unassigned DNA
catcagatgttttgactatggactgtggctcagggcctggtctt

SEQ ID NO: 11581 - DNA, 44 bp, Homo sapiens
  source 1..44: mol_type = unassigned DNA
aagaccaggccctgagccacagtccatagtcaaaacatctgatg

SEQ ID NO: 11582 - RNA, 34 nt, Homo sapiens
  source 1..34: mol_type = unassigned RNA
ttagacttggactgagccatgctaacacctttcc

SEQ ID NO: 11583 - DNA, 34 bp, Homo sapiens
  source 1..34: mol_type = unassigned DNA
ttagacttggactgagccatgctaacacctttcc

SEQ ID NO: 11584 - DNA, 34 bp, Homo sapiens
  source 1..34: mol_type = unassigned DNA
ggaaaggtgttagcatggctcagtccaagtctaa

SEQ ID NO: 11585 - RNA, 40 nt, Homo sapiens
  source 1..40: mol_type = unassigned RNA
ttctgagaatttttggtctaaccggttgtctagcaaaagc

SEQ ID NO: 11586 - DNA, 40 bp, Homo sapiens
  source 1..40: mol_type = unassigned DNA
ttctgagaatttttggtctaaccggttgtctagcaaaagc

SEQ ID NO: 11587 - DNA, 40 bp, Homo sapiens
  source 1..40: mol_type = unassigned DNA
gcttttgctagacaaccggttagaccaaaaattctcagaa

SEQ ID NO: 11588 - RNA, 42 nt, Homo sapiens
  source 1..42: mol_type = unassigned RNA
ttctgagaatttttggtctaaccggttgtctagcttcacgtc

SEQ ID NO: 11589 - DNA, 42 bp, Homo sapiens
  source 1..42: mol_type = unassigned DNA
ttctgagaatttttggtctaaccggttgtctagcttcacgtc

SEQ ID NO: 11590 - DNA, 42 bp, Homo sapiens
  source 1..42: mol_type = unassigned DNA
gacgtgaagctagacaaccggttagaccaaaaattctcagaa

SEQ ID NO: 11591 - RNA, 31 nt, Homo sapiens
  source 1..31: mol_type = unassigned RNA
atgcctctggttctaccactctctgcagtct

SEQ ID NO: 11592 - DNA, 31 bp, Homo sapiens
  source 1..31: mol_type = unassigned DNA
atgcctctggttctaccactctctgcagtct

SEQ ID NO: 11593 - DNA, 31 bp, Homo sapiens
  source 1..31: mol_type = unassigned DNA
agactgcagagagtggtagaaccagaggcat

SEQ ID NO: 11594 - RNA, 43 nt, Homo sapiens
  source 1..43: mol_type = unassigned RNA
ggggtgggtgtttcctgtgctgttcttgtgacagcgaatgagt

SEQ ID NO: 11595 - DNA, 43 bp, Homo sapiens
  source 1..43: mol_type = unassigned DNA
ggggtgggtgtttcctgtgctgttcttgtgacagcgaatgagt

SEQ ID NO: 11596 - DNA, 43 bp, Homo sapiens
  source 1..43: mol_type = unassigned DNA
actcattcgctgtcacaagaacagcacaggaaacacccacccc

SEQ ID NO: 11597 - RNA, 31 nt, Homo sapiens
  source 1..31: mol_type = unassigned RNA
agtgaacgtcactgtgagggctctgctgcat

SEQ ID NO: 11598 - DNA, 31 bp, Homo sapiens
  source 1..31: mol_type = unassigned DNA
agtgaacgtcactgtgagggctctgctgcat

SEQ ID NO: 11599 - DNA, 31 bp, Homo sapiens
  source 1..31: mol_type = unassigned DNA
atgcagcagagccctcacagtgacgttcact

SEQ ID NO: 11600 - RNA, 63 nt, Homo sapiens
  source 1..63: mol_type = unassigned RNA
cagaaactcaattttggacaagttgggtcaaggaacttgtgggtgcgcccggcagagatgcca

SEQ ID NO: 11601 - DNA, 63 bp, Homo sapiens
  source 1..63: mol_type = unassigned DNA
cagaaactcaattttggacaagttgggtcaaggaacttgtgggtgcgcccggcagagatgcca

SEQ ID NO: 11602 - DNA, 63 bp, Homo sapiens
  source 1..63: mol_type = unassigned DNA
tggcatctctgccgggcgcacccacaagttccttgacccaacttgtccaaaattgagtttctg

SEQ ID NO: 11603 - RNA, 39 nt, Homo sapiens
  source 1..39: mol_type = unassigned RNA
ttccttggttggcctttggactgagccatgctaccaact

SEQ ID NO: 11604 - DNA, 39 bp, Homo sapiens
  source 1..39: mol_type = unassigned DNA
ttccttggttggcctttggactgagccatgctaccaact

SEQ ID NO: 11605 - DNA, 39 bp, Homo sapiens
  source 1..39: mol_type = unassigned DNA
agttggtagcatggctcagtccaaaggccaaccaaggaa

SEQ ID NO: 11606 - RNA, 23 nt, Homo sapiens
  source 1..23: mol_type = unassigned RNA
ttcccacggtgcctaatggaaaa

SEQ ID NO: 11607 - DNA, 23 bp, Homo sapiens
  source 1..23: mol_type = unassigned DNA
ttcccacggtgcctaatggaaaa

SEQ ID NO: 11608 - DNA, 23 bp, Homo sapiens
  source 1..23: mol_type = unassigned DNA
ttttccattaggcaccgtgggaa

SEQ ID NO: 11609 - RNA, 51 nt, Homo sapiens
  source 1..51: mol_type = unassigned RNA
ctttcctgactctgaggtctttggacttggactaagccatgctactgatat

SEQ ID NO: 11610 - DNA, 51 bp, Homo sapiens
  source 1..51: mol_type = unassigned DNA
ctttcctgactctgaggtctttggacttggactaagccatgctactgatat

SEQ ID NO: 11611 - DNA, 51 bp, Homo sapiens
  source 1..51: mol_type = unassigned DNA
atatcagtagcatggcttagtccaagtccaaagacctcagagtcaggaaag

SEQ ID NO: 11612 - RNA, 92 nt, Homo sapiens
  source 1..92: mol_type = unassigned RNA
cctccctcttcactatcttcctcctgctctggctgtgtgaagatctgcctccttcctcttcggcttcatgcatgatcgtaagtttcctgagg

SEQ ID NO: 11613 - DNA, 92 bp, Homo sapiens
  source 1..92: mol_type = unassigned DNA
cctccctcttcactatcttcctcctgctctggctgtgtgaagatctgcctccttcctcttcggcttcatgcatgatcgtaagtttcctgagg

SEQ ID NO: 11614 - DNA, 92 bp, Homo sapiens
  source 1..92: mol_type = unassigned DNA
cctcaggaaacttacgatcatgcatgaagccgaagaggaaggaggcagatcttcacacagccagagcaggaggaagatagtgaagagggagg

SEQ ID NO: 11615 - RNA, 24 nt, Homo sapiens
  source 1..24: mol_type = unassigned RNA
cagggacctcatggcccaatggca

SEQ ID NO: 11616 - DNA, 24 bp, Homo sapiens
  source 1..24: mol_type = unassigned DNA
cagggacctcatggcccaatggca

SEQ ID NO: 11617 - DNA, 24 bp, Homo sapiens
  source 1..24: mol_type = unassigned DNA
tgccattgggccatgaggtccctg

SEQ ID NO: 11618 - RNA, 85 nt, Homo sapiens
  source 1..85: mol_type = unassigned RNA
atttctaaaagaactagtggttatttctataatcactattatttgtagaacaatgattatttttgatatgccctcttcttgcttt

SEQ ID NO: 11619 - DNA, 85 bp, Homo sapiens
  source 1..85: mol_type = unassigned DNA
atttctaaaagaactagtggttatttctataatcactattatttgtagaacaatgattatttttgatatgccctcttcttgcttt

SEQ ID NO: 11620 - DNA, 85 bp, Homo sapiens
  source 1..85: mol_type = unassigned DNA
aaagcaagaagagggcatatcaaaaataatcattgttctacaaataatagtgattatagaaataaccactagttcttttagaaat

SEQ ID NO: 11621 - RNA, 57 nt, Homo sapiens
  source 1..57: mol_type = unassigned RNA
gtcagattagaactgatctttcctggtctctgtagaatctcttcttctcctatcttt

SEQ ID NO: 11622 - DNA, 57 bp, Homo sapiens
  source 1..57: mol_type = unassigned DNA
gtcagattagaactgatctttcctggtctctgtagaatctcttcttctcctatcttt

SEQ ID NO: 11623 - DNA, 57 bp, Homo sapiens
  source 1..57: mol_type = unassigned DNA
aaagataggagaagaagagattctacagagaccaggaaagatcagttctaatctgac

SEQ ID NO: 11624 - RNA, 32 nt, Homo sapiens
  source 1..32: mol_type = unassigned RNA
acctcacctgtgaccagcttgctgaccgccgg

SEQ ID NO: 11625 - DNA, 32 bp, Homo sapiens
  source 1..32: mol_type = unassigned DNA
acctcacctgtgaccagcttgctgaccgccgg

SEQ ID NO: 11626 - DNA, 32 bp, Homo sapiens
  source 1..32: mol_type = unassigned DNA
ccggcggtcagcaagctggtcacaggtgaggt

SEQ ID NO: 11627 - RNA, 42 nt, Homo sapiens
  source 1..42: mol_type = unassigned RNA
atttcatgatgattcctgaatctgaacttcaagggagttgat

SEQ ID NO: 11628 - DNA, 42 bp, Homo sapiens
  source 1..42: mol_type = unassigned DNA
atttcatgatgattcctgaatctgaacttcaagggagttgat

SEQ ID NO: 11629 - DNA, 42 bp, Homo sapiens
  source 1..42: mol_type = unassigned DNA
atcaactcccttgaagttcagattcaggaatcatcatgaaat

SEQ ID NO: 11630 - RNA, 29 nt, Homo sapiens
  source 1..29: mol_type = unassigned RNA
caacccgagaacacaaagaaacgcacttt

SEQ ID NO: 11631 - DNA, 29 bp, Homo sapiens
  source 1..29: mol_type = unassigned DNA
caacccgagaacacaaagaaacgcacttt

SEQ ID NO: 11632 - DNA, 29 bp, Homo sapiens
  source 1..29: mol_type = unassigned DNA
aaagtgcgtttctttgtgttctcgggttg

SEQ ID NO: 11633 - RNA, 29 nt, Homo sapiens
  source 1..29: mol_type = unassigned RNA
gagtgacaggtaagggctctgaaccttcc

SEQ ID NO: 11634 - DNA, 29 bp, Homo sapiens
  source 1..29: mol_type = unassigned DNA
gagtgacaggtaagggctctgaaccttcc

SEQ ID NO: 11635 - DNA, 29 bp, Homo sapiens
  source 1..29: mol_type = unassigned DNA
ggaaggttcagagcccttacctgtcactc

SEQ ID NO: 11636 - RNA, 53 nt, Homo sapiens
  source 1..53: mol_type = unassigned RNA
gttcacatcccaacactgtataccttgaccaggttgtgtagtatctctgtgcc

SEQ ID NO: 11637 - DNA, 53 bp, Homo sapiens
  source 1..53: mol_type = unassigned DNA
gttcacatcccaacactgtataccttgaccaggttgtgtagtatctctgtgcc

SEQ ID NO: 11638 - DNA, 53 bp, Homo sapiens
  source 1..53: mol_type = unassigned DNA
ggcacagagatactacacaacctggtcaaggtatacagtgttgggatgtgaac

SEQ ID NO: 11639 - RNA, 29 nt, Homo sapiens
  source 1..29: mol_type = unassigned RNA
gtcttttatcagctggacaggagatggct

SEQ ID NO: 11640 - DNA, 29 bp, Homo sapiens
  source 1..29: mol_type = unassigned DNA
gtcttttatcagctggacaggagatggct

SEQ ID NO: 11641 - DNA, 29 bp, Homo sapiens
  source 1..29: mol_type = unassigned DNA
agccatctcctgtccagctgataaaagac

SEQ ID NO: 11642 - RNA, 30 nt, Homo sapiens
  source 1..30: mol_type = unassigned RNA
aggtattgggcgtcgggcagaaccagacag

SEQ ID NO: 11643 - DNA, 30 bp, Homo sapiens
  source 1..30: mol_type = unassigned DNA
aggtattgggcgtcgggcagaaccagacag

SEQ ID NO: 11644 - DNA, 30 bp, Homo sapiens
  source 1..30: mol_type = unassigned DNA
ctgtctggttctgcccgacgcccaatacct

SEQ ID NO: 11645 - RNA, 32 nt, Homo sapiens
  source 1..32: mol_type = unassigned RNA
gatcactgggatttttggaggggatagggatt

SEQ ID NO: 11646 - DNA, 32 bp, Homo sapiens
  source 1..32: mol_type = unassigned DNA
gatcactgggatttttggaggggatagggatt

SEQ ID NO: 11647 - DNA, 32 bp, Homo sapiens
  source 1..32: mol_type = unassigned DNA
aatccctatcccctccaaaaatcccagtgatc

SEQ ID NO: 11648 - RNA, 39 nt, Homo sapiens
  source 1..39: mol_type = unassigned RNA
ctttaaagaatgcctgtttccacctgaaggaccagacaa

SEQ ID NO: 11649 - DNA, 39 bp, Homo sapiens
  source 1..39: mol_type = unassigned DNA
ctttaaagaatgcctgtttccacctgaaggaccagacaa

SEQ ID NO: 11650 - DNA, 39 bp, Homo sapiens
  source 1..39: mol_type = unassigned DNA
ttgtctggtccttcaggtggaaacaggcattctttaaag

SEQ ID NO: 11651 - RNA, 193 nt, Homo sapiens
  source 1..193: mol_type = unassigned RNA
agtttttttcttctcagtcaactgaattctgctttttctatttacttctgcctgtctctcctttctcttcccaccctctgctgcatgaggcactggaaataattttaacaatggtaatgagacaaattatcaagaaattggagctgggattccttaaagaaaacagagaagatgccagactccttctgggggc

SEQ ID NO: 11652 - DNA, 193 bp, Homo sapiens
  source 1..193: mol_type = unassigned DNA
agtttttttcttctcagtcaactgaattctgctttttctatttacttctgcctgtctctcctttctcttcccaccctctgctgcatgaggcactggaaataattttaacaatggtaatgagacaaattatcaagaaattggagctgggattccttaaagaaaacagagaagatgccagactccttctgggggc

SEQ ID NO: 11653 - DNA, 193 bp, Homo sapiens
  source 1..193: mol_type = unassigned DNA
gcccccagaaggagtctggcatcttctctgttttctttaaggaatcccagctccaatttcttgataatttgtctcattaccattgttaaaattatttccagtgcctcatgcagcagagggtgggaagagaaaggagagacaggcagaagtaaatagaaaaagcagaattcagttgactgagaagaaaaaaact

SEQ ID NO: 11654 - RNA, 32 nt, Homo sapiens
  source 1..32: mol_type = unassigned RNA
gctcgctttgccggacataacttccgtaatcc

SEQ ID NO: 11655 - DNA, 32 bp, Homo sapiens
  source 1..32: mol_type = unassigned DNA
gctcgctttgccggacataacttccgtaatcc

SEQ ID NO: 11656 - DNA, 32 bp, Homo sapiens
  source 1..32: mol_type = unassigned DNA
ggattacggaagttatgtccggcaaagcgagc

SEQ ID NO: 11657 - RNA, 23 nt, Homo sapiens
  source 1..23: mol_type = unassigned RNA
ctggtgtgagccatgctaaaaat

SEQ ID NO: 11658 - DNA, 23 bp, Homo sapiens
  source 1..23: mol_type = unassigned DNA
ctggtgtgagccatgctaaaaat

SEQ ID NO: 11659 - DNA, 23 bp, Homo sapiens
  source 1..23: mol_type = unassigned DNA
atttttagcatggctcacaccag

SEQ ID NO: 11660 - RNA, 187 nt, Homo sapiens
  source 1..187: mol_type = unassigned RNA
aggatgcctcattgatggacatgaactccttcagccctatgatgccaacatcccctttatcaatgataaaccaaatcaagtttgaggatgaaccagatttaaaggatctcttcatcacagttgatgaacctgaaagtcatgttactacaatagaaactttcattacgtataggattattactaaggt

SEQ ID NO: 11661 - DNA, 187 bp, Homo sapiens
  source 1..187: mol_type = unassigned DNA
aggatgcctcattgatggacatgaactccttcagccctatgatgccaacatcccctttatcaatgataaaccaaatcaagtttgaggatgaaccagatttaaaggatctcttcatcacagttgatgaacctgaaagtcatgttactacaatagaaactttcattacgtataggattattactaaggt

SEQ ID NO: 11662 - DNA, 187 bp, Homo sapiens
  source 1..187: mol_type = unassigned DNA
accttagtaataatcctatacgtaatgaaagtttctattgtagtaacatgactttcaggttcatcaactgtgatgaagagatcctttaaatctggttcatcctcaaacttgatttggtttatcattgataaaggggatgttggcatcatagggctgaaggagttcatgtccatcaatgaggcatcct

SEQ ID NO: 11663 - RNA, 30 nt, Homo sapiens
  source 1..30: mol_type = unassigned RNA
gtttataaccacaaccgtagaacgttgtct

SEQ ID NO: 11664 - DNA, 30 bp, Homo sapiens
  source 1..30: mol_type = unassigned DNA
gtttataaccacaaccgtagaacgttgtct

SEQ ID NO: 11665 - DNA, 30 bp, Homo sapiens
  source 1..30: mol_type = unassigned DNA
agacaacgttctacggttgtggttataaac

SEQ ID NO: 11666 - RNA, 199 nt, Homo sapiens
  source 1..199: mol_type = unassigned RNA
gcctttcttaattccactctgcattttcaggtactctgtagatcgacacacagatatggacagaatattcaacattgattctggaaatggttcgatttttacatcgaaacttcttgaccgagaaacactgctatggcacaacattacagtgatagcaacagagatcagtaagtcctacctaataccgctgctgtcccct

SEQ ID NO: 11667 - DNA, 199 bp, Homo sapiens
  source 1..199: mol_type = unassigned DNA
gcctttcttaattccactctgcattttcaggtactctgtagatcgacacacagatatggacagaatattcaacattgattctggaaatggttcgatttttacatcgaaacttcttgaccgagaaacactgctatggcacaacattacagtgatagcaacagagatcagtaagtcctacctaataccgctgctgtcccct

SEQ ID NO: 11668 - DNA, 199 bp, Homo sapiens
  source 1..199: mol_type = unassigned DNA
aggggacagcagcggtattaggtaggacttactgatctctgttgctatcactgtaatgttgtgccatagcagtgtttctcggtcaagaagtttcgatgtaaaaatcgaaccatttccagaatcaatgttgaatattctgtccatatctgtgtgtcgatctacagagtacctgaaaatgcagagtggaattaagaaaggc

SEQ ID NO: 11669 - RNA, 27 nt, Homo sapiens
  source 1..27: mol_type = unassigned RNA
ctaaaaggggatatgggattgagaaag

SEQ ID NO: 11670 - DNA, 27 bp, Homo sapiens
  source 1..27: mol_type = unassigned DNA
ctaaaaggggatatgggattgagaaag

SEQ ID NO: 11671 - DNA, 27 bp, Homo sapiens
  source 1..27: mol_type = unassigned DNA
ctttctcaatcccatatccccttttag

SEQ ID NO: 11672 - RNA, 58 nt, Homo sapiens
  source 1..58: mol_type = unassigned RNA
cttttgtttgatcggttgaagcctttgaagatgttagaggagaatctgagcagaaacc

SEQ ID NO: 11673 - DNA, 58 bp, Homo sapiens
  source 1..58: mol_type = unassigned DNA
cttttgtttgatcggttgaagcctttgaagatgttagaggagaatctgagcagaaacc

SEQ ID NO: 11674 - DNA, 58 bp, Homo sapiens
  source 1..58: mol_type = unassigned DNA
ggtttctgctcagattctcctctaacatcttcaaaggcttcaaccgatcaaacaaaag

SEQ ID NO: 11675 - RNA, 53 nt, Homo sapiens
  source 1..53: mol_type = unassigned RNA
acacaagcagaaagaactccaacaattaagatagcttatcagacatttgaaaa

SEQ ID NO: 11676 - DNA, 53 bp, Homo sapiens
  source 1..53: mol_type = unassigned DNA
acacaagcagaaagaactccaacaattaagatagcttatcagacatttgaaaa

SEQ ID NO: 11677 - DNA, 53 bp, Homo sapiens
  source 1..53: mol_type = unassigned DNA
ttttcaaatgtctgataagctatcttaattgttggagttctttctgcttgtgt

SEQ ID NO: 11678 - RNA, 29 nt, Homo sapiens
  source 1..29: mol_type = unassigned RNA
atcacctgacaggtcccggatctgcacca

SEQ ID NO: 11679 - DNA, 29 bp, Homo sapiens
  source 1..29: mol_type = unassigned DNA
atcacctgacaggtcccggatctgcacca

SEQ ID NO: 11680 - DNA, 29 bp, Homo sapiens
  source 1..29: mol_type = unassigned DNA
tggtgcagatccgggacctgtcaggtgat

SEQ ID NO: 11681 - RNA, 28 nt, Homo sapiens
  source 1..28: mol_type = unassigned RNA
ttttccatactggccaggtgcactcaag

SEQ ID NO: 11682 - DNA, 28 bp, Homo sapiens
  source 1..28: mol_type = unassigned DNA
ttttccatactggccaggtgcactcaag

SEQ ID NO: 11683 - DNA, 28 bp, Homo sapiens
  source 1..28: mol_type = unassigned DNA
cttgagtgcacctggccagtatggaaaa

SEQ ID NO: 11684 - RNA, 47 nt, Homo sapiens
  source 1..47: mol_type = unassigned RNA
cctcctactttctaccccagataccactaatctgattgtttttcact

SEQ ID NO: 11685 - DNA, 47 bp, Homo sapiens
  source 1..47: mol_type = unassigned DNA
cctcctactttctaccccagataccactaatctgattgtttttcact

SEQ ID NO: 11686 - DNA, 47 bp, Homo sapiens
  source 1..47: mol_type = unassigned DNA
agtgaaaaacaatcagattagtggtatctggggtagaaagtaggagg

SEQ ID NO: 11687 - RNA, 31 nt, Homo sapiens
  source 1..31: mol_type = unassigned RNA
gaaggtccaggctgaccaggtggatgtgaag

SEQ ID NO: 11688 - DNA, 31 bp, Homo sapiens
  source 1..31: mol_type = unassigned DNA
gaaggtccaggctgaccaggtggatgtgaag

SEQ ID NO: 11689 - DNA, 31 bp, Homo sapiens
  source 1..31: mol_type = unassigned DNA
cttcacatccacctggtcagcctggaccttc

SEQ ID NO: 11690 - RNA, 31 nt, Homo sapiens
  source 1..31: mol_type = unassigned RNA
caacccagatgcaggacaagtactccaaaag

SEQ ID NO: 11691 - DNA, 31 bp, Homo sapiens
  source 1..31: mol_type = unassigned DNA
caacccagatgcaggacaagtactccaaaag

SEQ ID NO: 11692 - DNA, 31 bp, Homo sapiens
  source 1..31: mol_type = unassigned DNA
cttttggagtacttgtcctgcatctgggttg

SEQ ID NO: 11693 - RNA, 30 nt, Homo sapiens
  source 1..30: mol_type = unassigned RNA
ctcgtgctgtctcgggactcctgaccgtgg

SEQ ID NO: 11694 - DNA, 30 bp, Homo sapiens
  source 1..30: mol_type = unassigned DNA
ctcgtgctgtctcgggactcctgaccgtgg

SEQ ID NO: 11695 - DNA, 30 bp, Homo sapiens
  source 1..30: mol_type = unassigned DNA
ccacggtcaggagtcccgagacagcacgag

SEQ ID NO: 11696 - RNA, 115 nt, Homo sapiens
  source 1..115: mol_type = unassigned RNA
tggaatgatagccttttagttctgtagacactaaagtactgactctaccaaatcaatgatgggagttggagctgcatgcaatgcctgctgcagaacatctgaattccatcttgga

SEQ ID NO: 11697 - DNA, 115 bp, Homo sapiens
  source 1..115: mol_type = unassigned DNA
tggaatgatagccttttagttctgtagacactaaagtactgactctaccaaatcaatgatgggagttggagctgcatgcaatgcctgctgcagaacatctgaattccatcttgga

SEQ ID NO: 11698 - DNA, 115 bp, Homo sapiens
  source 1..115: mol_type = unassigned DNA
tccaagatggaattcagatgttctgcagcaggcattgcatgcagctccaactcccatcattgatttggtagagtcagtactttagtgtctacagaactaaaaggctatcattcca

SEQ ID NO: 11699 - RNA, 33 nt, Homo sapiens
  source 1..33: mol_type = unassigned RNA
aagtctgtatgagaagaacataatgaagcctga

SEQ ID NO: 11700 - DNA, 33 bp, Homo sapiens
  source 1..33: mol_type = unassigned DNA
aagtctgtatgagaagaacataatgaagcctga

SEQ ID NO: 11701 - DNA, 33 bp, Homo sapiens
  source 1..33: mol_type = unassigned DNA
tcaggcttcattatgttcttctcatacagactt

SEQ ID NO: 11702 - RNA, 42 nt, Homo sapiens
  source 1..42: mol_type = unassigned RNA
ggttggaaaaggccagatgttgggaaaacatcttgggaaaaa

SEQ ID NO: 11703 - DNA, 42 bp, Homo sapiens
  source 1..42: mol_type = unassigned DNA
ggttggaaaaggccagatgttgggaaaacatcttgggaaaaa

SEQ ID NO: 11704 - DNA, 42 bp, Homo sapiens
  source 1..42: mol_type = unassigned DNA
tttttcccaagatgttttcccaacatctggccttttccaacc

SEQ ID NO: 11705 - RNA, 28 nt, Homo sapiens
  source 1..28: mol_type = unassigned RNA
aaacctggttctcttctgacatctaaga

SEQ ID NO: 11706 - DNA, 28 bp, Homo sapiens
  source 1..28: mol_type = unassigned DNA
aaacctggttctcttctgacatctaaga

SEQ ID NO: 11707 - DNA, 28 bp, Homo sapiens
  source 1..28: mol_type = unassigned DNA
tcttagatgtcagaagagaaccaggttt

SEQ ID NO: 11708 - RNA, 51 nt, Homo sapiens
  source 1..51: mol_type = unassigned RNA
cagggaggagccaaaagggtcatcatctctgccccctctgctgatgcctcc

SEQ ID NO: 11709 - DNA, 51 bp, Homo sapiens
  source 1..51: mol_type = unassigned DNA
cagggaggagccaaaagggtcatcatctctgccccctctgctgatgcctcc

SEQ ID NO: 11710 - DNA, 51 bp, Homo sapiens
  source 1..51: mol_type = unassigned DNA
ggaggcatcagcagagggggcagagatgatgacccttttggctcctccctg

SEQ ID NO: 11711 - RNA, 32 nt, Homo sapiens
  source 1..32: mol_type = unassigned RNA
atcatagaactctctgaagagcgggatggtct

SEQ ID NO: 11712 - DNA, 32 bp, Homo sapiens
  source 1..32: mol_type = unassigned DNA
atcatagaactctctgaagagcgggatggtct

SEQ ID NO: 11713 - DNA, 32 bp, Homo sapiens
  source 1..32: mol_type = unassigned DNA
agaccatcccgctcttcagagagttctatgat

SEQ ID NO: 11714 - RNA, 191 nt, Homo sapiens
  source 1..191: mol_type = unassigned RNA
ttttgggggttcacaggtgagtgggctcaggcatgtgcactagtatgactaaaggtcatagactattagactattagtctatgaccttcctctagaaacactcgactggtaagggaagaatgcctcaactgagcatgtgcacaactcccataaacacacttgtgcttgcggagcctctcaagtgctggcag

SEQ ID NO: 11715 - DNA, 191 bp, Homo sapiens
  source 1..191: mol_type = unassigned DNA
ttttgggggttcacaggtgagtgggctcaggcatgtgcactagtatgactaaaggtcatagactattagactattagtctatgaccttcctctagaaacactcgactggtaagggaagaatgcctcaactgagcatgtgcacaactcccataaacacacttgtgcttgcggagcctctcaagtgctggcag

SEQ ID NO: 11716 - DNA, 191 bp, Homo sapiens
  source 1..191: mol_type = unassigned DNA
ctgccagcacttgagaggctccgcaagcacaagtgtgtttatgggagttgtgcacatgctcagttgaggcattcttcccttaccagtcgagtgtttctagaggaaggtcatagactaatagtctaatagtctatgacctttagtcatactagtgcacatgcctgagcccactcacctgtgaacccccaaaa

SEQ ID NO: 11717 - RNA, 27 nt, Homo sapiens
  source 1..27: mol_type = unassigned RNA
ttcttcaggactcactcaacatgtacc

SEQ ID NO: 11718 - DNA, 27 bp, Homo sapiens
  source 1..27: mol_type = unassigned DNA
ttcttcaggactcactcaacatgtacc

SEQ ID NO: 11719 - DNA, 27 bp, Homo sapiens
  source 1..27: mol_type = unassigned DNA
ggtacatgttgagtgagtcctgaagaa

SEQ ID NO: 11720 - RNA, 31 nt, Homo sapiens
  source 1..31: mol_type = unassigned RNA
ctttctttttctctgtctctctgtctctctc

SEQ ID NO: 11721 - DNA, 31 bp, Homo sapiens
  source 1..31: mol_type = unassigned DNA
ctttctttttctctgtctctctgtctctctc

SEQ ID NO: 11722 - DNA, 31 bp, Homo sapiens
  source 1..31: mol_type = unassigned DNA
gagagagacagagagacagagaaaaagaaag

SEQ ID NO: 11723 - RNA, 44 nt, Homo sapiens
  source 1..44: mol_type = unassigned RNA
atgagtaactctaatggtctctctgaagactctgcactgttgct

SEQ ID NO: 11724 - DNA, 44 bp, Homo sapiens
  source 1..44: mol_type = unassigned DNA
atgagtaactctaatggtctctctgaagactctgcactgttgct

SEQ ID NO: 11725 - DNA, 44 bp, Homo sapiens
  source 1..44: mol_type = unassigned DNA
agcaacagtgcagagtcttcagagagaccattagagttactcat

SEQ ID NO: 11726 - RNA, 76 nt, Homo sapiens
  source 1..76: mol_type = unassigned RNA
tccctggttcaagagattctcctgcctcagcctctaagtagctgggattacaggcatgcaccaccacgccaggctg

SEQ ID NO: 11727 - DNA, 76 bp, Homo sapiens
  source 1..76: mol_type = unassigned DNA
tccctggttcaagagattctcctgcctcagcctctaagtagctgggattacaggcatgcaccaccacgccaggctg

SEQ ID NO: 11728 - DNA, 76 bp, Homo sapiens
  source 1..76: mol_type = unassigned DNA
cagcctggcgtggtggtgcatgcctgtaatcccagctacttagaggctgaggcaggagaatctcttgaaccaggga

SEQ ID NO: 11729 - RNA, 69 nt, Homo sapiens
  source 1..69: mol_type = unassigned RNA
ctcagtccctactcaagatgaagtcactctggtttgaacatctctgataatagaaccgctcagcacccc

SEQ ID NO: 11730 - DNA, 69 bp, Homo sapiens
  source 1..69: mol_type = unassigned DNA
ctcagtccctactcaagatgaagtcactctggtttgaacatctctgataatagaaccgctcagcacccc

SEQ ID NO: 11731 - DNA, 69 bp, Homo sapiens
  source 1..69: mol_type = unassigned DNA
ggggtgctgagcggttctattatcagagatgttcaaaccagagtgacttcatcttgagtagggactgag

SEQ ID NO: 11732 - RNA, 52 nt, Homo sapiens
  source 1..52: mol_type = unassigned RNA
tggagatcagactgataccacatggtctaatggacccatgatgagtcacctc

SEQ ID NO: 11733 - DNA, 52 bp, Homo sapiens
  source 1..52: mol_type = unassigned DNA
tggagatcagactgataccacatggtctaatggacccatgatgagtcacctc

SEQ ID NO: 11734 - DNA, 52 bp, Homo sapiens
  source 1..52: mol_type = unassigned DNA
gaggtgactcatcatgggtccattagaccatgtggtatcagtctgatctcca

SEQ ID NO: 11735 - RNA, 34 nt, Homo sapiens
  source 1..34: mol_type = unassigned RNA
gaacctgaagatctgtcccaggctgctgagcagg

SEQ ID NO: 11736 - DNA, 34 bp, Homo sapiens
  source 1..34: mol_type = unassigned DNA
gaacctgaagatctgtcccaggctgctgagcagg

SEQ ID NO: 11737 - DNA, 34 bp, Homo sapiens
  source 1..34: mol_type = unassigned DNA
cctgctcagcagcctgggacagatcttcaggttc

SEQ ID NO: 11738 - RNA, 115 nt, Homo sapiens
  source 1..115: mol_type = unassigned RNA
atttatgtacatttctaatagacatgaatttggaaggctattatccactgctaattacaatacttcccattataacaatgacctctggcagatttttgaaaatcctgtggtatgt

SEQ ID NO: 11739 - DNA, 115 bp, Homo sapiens
  source 1..115: mol_type = unassigned DNA
atttatgtacatttctaatagacatgaatttggaaggctattatccactgctaattacaatacttcccattataacaatgacctctggcagatttttgaaaatcctgtggtatgt

SEQ ID NO: 11740 - DNA, 115 bp, Homo sapiens
  source 1..115: mol_type = unassigned DNA
acataccacaggattttcaaaaatctgccagaggtcattgttataatgggaagtattgtaattagcagtggataatagccttccaaattcatgtctattagaaatgtacataaat

SEQ ID NO: 11741 - RNA, 28 nt, Homo sapiens
  source 1..28: mol_type = unassigned RNA
ttcttcttagagatctcgctgggccagt

SEQ ID NO: 11742 - DNA, 28 bp, Homo sapiens
  source 1..28: mol_type = unassigned DNA
ttcttcttagagatctcgctgggccagt

SEQ ID NO: 11743 - DNA, 28 bp, Homo sapiens
  source 1..28: mol_type = unassigned DNA
actggcccagcgagatctctaagaagaa

SEQ ID NO: 11744 - RNA, 35 nt, Homo sapiens
  source 1..35: mol_type = unassigned RNA
gttgaggcttgactgtagcatcctgcttagagacc

SEQ ID NO: 11745 - DNA, 35 bp, Homo sapiens
  source 1..35: mol_type = unassigned DNA
gttgaggcttgactgtagcatcctgcttagagacc

SEQ ID NO: 11746 - DNA, 35 bp, Homo sapiens
  source 1..35: mol_type = unassigned DNA
ggtctctaagcaggatgctacagtcaagcctcaac

SEQ ID NO: 11747 - RNA, 49 nt, Homo sapiens
  source 1..49: mol_type = unassigned RNA
ggtccccaagaccttccactctggactgtagttctcctatctatctcat

SEQ ID NO: 11748 - DNA, 49 bp, Homo sapiens
  source 1..49: mol_type = unassigned DNA
ggtccccaagaccttccactctggactgtagttctcctatctatctcat

SEQ ID NO: 11749 - DNA, 49 bp, Homo sapiens
  source 1..49: mol_type = unassigned DNA
atgagatagataggagaactacagtccagagtggaaggtcttggggacc

SEQ ID NO: 11750 - RNA, 59 nt, Homo sapiens
  source 1..59: mol_type = unassigned RNA
gtgcggggtatgggggtgggtttttaaatctcgtttctcttggacaagcacagggatct

SEQ ID NO: 11751 - DNA, 59 bp, Homo sapiens
  source 1..59: mol_type = unassigned DNA
gtgcggggtatgggggtgggtttttaaatctcgtttctcttggacaagcacagggatct

SEQ ID NO: 11752 - DNA, 59 bp, Homo sapiens
  source 1..59: mol_type = unassigned DNA
agatccctgtgcttgtccaagagaaacgagatttaaaaacccacccccataccccgcac

SEQ ID NO: 11753 - RNA, 25 nt, Homo sapiens
  source 1..25: mol_type = unassigned RNA
tattttggtttctagatgcatgaaa

SEQ ID NO: 11754 - DNA, 25 bp, Homo sapiens
  source 1..25: mol_type = unassigned DNA
tattttggtttctagatgcatgaaa

SEQ ID NO: 11755 - DNA, 25 bp, Homo sapiens
  source 1..25: mol_type = unassigned DNA
tttcatgcatctagaaaccaaaata

SEQ ID NO: 11756 - RNA, 29 nt, Homo sapiens
  source 1..29: mol_type = unassigned RNA
gtcccaccgcaaggactggagaagggtga

SEQ ID NO: 11757 - DNA, 29 bp, Homo sapiens
  source 1..29: mol_type = unassigned DNA
gtcccaccgcaaggactggagaagggtga

SEQ ID NO: 11758 - DNA, 29 bp, Homo sapiens
  source 1..29: mol_type = unassigned DNA
tcacccttctccagtccttgcggtgggac

SEQ ID NO: 11759 - RNA, 24 nt, Homo sapiens
  source 1..24: mol_type = unassigned RNA
acagggcgtgtgacaggggcatga

SEQ ID NO: 11760 - DNA, 24 bp, Homo sapiens
  source 1..24: mol_type = unassigned DNA
acagggcgtgtgacaggggcatga

SEQ ID NO: 11761 - DNA, 24 bp, Homo sapiens
  source 1..24: mol_type = unassigned DNA
tcatgcccctgtcacacgccctgt

SEQ ID NO: 11762 - RNA, 29 nt, Homo sapiens
  source 1..29: mol_type = unassigned RNA
ggccctactctgagcgggctgagctgtca

SEQ ID NO: 11763 - DNA, 29 bp, Homo sapiens
  source 1..29: mol_type = unassigned DNA
ggccctactctgagcgggctgagctgtca

SEQ ID NO: 11764 - DNA, 29 bp, Homo sapiens
  source 1..29: mol_type = unassigned DNA
tgacagctcagcccgctcagagtagggcc

SEQ ID NO: 11765 - RNA, 32 nt, Homo sapiens
  source 1..32: mol_type = unassigned RNA
tatagctttgttggaccagatggtgaggaaag

SEQ ID NO: 11766 - DNA, 32 bp, Homo sapiens
  source 1..32: mol_type = unassigned DNA
tatagctttgttggaccagatggtgaggaaag

SEQ ID NO: 11767 - DNA, 32 bp, Homo sapiens
  source 1..32: mol_type = unassigned DNA
ctttcctcaccatctggtccaacaaagctata

SEQ ID NO: 11768 - RNA, 47 nt, Homo sapiens
  source 1..47: mol_type = unassigned RNA
gtaatgatgatatgggattgagaagggagtatcgcccggagggaaga

SEQ ID NO: 11769 - DNA, 47 bp, Homo sapiens
  source 1..47: mol_type = unassigned DNA
gtaatgatgatatgggattgagaagggagtatcgcccggagggaaga

SEQ ID NO: 11770 - DNA, 47 bp, Homo sapiens
  source 1..47: mol_type = unassigned DNA
tcttccctccgggcgatactcccttctcaatcccatatcatcattac

SEQ ID NO: 11771 - RNA, 88 nt, Homo sapiens
  source 1..88: mol_type = unassigned RNA
ggcaaccttccttgatcacagagggtcagggctggagccccacccagggctccctcctgtagacactctggctttggggcatgtctgg

SEQ ID NO: 11772 - DNA, 88 bp, Homo sapiens
  source 1..88: mol_type = unassigned DNA
ggcaaccttccttgatcacagagggtcagggctggagccccacccagggctccctcctgtagacactctggctttggggcatgtctgg

SEQ ID NO: 11773 - DNA, 88 bp, Homo sapiens
  source 1..88: mol_type = unassigned DNA
ccagacatgccccaaagccagagtgtctacaggagggagccctgggtggggctccagccctgaccctctgtgatcaaggaaggttgcc

SEQ ID NO: 11774 - RNA, 24 nt, Homo sapiens
  source 1..24: mol_type = unassigned RNA
ttttctatgatgcaccaaacttgc

SEQ ID NO: 11775 - DNA, 24 bp, Homo sapiens
  source 1..24: mol_type = unassigned DNA
ttttctatgatgcaccaaacttgc

SEQ ID NO: 11776 - DNA, 24 bp, Homo sapiens
  source 1..24: mol_type = unassigned DNA
gcaagtttggtgcatcatagaaaa

SEQ ID NO: 11777 - RNA, 32 nt, Homo sapiens
  source 1..32: mol_type = unassigned RNA
aatcagggcccaatcagctgactgtcagctgg

SEQ ID NO: 11778 - DNA, 32 bp, Homo sapiens
  source 1..32: mol_type = unassigned DNA
aatcagggcccaatcagctgactgtcagctgg

SEQ ID NO: 11779 - DNA, 32 bp, Homo sapiens
  source 1..32: mol_type = unassigned DNA
ccagctgacagtcagctgattgggccctgatt

SEQ ID NO: 11780 - RNA, 31 nt, Homo sapiens
  source 1..31: mol_type = unassigned RNA
cacactatggaactctgctgatggggaccca

SEQ ID NO: 11781 - DNA, 31 bp, Homo sapiens
  source 1..31: mol_type = unassigned DNA
cacactatggaactctgctgatggggaccca

SEQ ID NO: 11782 - DNA, 31 bp, Homo sapiens
  source 1..31: mol_type = unassigned DNA
tgggtccccatcagcagagttccatagtgtg

SEQ ID NO: 11783 - RNA, 90 nt, Homo sapiens
  source 1..90: mol_type = unassigned RNA
aggttttgaggaatgactgcgtggaagaaaccaccagatgtcacttggcgccccctctccttggtcctcctgatatctgtgatctcatga

SEQ ID NO: 11784 - DNA, 90 bp, Homo sapiens
  source 1..90: mol_type = unassigned DNA
aggttttgaggaatgactgcgtggaagaaaccaccagatgtcacttggcgccccctctccttggtcctcctgatatctgtgatctcatga

SEQ ID NO: 11785 - DNA, 90 bp, Homo sapiens
  source 1..90: mol_type = unassigned DNA
tcatgagatcacagatatcaggaggaccaaggagagggggcgccaagtgacatctggtggtttcttccacgcagtcattcctcaaaacct

SEQ ID NO: 11786 - RNA, 77 nt, Homo sapiens
  source 1..77: mol_type = unassigned RNA
caaatgcctcattcacttgtagaactaaaagtcatccaaaccacaatactgaatgccttttatcacccccatcttgc

SEQ ID NO: 11787 - DNA, 77 bp, Homo sapiens
  source 1..77: mol_type = unassigned DNA
caaatgcctcattcacttgtagaactaaaagtcatccaaaccacaatactgaatgccttttatcacccccatcttgc

SEQ ID NO: 11788 - DNA, 77 bp, Homo sapiens
  source 1..77: mol_type = unassigned DNA
gcaagatgggggtgataaaaggcattcagtattgtggtttggatgacttttagttctacaagtgaatgaggcatttg

SEQ ID NO: 11789 - RNA, 30 nt, Homo sapiens
  source 1..30: mol_type = unassigned RNA
tacttgatctgactgcttcctgctaatctt

SEQ ID NO: 11790 - DNA, 30 bp, Homo sapiens
  source 1..30: mol_type = unassigned DNA
tacttgatctgactgcttcctgctaatctt

SEQ ID NO: 11791 - DNA, 30 bp, Homo sapiens
  source 1..30: mol_type = unassigned DNA
aagattagcaggaagcagtcagatcaagta

SEQ ID NO: 11792 - RNA, 28 nt, Homo sapiens
  source 1..28: mol_type = unassigned RNA
agagcggaactttgaattgatagaaggc

SEQ ID NO: 11793 - DNA, 28 bp, Homo sapiens
  source 1..28: mol_type = unassigned DNA
agagcggaactttgaattgatagaaggc

SEQ ID NO: 11794 - DNA, 28 bp, Homo sapiens
  source 1..28: mol_type = unassigned DNA
gccttctatcaattcaaagttccgctct

SEQ ID NO: 11795 - RNA, 65 nt, Homo sapiens
  source 1..65: mol_type = unassigned RNA
atgaaacgtctgaatactgagtggagtgagttggagaatctggtccttaaggatatgtcagatgg

SEQ ID NO: 11796 - DNA, 65 bp, Homo sapiens
  source 1..65: mol_type = unassigned DNA
atgaaacgtctgaatactgagtggagtgagttggagaatctggtccttaaggatatgtcagatgg

SEQ ID NO: 11797 - DNA, 65 bp, Homo sapiens
  source 1..65: mol_type = unassigned DNA
ccatctgacatatccttaaggaccagattctccaactcactccactcagtattcagacgtttcat

SEQ ID NO: 11798 - RNA, 79 nt, Homo sapiens
  source 1..79: mol_type = unassigned RNA
gcagttactatttgtatagcattttaaagtttgtagtactcttctcatatttgtctcatatgctgctttcaaaattctt

SEQ ID NO: 11799 - DNA, 79 bp, Homo sapiens
  source 1..79: mol_type = unassigned DNA
gcagttactatttgtatagcattttaaagtttgtagtactcttctcatatttgtctcatatgctgctttcaaaattctt

SEQ ID NO: 11800 - DNA, 79 bp, Homo sapiens
  source 1..79: mol_type = unassigned DNA
aagaattttgaaagcagcatatgagacaaatatgagaagagtactacaaactttaaaatgctatacaaatagtaactgc

SEQ ID NO: 11801 - RNA, 31 nt, Homo sapiens
  source 1..31: mol_type = unassigned RNA
ccggaatgattgtctgtagagcagtaaccag

SEQ ID NO: 11802 - DNA, 31 bp, Homo sapiens
  source 1..31: mol_type = unassigned DNA
ccggaatgattgtctgtagagcagtaaccag

SEQ ID NO: 11803 - DNA, 31 bp, Homo sapiens
  source 1..31: mol_type = unassigned DNA
ctggttactgctctacagacaatcattccgg

SEQ ID NO: 11804 - RNA, 137 nt, Homo sapiens
  source 1..137: mol_type = unassigned RNA
cccaataaaagagtgaaccccggccgtattcaaaaccaggtccactcagacgccgccgctaggatcttcacacccagattcctacctaggcagtcctgtgtgacttcgtgaaaaataatctcgtgttttaagtcttg

SEQ ID NO: 11805 - DNA, 137 bp, Homo sapiens
  source 1..137: mol_type = unassigned DNA
cccaataaaagagtgaaccccggccgtattcaaaaccaggtccactcagacgccgccgctaggatcttcacacccagattcctacctaggcagtcctgtgtgacttcgtgaaaaataatctcgtgttttaagtcttg

SEQ ID NO: 11806 - DNA, 137 bp, Homo sapiens
  source 1..137: mol_type = unassigned DNA
caagacttaaaacacgagattatttttcacgaagtcacacaggactgcctaggtaggaatctgggtgtgaagatcctagcggcggcgtctgagtggacctggttttgaatacggccggggttcactcttttattggg

SEQ ID NO: 11807 - RNA, 34 nt, Homo sapiens
  source 1..34: mol_type = unassigned RNA
agtagcctggagaagttgacctacctgtggagat

SEQ ID NO: 11808 - DNA, 34 bp, Homo sapiens
  source 1..34: mol_type = unassigned DNA
agtagcctggagaagttgacctacctgtggagat

SEQ ID NO: 11809 - DNA, 34 bp, Homo sapiens
  source 1..34: mol_type = unassigned DNA
atctccacaggtaggtcaacttctccaggctact

SEQ ID NO: 11810 - RNA, 167 nt, Homo sapiens
  source 1..167: mol_type = unassigned RNA
taaagatcatttttatttcatttcattttttatttcgtttcatcttatttttgcagataggctcgaggagagagcatcctcagataagaatgtagactcactttctgctccacataaccatcctccagaagatccttttggttctgttcctttcatttctcattcag

SEQ ID NO: 11811 - DNA, 167 bp, Homo sapiens
  source 1..167: mol_type = unassigned DNA
taaagatcatttttatttcatttcattttttatttcgtttcatcttatttttgcagataggctcgaggagagagcatcctcagataagaatgtagactcactttctgctccacataaccatcctccagaagatccttttggttctgttcctttcatttctcattcag

SEQ ID NO: 11812 - DNA, 167 bp, Homo sapiens
  source 1..167: mol_type = unassigned DNA
ctgaatgagaaatgaaaggaacagaaccaaaaggatcttctggaggatggttatgtggagcagaaagtgagtctacattcttatctgaggatgctctctcctcgagcctatctgcaaaaataagatgaaacgaaataaaaaatgaaatgaaataaaaatgatcttta

SEQ ID NO: 11813 - RNA, 160 nt, Homo sapiens
  source 1..160: mol_type = unassigned RNA
ttttggtttttgagttttatttttcttaactcacgtaggttctactggaaggactacatcatcaaagacccaaacgttatttcaccatagtgattatttcaagtagcttgctacttggacttattgtacttctattgatctcatatgttatgtggaaggt

SEQ ID NO: 11814 - DNA, 160 bp, Homo sapiens
  source 1..160: mol_type = unassigned DNA
ttttggtttttgagttttatttttcttaactcacgtaggttctactggaaggactacatcatcaaagacccaaacgttatttcaccatagtgattatttcaagtagcttgctacttggacttattgtacttctattgatctcatatgttatgtggaaggt

SEQ ID NO: 11815 - DNA, 160 bp, Homo sapiens
  source 1..160: mol_type = unassigned DNA
accttccacataacatatgagatcaatagaagtacaataagtccaagtagcaagctacttgaaataatcactatggtgaaataacgtttgggtctttgatgatgtagtccttccagtagaacctacgtgagttaagaaaaataaaactcaaaaaccaaaa

SEQ ID NO: 11816 - RNA, 32 nt, Homo sapiens
  source 1..32: mol_type = unassigned RNA
cccaaagtagatcgcaagggcccccagataga

SEQ ID NO: 11817 - DNA, 32 bp, Homo sapiens
  source 1..32: mol_type = unassigned DNA
cccaaagtagatcgcaagggcccccagataga

SEQ ID NO: 11818 - DNA, 32 bp, Homo sapiens
  source 1..32: mol_type = unassigned DNA
tctatctgggggcccttgcgatctactttggg

SEQ ID NO: 11819 - RNA, 30 nt, Homo sapiens
  source 1..30: mol_type = unassigned RNA
attttccgggctctgtgaagacacagacca

SEQ ID NO: 11820 - DNA, 30 bp, Homo sapiens
  source 1..30: mol_type = unassigned DNA
attttccgggctctgtgaagacacagacca

SEQ ID NO: 11821 - DNA, 30 bp, Homo sapiens
  source 1..30: mol_type = unassigned DNA
tggtctgtgtcttcacagagcccggaaaat

SEQ ID NO: 11822 - RNA, 91 nt, Homo sapiens
  source 1..91: mol_type = unassigned RNA
ctagttctgagacctttggacttggactgagtcatgctactggtgtttcaggtctctggtttatagatgtctggtcatgggacttctcagc

SEQ ID NO: 11823 - DNA, 91 bp, Homo sapiens
  source 1..91: mol_type = unassigned DNA
ctagttctgagacctttggacttggactgagtcatgctactggtgtttcaggtctctggtttatagatgtctggtcatgggacttctcagc

SEQ ID NO: 11824 - DNA, 91 bp, Homo sapiens
  source 1..91: mol_type = unassigned DNA
gctgagaagtcccatgaccagacatctataaaccagagacctgaaacaccagtagcatgactcagtccaagtccaaaggtctcagaactag

SEQ ID NO: 11825 - RNA, 34 nt, Homo sapiens
  source 1..34: mol_type = unassigned RNA
gttttgctgggcccgactgcagaataagtaagga

SEQ ID NO: 11826 - DNA, 34 bp, Homo sapiens
  source 1..34: mol_type = unassigned DNA
gttttgctgggcccgactgcagaataagtaagga

SEQ ID NO: 11827 - DNA, 34 bp, Homo sapiens
  source 1..34: mol_type = unassigned DNA
tccttacttattctgcagtcgggcccagcaaaac

SEQ ID NO: 11828 - RNA, 32 nt, Homo sapiens
  source 1..32: mol_type = unassigned RNA
ccaaagatggcctcttcagtgacaacaatctc

SEQ ID NO: 11829 - DNA, 32 bp, Homo sapiens
  source 1..32: mol_type = unassigned DNA
ccaaagatggcctcttcagtgacaacaatctc

SEQ ID NO: 11830 - DNA, 32 bp, Homo sapiens
  source 1..32: mol_type = unassigned DNA
gagattgttgtcactgaagaggccatctttgg

SEQ ID NO: 11831 - RNA, 70 nt, Homo sapiens
  source 1..70: mol_type = unassigned RNA
gattgtccttttgttttggccaggaatctggtaccaaatgtgagaacctgctgccacgtgcctactggaa

SEQ ID NO: 11832 - DNA, 70 bp, Homo sapiens
  source 1..70: mol_type = unassigned DNA
gattgtccttttgttttggccaggaatctggtaccaaatgtgagaacctgctgccacgtgcctactggaa

SEQ ID NO: 11833 - DNA, 70 bp, Homo sapiens
  source 1..70: mol_type = unassigned DNA
ttccagtaggcacgtggcagcaggttctcacatttggtaccagattcctggccaaaacaaaaggacaatc

SEQ ID NO: 11834 - RNA, 53 nt, Homo sapiens
  source 1..53: mol_type = unassigned RNA
tcccctctaatattttctttcaaagcaaaagagctgtgtctgaacatcagctc

SEQ ID NO: 11835 - DNA, 53 bp, Homo sapiens
  source 1..53: mol_type = unassigned DNA
tcccctctaatattttctttcaaagcaaaagagctgtgtctgaacatcagctc

SEQ ID NO: 11836 - DNA, 53 bp, Homo sapiens
  source 1..53: mol_type = unassigned DNA
gagctgatgttcagacacagctcttttgctttgaaagaaaatattagagggga

SEQ ID NO: 11837 - RNA, 29 nt, Homo sapiens
  source 1..29: mol_type = unassigned RNA
ctgatttaggtcagtctggtcaggtgaga

SEQ ID NO: 11838 - DNA, 29 bp, Homo sapiens
  source 1..29: mol_type = unassigned DNA
ctgatttaggtcagtctggtcaggtgaga

SEQ ID NO: 11839 - DNA, 29 bp, Homo sapiens
  source 1..29: mol_type = unassigned DNA
tctcacctgaccagactgacctaaatcag

SEQ ID NO: 11840 - RNA, 25 nt, Homo sapiens
  source 1..25: mol_type = unassigned RNA
gaaccagatatggcactgagattgt

SEQ ID NO: 11841 - DNA, 25 bp, Homo sapiens
  source 1..25: mol_type = unassigned DNA
gaaccagatatggcactgagattgt

SEQ ID NO: 11842 - DNA, 25 bp, Homo sapiens
  source 1..25: mol_type = unassigned DNA
acaatctcagtgccatatctggttc

SEQ ID NO: 11843 - RNA, 53 nt, Homo sapiens
  source 1..53: mol_type = unassigned RNA
tcaatgaccccttcattgacctgaactacatggtttacatgttccaatatgac

SEQ ID NO: 11844 - DNA, 53 bp, Homo sapiens
  source 1..53: mol_type = unassigned DNA
tcaatgaccccttcattgacctgaactacatggtttacatgttccaatatgac

SEQ ID NO: 11845 - DNA, 53 bp, Homo sapiens
  source 1..53: mol_type = unassigned DNA
gtcatattggaacatgtaaaccatgtagttcaggtcaatgaaggggtcattga

SEQ ID NO: 11846 - RNA, 40 nt, Homo sapiens
  source 1..40: mol_type = unassigned RNA
cccaggaggagggattggcctgggacgcagggagaccagg

SEQ ID NO: 11847 - DNA, 40 bp, Homo sapiens
  source 1..40: mol_type = unassigned DNA
cccaggaggagggattggcctgggacgcagggagaccagg

SEQ ID NO: 11848 - DNA, 40 bp, Homo sapiens
  source 1..40: mol_type = unassigned DNA
cctggtctccctgcgtcccaggccaatccctcctcctggg

SEQ ID NO: 11849 - RNA, 32 nt, Homo sapiens
  source 1..32: mol_type = unassigned RNA
ccactctggctctgggacaggggaagcacatg

SEQ ID NO: 11850 - DNA, 32 bp, Homo sapiens
  source 1..32: mol_type = unassigned DNA
ccactctggctctgggacaggggaagcacatg

SEQ ID NO: 11851 - DNA, 32 bp, Homo sapiens
  source 1..32: mol_type = unassigned DNA
catgtgcttcccctgtcccagagccagagtgg

SEQ ID NO: 11852 - RNA, 32 nt, Homo sapiens
  source 1..32: mol_type = unassigned RNA
ctcttcccgcagtaggtgacgggttgccccag

SEQ ID NO: 11853 - DNA, 32 bp, Homo sapiens
  source 1..32: mol_type = unassigned DNA
ctcttcccgcagtaggtgacgggttgccccag

SEQ ID NO: 11854 - DNA, 32 bp, Homo sapiens
  source 1..32: mol_type = unassigned DNA
ctggggcaacccgtcacctactgcgggaagag

SEQ ID NO: 11855 - RNA, 30 nt, Homo sapiens
  source 1..30: mol_type = unassigned RNA
ccctgactatgttggccagacttgcatccg

SEQ ID NO: 11856 - DNA, 30 bp, Homo sapiens
  source 1..30: mol_type = unassigned DNA
ccctgactatgttggccagacttgcatccg

SEQ ID NO: 11857 - DNA, 30 bp, Homo sapiens
  source 1..30: mol_type = unassigned DNA
cggatgcaagtctggccaacatagtcaggg

SEQ ID NO: 11858 - RNA, 123 nt, Homo sapiens
  source 1..123: mol_type = unassigned RNA
taaaggtttcagtctacaggaaagttaacaggacacctaggccctgttatgtgccttactgtggatcagatttccagtggacaagatctaatcatcactggctccaaggatcattacatcaaa

SEQ ID NO: 11859 - DNA, 123 bp, Homo sapiens
  source 1..123: mol_type = unassigned DNA
taaaggtttcagtctacaggaaagttaacaggacacctaggccctgttatgtgccttactgtggatcagatttccagtggacaagatctaatcatcactggctccaaggatcattacatcaaa

SEQ ID NO: 11860 - DNA, 123 bp, Homo sapiens
  source 1..123: mol_type = unassigned DNA
tttgatgtaatgatccttggagccagtgatgattagatcttgtccactggaaatctgatccacagtaaggcacataacagggcctaggtgtcctgttaactttcctgtagactgaaaccttta

SEQ ID NO: 11861 - RNA, 27 nt, Homo sapiens
  source 1..27: mol_type = unassigned RNA
ggttgggctttccggtgaccagccctc

SEQ ID NO: 11862 - DNA, 27 bp, Homo sapiens
  source 1..27: mol_type = unassigned DNA
ggttgggctttccggtgaccagccctc

SEQ ID NO: 11863 - DNA, 27 bp, Homo sapiens
  source 1..27: mol_type = unassigned DNA
gagggctggtcaccggaaagcccaacc

SEQ ID NO: 11864 - RNA, 29 nt, Homo sapiens
  source 1..29: mol_type = unassigned RNA
tctttaaactactgaactgttacctaggt

SEQ ID NO: 11865 - DNA, 29 bp, Homo sapiens
  source 1..29: mol_type = unassigned DNA
tctttaaactactgaactgttacctaggt

SEQ ID NO: 11866 - DNA, 29 bp, Homo sapiens
  source 1..29: mol_type = unassigned DNA
acctaggtaacagttcagtagtttaaaga

SEQ ID NO: 11867 - RNA, 29 nt, Homo sapiens
  source 1..29: mol_type = unassigned RNA
cctcttccttagaacttctacagaagcag

SEQ ID NO: 11868 - DNA, 29 bp, Homo sapiens
  source 1..29: mol_type = unassigned DNA
cctcttccttagaacttctacagaagcag

SEQ ID NO: 11869 - DNA, 29 bp, Homo sapiens
  source 1..29: mol_type = unassigned DNA
ctgcttctgtagaagttctaaggaagagg

SEQ ID NO: 11870 - RNA, 40 nt, Homo sapiens
  source 1..40: mol_type = unassigned RNA
cagacagaaggcagagggtgtaaggaaggtaaaagagggt

SEQ ID NO: 11871 - DNA, 40 bp, Homo sapiens
  source 1..40: mol_type = unassigned DNA
cagacagaaggcagagggtgtaaggaaggtaaaagagggt

SEQ ID NO: 11872 - DNA, 40 bp, Homo sapiens
  source 1..40: mol_type = unassigned DNA
accctcttttaccttccttacaccctctgccttctgtctg

SEQ ID NO: 11873 - RNA, 68 nt, Homo sapiens
  source 1..68: mol_type = unassigned RNA
ttcatgtcattctcttgtctcagcctccctagaagctgggactataggcgcctgctaccacgcccagc

SEQ ID NO: 11874 - DNA, 68 bp, Homo sapiens
  source 1..68: mol_type = unassigned DNA
ttcatgtcattctcttgtctcagcctccctagaagctgggactataggcgcctgctaccacgcccagc

SEQ ID NO: 11875 - DNA, 68 bp, Homo sapiens
  source 1..68: mol_type = unassigned DNA
gctgggcgtggtagcaggcgcctatagtcccagcttctagggaggctgagacaagagaatgacatgaa

SEQ ID NO: 11876 - RNA, 31 nt, Homo sapiens
  source 1..31: mol_type = unassigned RNA
tttgacgtataagttcctcacaccctatctc

SEQ ID NO: 11877 - DNA, 31 bp, Homo sapiens
  source 1..31: mol_type = unassigned DNA
tttgacgtataagttcctcacaccctatctc

SEQ ID NO: 11878 - DNA, 31 bp, Homo sapiens
  source 1..31: mol_type = unassigned DNA
gagatagggtgtgaggaacttatacgtcaaa

SEQ ID NO: 11879 - RNA, 93 nt, Homo sapiens
  source 1..93: mol_type = unassigned RNA
ctcacatgttctattcctgaaagaggccagggccaggccagcttccagctctcagaaacacctgctcgtggaatcaatggccacaaggcatgg

SEQ ID NO: 11880 - DNA, 93 bp, Homo sapiens
  source 1..93: mol_type = unassigned DNA
ctcacatgttctattcctgaaagaggccagggccaggccagcttccagctctcagaaacacctgctcgtggaatcaatggccacaaggcatgg

SEQ ID NO: 11881 - DNA, 93 bp, Homo sapiens
  source 1..93: mol_type = unassigned DNA
ccatgccttgtggccattgattccacgagcaggtgtttctgagagctggaagctggcctggccctggcctctttcaggaatagaacatgtgag

SEQ ID NO: 11882 - RNA, 27 nt, Homo sapiens
  source 1..27: mol_type = unassigned RNA
ccacccctgatacatgagccagtgatt

SEQ ID NO: 11883 - DNA, 27 bp, Homo sapiens
  source 1..27: mol_type = unassigned DNA
ccacccctgatacatgagccagtgatt

SEQ ID NO: 11884 - DNA, 27 bp, Homo sapiens
  source 1..27: mol_type = unassigned DNA
aatcactggctcatgtatcaggggtgg

SEQ ID NO: 11885 - RNA, 92 nt, Homo sapiens
  source 1..92: mol_type = unassigned RNA
tcagctccctcagaggcccctgatgtctggagaattgtgagcttggagccaggaaatcatactgtgaccttattctggaaggtaagatgtgc

SEQ ID NO: 11886 - DNA, 92 bp, Homo sapiens
  source 1..92: mol_type = unassigned DNA
tcagctccctcagaggcccctgatgtctggagaattgtgagcttggagccaggaaatcatactgtgaccttattctggaaggtaagatgtgc

SEQ ID NO: 11887 - DNA, 92 bp, Homo sapiens
  source 1..92: mol_type = unassigned DNA
gcacatcttaccttccagaataaggtcacagtatgatttcctggctccaagctcacaattctccagacatcaggggcctctgagggagctga

SEQ ID NO: 11888 - RNA, 29 nt, Homo sapiens
  source 1..29: mol_type = unassigned RNA
aggcttggactgaaccatgctactgacat

SEQ ID NO: 11889 - DNA, 29 bp, Homo sapiens
  source 1..29: mol_type = unassigned DNA
aggcttggactgaaccatgctactgacat

SEQ ID NO: 11890 - DNA, 29 bp, Homo sapiens
  source 1..29: mol_type = unassigned DNA
atgtcagtagcatggttcagtccaagcct

SEQ ID NO: 11891 - RNA, 32 nt, Homo sapiens
  source 1..32: mol_type = unassigned RNA
aaaaagaaagaaattctggccaggtgtggtgg

SEQ ID NO: 11892 - DNA, 32 bp, Homo sapiens
  source 1..32: mol_type = unassigned DNA
aaaaagaaagaaattctggccaggtgtggtgg

SEQ ID NO: 11893 - DNA, 32 bp, Homo sapiens
  source 1..32: mol_type = unassigned DNA
ccaccacacctggccagaatttctttcttttt

SEQ ID NO: 11894 - RNA, 37 nt, Homo sapiens
  source 1..37: mol_type = unassigned RNA
tggcttcatggaaactccctgtaaactaaaagcttca

SEQ ID NO: 11895 - DNA, 37 bp, Homo sapiens
  source 1..37: mol_type = unassigned DNA
tggcttcatggaaactccctgtaaactaaaagcttca

SEQ ID NO: 11896 - DNA, 37 bp, Homo sapiens
  source 1..37: mol_type = unassigned DNA
tgaagcttttagtttacagggagtttccatgaagcca

SEQ ID NO: 11897 - RNA, 93 nt, Homo sapiens
  source 1..93: mol_type = unassigned RNA
aaaatgttatttttttctgcagacagcctttaattgctggcatgtaccttatgatgtctgttgacactgttatcccagcaggagaaaaaggtg

SEQ ID NO: 11898 - DNA, 93 bp, Homo sapiens
  source 1..93: mol_type = unassigned DNA
aaaatgttatttttttctgcagacagcctttaattgctggcatgtaccttatgatgtctgttgacactgttatcccagcaggagaaaaaggtg

SEQ ID NO: 11899 - DNA, 93 bp, Homo sapiens
  source 1..93: mol_type = unassigned DNA
cacctttttctcctgctgggataacagtgtcaacagacatcataaggtacatgccagcaattaaaggctgtctgcagaaaaaaataacatttt

SEQ ID NO: 11900 - RNA, 96 nt, Homo sapiens
  source 1..96: mol_type = unassigned RNA
tactcatgcttgaatgatggatggcatcttccctgcatgttggaatagaggccggaatgatgtcactgtggagtctgaaccaggctttctgttgtg

SEQ ID NO: 11901 - DNA, 96 bp, Homo sapiens
  source 1..96: mol_type = unassigned DNA
tactcatgcttgaatgatggatggcatcttccctgcatgttggaatagaggccggaatgatgtcactgtggagtctgaaccaggctttctgttgtg

SEQ ID NO: 11902 - DNA, 96 bp, Homo sapiens
  source 1..96: mol_type = unassigned DNA
cacaacagaaagcctggttcagactccacagtgacatcattccggcctctattccaacatgcagggaagatgccatccatcattcaagcatgagta

SEQ ID NO: 11903 - RNA, 31 nt, Homo sapiens
  source 1..31: mol_type = unassigned RNA
cagcatgaagggccagaaaggagaccaagga

SEQ ID NO: 11904 - DNA, 31 bp, Homo sapiens
  source 1..31: mol_type = unassigned DNA
cagcatgaagggccagaaaggagaccaagga

SEQ ID NO: 11905 - DNA, 31 bp, Homo sapiens
  source 1..31: mol_type = unassigned DNA
tccttggtctcctttctggcccttcatgctg

SEQ ID NO: 11906 - RNA, 72 nt, Homo sapiens
  source 1..72: mol_type = unassigned RNA
caatgctaagaacactgagacgtagattctgagttgaagggtctgaaaatctggactgatggcaagtcatga

SEQ ID NO: 11907 - DNA, 72 bp, Homo sapiens
  source 1..72: mol_type = unassigned DNA
caatgctaagaacactgagacgtagattctgagttgaagggtctgaaaatctggactgatggcaagtcatga

SEQ ID NO: 11908 - DNA, 72 bp, Homo sapiens
  source 1..72: mol_type = unassigned DNA
tcatgacttgccatcagtccagattttcagacccttcaactcagaatctacgtctcagtgttcttagcattg

SEQ ID NO: 11909 - RNA, 29 nt, Homo sapiens
  source 1..29: mol_type = unassigned RNA
tcctcagcagtatggctctgacatctctt

SEQ ID NO: 11910 - DNA, 29 bp, Homo sapiens
  source 1..29: mol_type = unassigned DNA
tcctcagcagtatggctctgacatctctt

SEQ ID NO: 11911 - DNA, 29 bp, Homo sapiens
  source 1..29: mol_type = unassigned DNA
aagagatgtcagagccatactgctgagga

SEQ ID NO: 11912 - RNA, 31 nt, Homo sapiens
  source 1..31: mol_type = unassigned RNA
gtgtgcacagaaagctgtggatttcgaaaag

SEQ ID NO: 11913 - DNA, 31 bp, Homo sapiens
  source 1..31: mol_type = unassigned DNA
gtgtgcacagaaagctgtggatttcgaaaag

SEQ ID NO: 11914 - DNA, 31 bp, Homo sapiens
  source 1..31: mol_type = unassigned DNA
cttttcgaaatccacagctttctgtgcacac

SEQ ID NO: 11915 - RNA, 156 nt, Homo sapiens
  source 1..156: mol_type = unassigned RNA
aatgggcggggcgggaggctgggagggatgggaaagaggttactgcagtgggtggggggtgggtagggaggcgctggctgcagtctagggctgtagaagggattccccctcccccctgggaagaggagaaggtcaatgcagtgaggaaggggaggt

SEQ ID NO: 11916 - DNA, 156 bp, Homo sapiens
  source 1..156: mol_type = unassigned DNA
aatgggcggggcgggaggctgggagggatgggaaagaggttactgcagtgggtggggggtgggtagggaggcgctggctgcagtctagggctgtagaagggattccccctcccccctgggaagaggagaaggtcaatgcagtgaggaaggggaggt

SEQ ID NO: 11917 - DNA, 156 bp, Homo sapiens
  source 1..156: mol_type = unassigned DNA
acctccccttcctcactgcattgaccttctcctcttcccaggggggagggggaatcccttctacagccctagactgcagccagcgcctccctacccaccccccacccactgcagtaacctctttcccatccctcccagcctcccgccccgcccatt

SEQ ID NO: 11918 - RNA, 40 nt, Homo sapiens
  source 1..40: mol_type = unassigned RNA
ttctgagacctttaaaattggactgagccatgcaaaatgc

SEQ ID NO: 11919 - DNA, 40 bp, Homo sapiens
  source 1..40: mol_type = unassigned DNA
ttctgagacctttaaaattggactgagccatgcaaaatgc

SEQ ID NO: 11920 - DNA, 40 bp, Homo sapiens
  source 1..40: mol_type = unassigned DNA
gcattttgcatggctcagtccaattttaaaggtctcagaa

SEQ ID NO: 11921 - RNA, 33 nt, Homo sapiens
  source 1..33: mol_type = unassigned RNA
ccctccctcggtttctatctctccatccatctc

SEQ ID NO: 11922 - DNA, 33 bp, Homo sapiens
  source 1..33: mol_type = unassigned DNA
ccctccctcggtttctatctctccatccatctc

SEQ ID NO: 11923 - DNA, 33 bp, Homo sapiens
  source 1..33: mol_type = unassigned DNA
gagatggatggagagatagaaaccgagggaggg

SEQ ID NO: 11924 - RNA, 31 nt, Homo sapiens
  source 1..31: mol_type = unassigned RNA
ttaccttagtgactggggacctcgattcaaa

SEQ ID NO: 11925 - DNA, 31 bp, Homo sapiens
  source 1..31: mol_type = unassigned DNA
ttaccttagtgactggggacctcgattcaaa

SEQ ID NO: 11926 - DNA, 31 bp, Homo sapiens
  source 1..31: mol_type = unassigned DNA
tttgaatcgaggtccccagtcactaaggtaa

SEQ ID NO: 11927 - RNA, 33 nt, Homo sapiens
  source 1..33: mol_type = unassigned RNA
gcaagcaggactttgaggcaagtgtgggccact

SEQ ID NO: 11928 - DNA, 33 bp, Homo sapiens
  source 1..33: mol_type = unassigned DNA
gcaagcaggactttgaggcaagtgtgggccact

SEQ ID NO: 11929 - DNA, 33 bp, Homo sapiens
  source 1..33: mol_type = unassigned DNA
agtggcccacacttgcctcaaagtcctgcttgc

SEQ ID NO: 11930 - RNA, 20 nt, Homo sapiens
  source 1..20: mol_type = unassigned RNA
cagccagaagggtttaaggt

SEQ ID NO: 11931 - DNA, 20 bp, Homo sapiens
  source 1..20: mol_type = unassigned DNA
cagccagaagggtttaaggt

SEQ ID NO: 11932 - DNA, 20 bp, Homo sapiens
  source 1..20: mol_type = unassigned DNA
accttaaacccttctggctg

SEQ ID NO: 11933 - RNA, 77 nt, Homo sapiens
  source 1..77: mol_type = unassigned RNA
aatttatccttcttctgcttttttgttctgttctgaccctcagtggactggatgatggctgttcacattggtaaggg

SEQ ID NO: 11934 - DNA, 77 bp, Homo sapiens
  source 1..77: mol_type = unassigned DNA
aatttatccttcttctgcttttttgttctgttctgaccctcagtggactggatgatggctgttcacattggtaaggg

SEQ ID NO: 11935 - DNA, 77 bp, Homo sapiens
  source 1..77: mol_type = unassigned DNA
cccttaccaatgtgaacagccatcatccagtccactgagggtcagaacagaacaaaaaagcagaagaaggataaatt

SEQ ID NO: 11936 - RNA, 47 nt, Homo sapiens
  source 1..47: mol_type = unassigned RNA
cacccacctcggcctctcaaagtactgggattgtaactgtgagctac

SEQ ID NO: 11937 - DNA, 47 bp, Homo sapiens
  source 1..47: mol_type = unassigned DNA
cacccacctcggcctctcaaagtactgggattgtaactgtgagctac

SEQ ID NO: 11938 - DNA, 47 bp, Homo sapiens
  source 1..47: mol_type = unassigned DNA
gtagctcacagttacaatcccagtactttgagaggccgaggtgggtg

SEQ ID NO: 11939 - RNA, 32 nt, Homo sapiens
  source 1..32: mol_type = unassigned RNA
attgctcagctggccgggaactcagacctcat

SEQ ID NO: 11940 - DNA, 32 bp, Homo sapiens
  source 1..32: mol_type = unassigned DNA
attgctcagctggccgggaactcagacctcat

SEQ ID NO: 11941 - DNA, 32 bp, Homo sapiens
  source 1..32: mol_type = unassigned DNA
atgaggtctgagttcccggccagctgagcaat

SEQ ID NO: 11942 - RNA, 55 nt, Homo sapiens
  source 1..55: mol_type = unassigned RNA
cttaaaatttattacattgtaggtactctgctaaatcctgtgtacgtcttatctc

SEQ ID NO: 11943 - DNA, 55 bp, Homo sapiens
  source 1..55: mol_type = unassigned DNA
cttaaaatttattacattgtaggtactctgctaaatcctgtgtacgtcttatctc

SEQ ID NO: 11944 - DNA, 55 bp, Homo sapiens
  source 1..55: mol_type = unassigned DNA
gagataagacgtacacaggatttagcagagtacctacaatgtaataaattttaag

SEQ ID NO: 11945 - RNA, 30 nt, Homo sapiens
  source 1..30: mol_type = unassigned RNA
atgtatttagtacggactgtgccacagaat

SEQ ID NO: 11946 - DNA, 30 bp, Homo sapiens
  source 1..30: mol_type = unassigned DNA
atgtatttagtacggactgtgccacagaat

SEQ ID NO: 11947 - DNA, 30 bp, Homo sapiens
  source 1..30: mol_type = unassigned DNA
attctgtggcacagtccgtactaaatacat

SEQ ID NO: 11948 - RNA, 60 nt, Homo sapiens
  source 1..60: mol_type = unassigned RNA
tccaaaggcttctggactgacccctgcctccaactgcctgatgggattttggcaatagga

SEQ ID NO: 11949 - DNA, 60 bp, Homo sapiens
  source 1..60: mol_type = unassigned DNA
tccaaaggcttctggactgacccctgcctccaactgcctgatgggattttggcaatagga

SEQ ID NO: 11950 - DNA, 60 bp, Homo sapiens
  source 1..60: mol_type = unassigned DNA
tcctattgccaaaatcccatcaggcagttggaggcaggggtcagtccagaagcctttgga

SEQ ID NO: 11951 - RNA, 39 nt, Homo sapiens
  source 1..39: mol_type = unassigned RNA
gacttccacaatagttgaccgagtttacagtcccaccaa

SEQ ID NO: 11952 - DNA, 39 bp, Homo sapiens
  source 1..39: mol_type = unassigned DNA
gacttccacaatagttgaccgagtttacagtcccaccaa

SEQ ID NO: 11953 - DNA, 39 bp, Homo sapiens
  source 1..39: mol_type = unassigned DNA
ttggtgggactgtaaactcggtcaactattgtggaagtc

SEQ ID NO: 11954 - RNA, 55 nt, Homo sapiens
  source 1..55: mol_type = unassigned RNA
ctctgcgattggagtttggcctgaggactatggaggggctcgtcttctgcttgtg

SEQ ID NO: 11955 - DNA, 55 bp, Homo sapiens
  source 1..55: mol_type = unassigned DNA
ctctgcgattggagtttggcctgaggactatggaggggctcgtcttctgcttgtg

SEQ ID NO: 11956 - DNA, 55 bp, Homo sapiens
  source 1..55: mol_type = unassigned DNA
cacaagcagaagacgagcccctccatagtcctcaggccaaactccaatcgcagag

SEQ ID NO: 11957 - RNA, 41 nt, Homo sapiens
  source 1..41: mol_type = unassigned RNA
gcgtggagtcttgaggcctgctgagggcgtgagctggcatg

SEQ ID NO: 11958 - DNA, 41 bp, Homo sapiens
  source 1..41: mol_type = unassigned DNA
gcgtggagtcttgaggcctgctgagggcgtgagctggcatg

SEQ ID NO: 11959 - DNA, 41 bp, Homo sapiens
  source 1..41: mol_type = unassigned DNA
catgccagctcacgccctcagcaggcctcaagactccacgc

SEQ ID NO: 11960 - RNA, 23 nt, Homo sapiens
  source 1..23: mol_type = unassigned RNA
cagccagaaggaggtgggcacca

SEQ ID NO: 11961 - DNA, 23 bp, Homo sapiens
  source 1..23: mol_type = unassigned DNA
cagccagaaggaggtgggcacca

SEQ ID NO: 11962 - DNA, 23 bp, Homo sapiens
  source 1..23: mol_type = unassigned DNA
tggtgcccacctccttctggctg

SEQ ID NO: 11963 - RNA, 65 nt, Homo sapiens
  source 1..65: mol_type = unassigned RNA
cggactctgattcaccatttagagaggactcactggttttctcttcctgggccgtgcgtgcgtgc

SEQ ID NO: 11964 - DNA, 65 bp, Homo sapiens
  source 1..65: mol_type = unassigned DNA
cggactctgattcaccatttagagaggactcactggttttctcttcctgggccgtgcgtgcgtgc

SEQ ID NO: 11965 - DNA, 65 bp, Homo sapiens
  source 1..65: mol_type = unassigned DNA
gcacgcacgcacggcccaggaagagaaaaccagtgagtcctctctaaatggtgaatcagagtccg

SEQ ID NO: 11966 - RNA, 59 nt, Homo sapiens
  source 1..59: mol_type = unassigned RNA
ccggcagatcaaaagacatccgggggtgagtcctcagaacctcagaacctctaactcct

SEQ ID NO: 11967 - DNA, 59 bp, Homo sapiens
  source 1..59: mol_type = unassigned DNA
ccggcagatcaaaagacatccgggggtgagtcctcagaacctcagaacctctaactcct

SEQ ID NO: 11968 - DNA, 59 bp, Homo sapiens
  source 1..59: mol_type = unassigned DNA
aggagttagaggttctgaggttctgaggactcacccccggatgtcttttgatctgccgg

SEQ ID NO: 11969 - RNA, 54 nt, Homo sapiens
  source 1..54: mol_type = unassigned RNA
ccagaaattcagattgttatgagaaatgttctgattgaatattgactttagtcg

SEQ ID NO: 11970 - DNA, 54 bp, Homo sapiens
  source 1..54: mol_type = unassigned DNA
ccagaaattcagattgttatgagaaatgttctgattgaatattgactttagtcg

SEQ ID NO: 11971 - DNA, 54 bp, Homo sapiens
  source 1..54: mol_type = unassigned DNA
cgactaaagtcaatattcaatcagaacatttctcataacaatctgaatttctgg

SEQ ID NO: 11972 - RNA, 32 nt, Homo sapiens
  source 1..32: mol_type = unassigned RNA
ttcccactggatggactgagccatcctaaaac

SEQ ID NO: 11973 - DNA, 32 bp, Homo sapiens
  source 1..32: mol_type = unassigned DNA
ttcccactggatggactgagccatcctaaaac

SEQ ID NO: 11974 - DNA, 32 bp, Homo sapiens
  source 1..32: mol_type = unassigned DNA
gttttaggatggctcagtccatccagtgggaa

SEQ ID NO: 11975 - RNA, 33 nt, Homo sapiens
  source 1..33: mol_type = unassigned RNA
agtcaagggtggactgagccctgcttctggtat

SEQ ID NO: 11976 - DNA, 33 bp, Homo sapiens
  source 1..33: mol_type = unassigned DNA
agtcaagggtggactgagccctgcttctggtat

SEQ ID NO: 11977 - DNA, 33 bp, Homo sapiens
  source 1..33: mol_type = unassigned DNA
ataccagaagcagggctcagtccacccttgact

SEQ ID NO: 11978 - RNA, 22 nt, Homo sapiens
  source 1..22: mol_type = unassigned RNA
ctcactatgatgattgataaag

SEQ ID NO: 11979 - DNA, 22 bp, Homo sapiens
  source 1..22: mol_type = unassigned DNA
ctcactatgatgattgataaag

SEQ ID NO: 11980 - DNA, 22 bp, Homo sapiens
  source 1..22: mol_type = unassigned DNA
ctttatcaatcatcatagtgag

SEQ ID NO: 11981 - RNA, 31 nt, Homo sapiens
  source 1..31: mol_type = unassigned RNA
cccagcaagatctggggctgcagagaacaga

SEQ ID NO: 11982 - DNA, 31 bp, Homo sapiens
  source 1..31: mol_type = unassigned DNA
cccagcaagatctggggctgcagagaacaga

SEQ ID NO: 11983 - DNA, 31 bp, Homo sapiens
  source 1..31: mol_type = unassigned DNA
tctgttctctgcagccccagatcttgctggg

SEQ ID NO: 11984 - RNA, 49 nt, Homo sapiens
  source 1..49: mol_type = unassigned RNA
acctttgacatctccctttctttcgcaatctgtatctcttctgcctgca

SEQ ID NO: 11985 - DNA, 49 bp, Homo sapiens
  source 1..49: mol_type = unassigned DNA
acctttgacatctccctttctttcgcaatctgtatctcttctgcctgca

SEQ ID NO: 11986 - DNA, 49 bp, Homo sapiens
  source 1..49: mol_type = unassigned DNA
tgcaggcagaagagatacagattgcgaaagaaagggagatgtcaaaggt

SEQ ID NO: 11987 - RNA, 29 nt, Homo sapiens
  source 1..29: mol_type = unassigned RNA
tagttctaagattgtagaatgatcctttc

SEQ ID NO: 11988 - DNA, 29 bp, Homo sapiens
  source 1..29: mol_type = unassigned DNA
tagttctaagattgtagaatgatcctttc

SEQ ID NO: 11989 - DNA, 29 bp, Homo sapiens
  source 1..29: mol_type = unassigned DNA
gaaaggatcattctacaatcttagaacta

SEQ ID NO: 11990 - RNA, 118 nt, Homo sapiens
  source 1..118: mol_type = unassigned RNA
ttttttcttttaaacttggttgataagtggaattaggagtatatttgaaagaatcttagcacaaacaggactgttgtactagatgttcttaggaaatatctcagaagtattttatttg

SEQ ID NO: 11991 - DNA, 118 bp, Homo sapiens
  source 1..118: mol_type = unassigned DNA
ttttttcttttaaacttggttgataagtggaattaggagtatatttgaaagaatcttagcacaaacaggactgttgtactagatgttcttaggaaatatctcagaagtattttatttg

SEQ ID NO: 11992 - DNA, 118 bp, Homo sapiens
  source 1..118: mol_type = unassigned DNA
caaataaaatacttctgagatatttcctaagaacatctagtacaacagtcctgtttgtgctaagattctttcaaatatactcctaattccacttatcaaccaagtttaaaagaaaaaa

SEQ ID NO: 11993 - RNA, 38 nt, Homo sapiens
  source 1..38: mol_type = unassigned RNA
ggaaatgacactgaccagattaagctacaaatacaagt

SEQ ID NO: 11994 - DNA, 38 bp, Homo sapiens
  source 1..38: mol_type = unassigned DNA
ggaaatgacactgaccagattaagctacaaatacaagt

SEQ ID NO: 11995 - DNA, 38 bp, Homo sapiens
  source 1..38: mol_type = unassigned DNA
acttgtatttgtagcttaatctggtcagtgtcatttcc

SEQ ID NO: 11996 - RNA, 26 nt, Homo sapiens
  source 1..26: mol_type = unassigned RNA
gagggagcaggagctttggaccccag

SEQ ID NO: 11997 - DNA, 26 bp, Homo sapiens
  source 1..26: mol_type = unassigned DNA
gagggagcaggagctttggaccccag

SEQ ID NO: 11998 - DNA, 26 bp, Homo sapiens
  source 1..26: mol_type = unassigned DNA
ctggggtccaaagctcctgctccctc

SEQ ID NO: 11999 - RNA, 30 nt, Homo sapiens
  source 1..30: mol_type = unassigned RNA
gtgattgttcaggttgtagaatgcgcattt

SEQ ID NO: 12000 - DNA, 30 bp, Homo sapiens
  source 1..30: mol_type = unassigned DNA
gtgattgttcaggttgtagaatgcgcattt

SEQ ID NO: 12001 - DNA, 30 bp, Homo sapiens
  source 1..30: mol_type = unassigned DNA
aaatgcgcattctacaacctgaacaatcac

SEQ ID NO: 12002 - RNA, 24 nt, Homo sapiens
  source 1..24: mol_type = unassigned RNA
ccagccagaagggtgaaaatttct

SEQ ID NO: 12003 - DNA, 24 bp, Homo sapiens
  source 1..24: mol_type = unassigned DNA
ccagccagaagggtgaaaatttct

SEQ ID NO: 12004 - DNA, 24 bp, Homo sapiens
  source 1..24: mol_type = unassigned DNA
agaaattttcacccttctggctgg

SEQ ID NO: 12005 - RNA, 51 nt, Homo sapiens
  source 1..51: mol_type = unassigned RNA
gcttttgttgagctgtaactgagctatggaatagcttctttgatgtacctc

SEQ ID NO: 12006 - DNA, 51 bp, Homo sapiens
  source 1..51: mol_type = unassigned DNA
gcttttgttgagctgtaactgagctatggaatagcttctttgatgtacctc

SEQ ID NO: 12007 - DNA, 51 bp, Homo sapiens
  source 1..51: mol_type = unassigned DNA
gaggtacatcaaagaagctattccatagctcagttacagctcaacaaaagc

SEQ ID NO: 12008 - RNA, 147 nt, Homo sapiens
  source 1..147: mol_type = unassigned RNA
gaaaatatatcttgatggaaactacctggatctttttagtctctgggagaatatacatctatgaaaggtggtgaggaggtaggagaagtatgtgcacagaagtactttgaagaatgtgtgacagacttcgaaaaagacatcttgtat

SEQ ID NO: 12009 - DNA, 147 bp, Homo sapiens
  source 1..147: mol_type = unassigned DNA
gaaaatatatcttgatggaaactacctggatctttttagtctctgggagaatatacatctatgaaaggtggtgaggaggtaggagaagtatgtgcacagaagtactttgaagaatgtgtgacagacttcgaaaaagacatcttgtat

SEQ ID NO: 12010 - DNA, 147 bp, Homo sapiens
  source 1..147: mol_type = unassigned DNA
atacaagatgtctttttcgaagtctgtcacacattcttcaaagtacttctgtgcacatacttctcctacctcctcaccacctttcatagatgtatattctcccagagactaaaaagatccaggtagtttccatcaagatatattttc

SEQ ID NO: 12011 - RNA, 194 nt, Homo sapiens
  source 1..194: mol_type = unassigned RNA
ggcccctttgccaactggatatccgtgggctcctccaatcaaaggacaggcaggagaccagagggtagggagaagggaggagagtcttacactggccttcattccctggcagttgttggcaggtcctcgcagttgctgttgaggcagcagaagtagggtcattccgaggccctagaagcccagatagaagcaga

SEQ ID NO: 12012 - DNA, 194 bp, Homo sapiens
  source 1..194: mol_type = unassigned DNA
ggcccctttgccaactggatatccgtgggctcctccaatcaaaggacaggcaggagaccagagggtagggagaagggaggagagtcttacactggccttcattccctggcagttgttggcaggtcctcgcagttgctgttgaggcagcagaagtagggtcattccgaggccctagaagcccagatagaagcaga

SEQ ID NO: 12013 - DNA, 194 bp, Homo sapiens
  source 1..194: mol_type = unassigned DNA
tctgcttctatctgggcttctagggcctcggaatgaccctacttctgctgcctcaacagcaactgcgaggacctgccaacaactgccagggaatgaaggccagtgtaagactctcctcccttctccctaccctctggtctcctgcctgtcctttgattggaggagcccacggatatccagttggcaaaggggcc

SEQ ID NO: 12014 - RNA, 29 nt, Homo sapiens
  source 1..29: mol_type = unassigned RNA
ctgctgaagtaatgcaatggtctcaatct

SEQ ID NO: 12015 - DNA, 29 bp, Homo sapiens
  source 1..29: mol_type = unassigned DNA
ctgctgaagtaatgcaatggtctcaatct

SEQ ID NO: 12016 - DNA, 29 bp, Homo sapiens
  source 1..29: mol_type = unassigned DNA
agattgagaccattgcattacttcagcag

SEQ ID NO: 12017 - RNA, 151 nt, Homo sapiens
  source 1..151: mol_type = unassigned RNA
ctgtgttaaaagctatgaagcagaagcccagagtactccaaaaggccagaatagaacagtctgagagccaggaagggcttccttgaggaagcgctgtttgaactaaaatctcaaggccgagcttcagagacaggaacaggagaagcaggga

SEQ ID NO: 12018 - DNA, 151 bp, Homo sapiens
  source 1..151: mol_type = unassigned DNA
ctgtgttaaaagctatgaagcagaagcccagagtactccaaaaggccagaatagaacagtctgagagccaggaagggcttccttgaggaagcgctgtttgaactaaaatctcaaggccgagcttcagagacaggaacaggagaagcaggga

SEQ ID NO: 12019 - DNA, 151 bp, Homo sapiens
  source 1..151: mol_type = unassigned DNA
tccctgcttctcctgttcctgtctctgaagctcggccttgagattttagttcaaacagcgcttcctcaaggaagcccttcctggctctcagactgttctattctggccttttggagtactctgggcttctgcttcatagcttttaacacag

SEQ ID NO: 12020 - RNA, 40 nt, Homo sapiens
  source 1..40: mol_type = unassigned RNA
ctgtggccctctgttgtgccctctgctttgtcatcgatct

SEQ ID NO: 12021 - DNA, 40 bp, Homo sapiens
  source 1..40: mol_type = unassigned DNA
ctgtggccctctgttgtgccctctgctttgtcatcgatct

SEQ ID NO: 12022 - DNA, 40 bp, Homo sapiens
  source 1..40: mol_type = unassigned DNA
agatcgatgacaaagcagagggcacaacagagggccacag

SEQ ID NO: 12023 - RNA, 112 nt, Homo sapiens
  source 1..112: mol_type = unassigned RNA
tttgcctttggcacttttctctgtctctgaactctcctcctctgatctcattgctggcaacgctgaagccaaagctgtgataagcccagagaagtgtgcccgccccctgcct

SEQ ID NO: 12024 - DNA, 112 bp, Homo sapiens
  source 1..112: mol_type = unassigned DNA
tttgcctttggcacttttctctgtctctgaactctcctcctctgatctcattgctggcaacgctgaagccaaagctgtgataagcccagagaagtgtgcccgccccctgcct

SEQ ID NO: 12025 - DNA, 112 bp, Homo sapiens
  source 1..112: mol_type = unassigned DNA
aggcagggggcgggcacacttctctgggcttatcacagctttggcttcagcgttgccagcaatgagatcagaggaggagagttcagagacagagaaaagtgccaaaggcaaa

SEQ ID NO: 12026 - RNA, 173 nt, Homo sapiens
  source 1..173: mol_type = unassigned RNA
acaatctccacaattcccagatcccaaggatcatgaggaggtgcatggactgactccttcaagtcatcaaagttccacgaagccgtggtagctgctcagagtgtcagccaaggaagtcaccttcttgtgaggagcaattacagcagagtacagaatctggaaaagggtttgga

SEQ ID NO: 12027 - DNA, 173 bp, Homo sapiens
  source 1..173: mol_type = unassigned DNA
acaatctccacaattcccagatcccaaggatcatgaggaggtgcatggactgactccttcaagtcatcaaagttccacgaagccgtggtagctgctcagagtgtcagccaaggaagtcaccttcttgtgaggagcaattacagcagagtacagaatctggaaaagggtttgga

SEQ ID NO: 12028 - DNA, 173 bp, Homo sapiens
  source 1..173: mol_type = unassigned DNA
tccaaacccttttccagattctgtactctgctgtaattgctcctcacaagaaggtgacttccttggctgacactctgagcagctaccacggcttcgtggaactttgatgacttgaaggagtcagtccatgcacctcctcatgatccttgggatctgggaattgtggagattgt

SEQ ID NO: 12029 - RNA, 55 nt, Homo sapiens
  source 1..55: mol_type = unassigned RNA
acagaacagaggggctaagttccgtgggtcacatgagagctaggctgcagcgcct

SEQ ID NO: 12030 - DNA, 55 bp, Homo sapiens
  source 1..55: mol_type = unassigned DNA
acagaacagaggggctaagttccgtgggtcacatgagagctaggctgcagcgcct

SEQ ID NO: 12031 - DNA, 55 bp, Homo sapiens
  source 1..55: mol_type = unassigned DNA
aggcgctgcagcctagctctcatgtgacccacggaacttagcccctctgttctgt

SEQ ID NO: 12032 - RNA, 31 nt, Homo sapiens
  source 1..31: mol_type = unassigned RNA
cacgcctgcctgcgtcctggtccccagctcc

SEQ ID NO: 12033 - DNA, 31 bp, Homo sapiens
  source 1..31: mol_type = unassigned DNA
cacgcctgcctgcgtcctggtccccagctcc

SEQ ID NO: 12034 - DNA, 31 bp, Homo sapiens
  source 1..31: mol_type = unassigned DNA
ggagctggggaccaggacgcaggcaggcgtg

SEQ ID NO: 12035 - RNA, 47 nt, Homo sapiens
  source 1..47: mol_type = unassigned RNA
ttgttcgcattttaaataacacatgtcggaaagtagtatacaacttt

SEQ ID NO: 12036 - DNA, 47 bp, Homo sapiens
  source 1..47: mol_type = unassigned DNA
ttgttcgcattttaaataacacatgtcggaaagtagtatacaacttt

SEQ ID NO: 12037 - DNA, 47 bp, Homo sapiens
  source 1..47: mol_type = unassigned DNA
aaagttgtatactactttccgacatgtgttatttaaaatgcgaacaa

SEQ ID NO: 12038 - RNA, 31 nt, Homo sapiens
  source 1..31: mol_type = unassigned RNA
tctttctgtggcaaaaccaagatgaagagat

SEQ ID NO: 12039 - DNA, 31 bp, Homo sapiens
  source 1..31: mol_type = unassigned DNA
tctttctgtggcaaaaccaagatgaagagat

SEQ ID NO: 12040 - DNA, 31 bp, Homo sapiens
  source 1..31: mol_type = unassigned DNA
atctcttcatcttggttttgccacagaaaga

SEQ ID NO: 12041 - RNA, 32 nt, Homo sapiens
  source 1..32: mol_type = unassigned RNA
atagaacccatttggccaggtctgggccatct

SEQ ID NO: 12042 - DNA, 32 bp, Homo sapiens
  source 1..32: mol_type = unassigned DNA
atagaacccatttggccaggtctgggccatct

SEQ ID NO: 12043 - DNA, 32 bp, Homo sapiens
  source 1..32: mol_type = unassigned DNA
agatggcccagacctggccaaatgggttctat

SEQ ID NO: 12044 - RNA, 72 nt, Homo sapiens
  source 1..72: mol_type = unassigned RNA
cagggtttcaccatgttgggcaggctggtctcgaactcctgacctcaggtgattcgtatgcctcggcctccc

SEQ ID NO: 12045 - DNA, 72 bp, Homo sapiens
  source 1..72: mol_type = unassigned DNA
cagggtttcaccatgttgggcaggctggtctcgaactcctgacctcaggtgattcgtatgcctcggcctccc

SEQ ID NO: 12046 - DNA, 72 bp, Homo sapiens
  source 1..72: mol_type = unassigned DNA
gggaggccgaggcatacgaatcacctgaggtcaggagttcgagaccagcctgcccaacatggtgaaaccctg

SEQ ID NO: 12047 - RNA, 48 nt, Homo sapiens
  source 1..48: mol_type = unassigned RNA
ttcttcttcttcttcttcttcttcttctgcttgttcttctgcttgttc

SEQ ID NO: 12048 - DNA, 48 bp, Homo sapiens
  source 1..48: mol_type = unassigned DNA
ttcttcttcttcttcttcttcttcttctgcttgttcttctgcttgttc

SEQ ID NO: 12049 - DNA, 48 bp, Homo sapiens
  source 1..48: mol_type = unassigned DNA
gaacaagcagaagaacaagcagaagaagaagaagaagaagaagaagaa

SEQ ID NO: 12050 - RNA, 91 nt, Homo sapiens
  source 1..91: mol_type = unassigned RNA
cggccaggatttccgtcttctaatctgaagttttgaatattccaacctctttgcacagtcttctgccttgttttctgtctttttccaggtg

SEQ ID NO: 12051 - DNA, 91 bp, Homo sapiens
  source 1..91: mol_type = unassigned DNA
cggccaggatttccgtcttctaatctgaagttttgaatattccaacctctttgcacagtcttctgccttgttttctgtctttttccaggtg

SEQ ID NO: 12052 - DNA, 91 bp, Homo sapiens
  source 1..91: mol_type = unassigned DNA
cacctggaaaaagacagaaaacaaggcagaagactgtgcaaagaggttggaatattcaaaacttcagattagaagacggaaatcctggccg

SEQ ID NO: 12053 - RNA, 126 nt, Homo sapiens
  source 1..126: mol_type = unassigned RNA
ttcaggggaaccgccatcttccagtaattcaccaaaatgatgaacacaaagtgaaagaggagaggcacccgatatatgttctccaggagttttagaaaacatggagttgttcctttggccgtgcac

SEQ ID NO: 12054 - DNA, 126 bp, Homo sapiens
  source 1..126: mol_type = unassigned DNA
ttcaggggaaccgccatcttccagtaattcaccaaaatgatgaacacaaagtgaaagaggagaggcacccgatatatgttctccaggagttttagaaaacatggagttgttcctttggccgtgcac

SEQ ID NO: 12055 - DNA, 126 bp, Homo sapiens
  source 1..126: mol_type = unassigned DNA
gtgcacggccaaaggaacaactccatgttttctaaaactcctggagaacatatatcgggtgcctctcctctttcactttgtgttcatcattttggtgaattactggaagatggcggttcccctgaa

SEQ ID NO: 12056 - RNA, 24 nt, Homo sapiens
  source 1..24: mol_type = unassigned RNA
gttgctgtgcgcgtgcagcggagt

SEQ ID NO: 12057 - DNA, 24 bp, Homo sapiens
  source 1..24: mol_type = unassigned DNA
gttgctgtgcgcgtgcagcggagt

SEQ ID NO: 12058 - DNA, 24 bp, Homo sapiens
  source 1..24: mol_type = unassigned DNA
actccgctgcacgcgcacagcaac

SEQ ID NO: 12059 - RNA, 62 nt, Homo sapiens
  source 1..62: mol_type = unassigned RNA
cattaacatcaacatggaccttaagactgaaagaacaggccgggccctgtggctctcgcctg

SEQ ID NO: 12060 - DNA, 62 bp, Homo sapiens
  source 1..62: mol_type = unassigned DNA
cattaacatcaacatggaccttaagactgaaagaacaggccgggccctgtggctctcgcctg

SEQ ID NO: 12061 - DNA, 62 bp, Homo sapiens
  source 1..62: mol_type = unassigned DNA
caggcgagagccacagggcccggcctgttctttcagtcttaaggtccatgttgatgttaatg

SEQ ID NO: 12062 - RNA, 47 nt, Homo sapiens
  source 1..47: mol_type = unassigned RNA
ggtggtctcagagaggccgagcgtgtgacagcagaaaaatcgcttgc

SEQ ID NO: 12063 - DNA, 47 bp, Homo sapiens
  source 1..47: mol_type = unassigned DNA
ggtggtctcagagaggccgagcgtgtgacagcagaaaaatcgcttgc

SEQ ID NO: 12064 - DNA, 47 bp, Homo sapiens
  source 1..47: mol_type = unassigned DNA
gcaagcgatttttctgctgtcacacgctcggcctctctgagaccacc

SEQ ID NO: 12065 - RNA, 65 nt, Homo sapiens
  source 1..65: mol_type = unassigned RNA
gccgtttggaacttgtgtgaatgaaagccagtaagtgatcgcctgtaggactcagtttccccatc

SEQ ID NO: 12066 - DNA, 65 bp, Homo sapiens
  source 1..65: mol_type = unassigned DNA
gccgtttggaacttgtgtgaatgaaagccagtaagtgatcgcctgtaggactcagtttccccatc

SEQ ID NO: 12067 - DNA, 65 bp, Homo sapiens
  source 1..65: mol_type = unassigned DNA
gatggggaaactgagtcctacaggcgatcacttactggctttcattcacacaagttccaaacggc

SEQ ID NO: 12068 - RNA, 18 nt, Homo sapiens
  source 1..18: mol_type = unassigned RNA
cagccagaagggagtaat

SEQ ID NO: 12069 - DNA, 18 bp, Homo sapiens
  source 1..18: mol_type = unassigned DNA
cagccagaagggagtaat

SEQ ID NO: 12070 - DNA, 18 bp, Homo sapiens
  source 1..18: mol_type = unassigned DNA
attactcccttctggctg

SEQ ID NO: 12071 - RNA, 110 nt, Homo sapiens
  source 1..110: mol_type = unassigned RNA
tttatagactattttatccaacaactgtagaatatacattcttctcatcagcacatggaacagtctctgggatagaccatatcgtatgccacaatacaatctcaacaaat

SEQ ID NO: 12072 - DNA, 110 bp, Homo sapiens
  source 1..110: mol_type = unassigned DNA
tttatagactattttatccaacaactgtagaatatacattcttctcatcagcacatggaacagtctctgggatagaccatatcgtatgccacaatacaatctcaacaaat

SEQ ID NO: 12073 - DNA, 110 bp, Homo sapiens
  source 1..110: mol_type = unassigned DNA
atttgttgagattgtattgtggcatacgatatggtctatcccagagactgttccatgtgctgatgagaagaatgtatattctacagttgttggataaaatagtctataaa

SEQ ID NO: 12074 - RNA, 200 nt, Homo sapiens
  source 1..200: mol_type = unassigned RNA
attgtttgtatttgtggtatataagaatgtcttctctttactttcagaggagtatggaatgtcccatatatggctaatgtgtacttaattaaaggaaagacactccgatcagagatgaatgaaaggaactattttgttcgtgataaactggatcctgatatggctctttgccgaaatgctagagaaatggtaagatatgc

SEQ ID NO: 12075 - DNA, 200 bp, Homo sapiens
  source 1..200: mol_type = unassigned DNA
attgtttgtatttgtggtatataagaatgtcttctctttactttcagaggagtatggaatgtcccatatatggctaatgtgtacttaattaaaggaaagacactccgatcagagatgaatgaaaggaactattttgttcgtgataaactggatcctgatatggctctttgccgaaatgctagagaaatggtaagatatgc

SEQ ID NO: 12076 - DNA, 200 bp, Homo sapiens
  source 1..200: mol_type = unassigned DNA
gcatatcttaccatttctctagcatttcggcaaagagccatatcaggatccagtttatcacgaacaaaatagttcctttcattcatctctgatcggagtgtctttcctttaattaagtacacattagccatatatgggacattccatactcctctgaaagtaaagagaagacattcttatataccacaaatacaaacaat

SEQ ID NO: 12077 - RNA, 33 nt, Homo sapiens
  source 1..33: mol_type = unassigned RNA
gtggtctttaactgaagggcactgactgggtac

SEQ ID NO: 12078 - DNA, 33 bp, Homo sapiens
  source 1..33: mol_type = unassigned DNA
gtggtctttaactgaagggcactgactgggtac

SEQ ID NO: 12079 - DNA, 33 bp, Homo sapiens
  source 1..33: mol_type = unassigned DNA
gtacccagtcagtgcccttcagttaaagaccac

SEQ ID NO: 12080 - RNA, 29 nt, Homo sapiens
  source 1..29: mol_type = unassigned RNA
gcttcctgtttgggctgaaaggagcaaaa

SEQ ID NO: 12081 - DNA, 29 bp, Homo sapiens
  source 1..29: mol_type = unassigned DNA
gcttcctgtttgggctgaaaggagcaaaa

SEQ ID NO: 12082 - DNA, 29 bp, Homo sapiens
  source 1..29: mol_type = unassigned DNA
ttttgctcctttcagcccaaacaggaagc

SEQ ID NO: 12083 - RNA, 30 nt, Homo sapiens
  source 1..30: mol_type = unassigned RNA
agaagagattaaggatcttttgccggaaat

SEQ ID NO: 12084 - DNA, 30 bp, Homo sapiens
  source 1..30: mol_type = unassigned DNA
agaagagattaaggatcttttgccggaaat

SEQ ID NO: 12085 - DNA, 30 bp, Homo sapiens
  source 1..30: mol_type = unassigned DNA
atttccggcaaaagatccttaatctcttct

SEQ ID NO: 12086 - RNA, 32 nt, Homo sapiens
  source 1..32: mol_type = unassigned RNA
ggttccctctcatctctgggttccctgtatct

SEQ ID NO: 12087 - DNA, 32 bp, Homo sapiens
  source 1..32: mol_type = unassigned DNA
ggttccctctcatctctgggttccctgtatct

SEQ ID NO: 12088 - DNA, 32 bp, Homo sapiens
  source 1..32: mol_type = unassigned DNA
agatacagggaacccagagatgagagggaacc

SEQ ID NO: 12089 - RNA, 45 nt, Homo sapiens
  source 1..45: mol_type = unassigned RNA
aggcccaggctccctcctccccactttcaagccagaagggtgtaa

SEQ ID NO: 12090 - DNA, 45 bp, Homo sapiens
  source 1..45: mol_type = unassigned DNA
aggcccaggctccctcctccccactttcaagccagaagggtgtaa

SEQ ID NO: 12091 - DNA, 45 bp, Homo sapiens
  source 1..45: mol_type = unassigned DNA
ttacacccttctggcttgaaagtggggaggagggagcctgggcct

SEQ ID NO: 12092 - RNA, 31 nt, Homo sapiens
  source 1..31: mol_type = unassigned RNA
gtctctctgtctctctctctctgcctgtctc

SEQ ID NO: 12093 - DNA, 31 bp, Homo sapiens
  source 1..31: mol_type = unassigned DNA
gtctctctgtctctctctctctgcctgtctc

SEQ ID NO: 12094 - DNA, 31 bp, Homo sapiens
  source 1..31: mol_type = unassigned DNA
gagacaggcagagagagagagacagagagac

SEQ ID NO: 12095 - RNA, 23 nt, Homo sapiens
  source 1..23: mol_type = unassigned RNA
tctgggcctgtgacagctgaaat

SEQ ID NO: 12096 - DNA, 23 bp, Homo sapiens
  source 1..23: mol_type = unassigned DNA
tctgggcctgtgacagctgaaat

SEQ ID NO: 12097 - DNA, 23 bp, Homo sapiens
  source 1..23: mol_type = unassigned DNA
atttcagctgtcacaggcccaga

SEQ ID NO: 12098 - RNA, 103 nt, Homo sapiens
  source 1..103: mol_type = unassigned RNA
ccattttttaagtaagtctgaactggacagagccattctaaaaggccaggaacagtggctcaatcctgtaatccagtgctctgggaggccaagatgaggatgg

SEQ ID NO: 12099 - DNA, 103 bp, Homo sapiens
  source 1..103: mol_type = unassigned DNA
ccattttttaagtaagtctgaactggacagagccattctaaaaggccaggaacagtggctcaatcctgtaatccagtgctctgggaggccaagatgaggatgg

SEQ ID NO: 12100 - DNA, 103 bp, Homo sapiens
  source 1..103: mol_type = unassigned DNA
ccatcctcatcttggcctcccagagcactggattacaggattgagccactgttcctggccttttagaatggctctgtccagttcagacttacttaaaaaatgg

SEQ ID NO: 12101 - RNA, 48 nt, Homo sapiens
  source 1..48: mol_type = unassigned RNA
tttggatgattagcttcagtttatgttgacattatttgatctgattag

SEQ ID NO: 12102 - DNA, 48 bp, Homo sapiens
  source 1..48: mol_type = unassigned DNA
tttggatgattagcttcagtttatgttgacattatttgatctgattag

SEQ ID NO: 12103 - DNA, 48 bp, Homo sapiens
  source 1..48: mol_type = unassigned DNA
ctaatcagatcaaataatgtcaacataaactgaagctaatcatccaaa

SEQ ID NO: 12104 - RNA, 30 nt, Homo sapiens
  source 1..30: mol_type = unassigned RNA
gggttcctgagctcactgaaaagactattg

SEQ ID NO: 12105 - DNA, 30 bp, Homo sapiens
  source 1..30: mol_type = unassigned DNA
gggttcctgagctcactgaaaagactattg

SEQ ID NO: 12106 - DNA, 30 bp, Homo sapiens
  source 1..30: mol_type = unassigned DNA
caatagtcttttcagtgagctcaggaaccc

SEQ ID NO: 12107 - RNA, 30 nt, Homo sapiens
  source 1..30: mol_type = unassigned RNA
caggcttctgaaactgcagtagccaagaac

SEQ ID NO: 12108 - DNA, 30 bp, Homo sapiens
  source 1..30: mol_type = unassigned DNA
caggcttctgaaactgcagtagccaagaac

SEQ ID NO: 12109 - DNA, 30 bp, Homo sapiens
  source 1..30: mol_type = unassigned DNA
gttcttggctactgcagtttcagaagcctg

SEQ ID NO: 12110 - RNA, 26 nt, Homo sapiens
  source 1..26: mol_type = unassigned RNA
gctccagccagaagggtgtagcccca

SEQ ID NO: 12111 - DNA, 26 bp, Homo sapiens
  source 1..26: mol_type = unassigned DNA
gctccagccagaagggtgtagcccca

SEQ ID NO: 12112 - DNA, 26 bp, Homo sapiens
  source 1..26: mol_type = unassigned DNA
tggggctacacccttctggctggagc

SEQ ID NO: 12113 - RNA, 33 nt, Homo sapiens
  source 1..33: mol_type = unassigned RNA
ctcctctgggagctgatgacaagaggagcccca

SEQ ID NO: 12114 - DNA, 33 bp, Homo sapiens
  source 1..33: mol_type = unassigned DNA
ctcctctgggagctgatgacaagaggagcccca

SEQ ID NO: 12115 - DNA, 33 bp, Homo sapiens
  source 1..33: mol_type = unassigned DNA
tggggctcctcttgtcatcagctcccagaggag

SEQ ID NO: 12116 - RNA, 36 nt, Homo sapiens
  source 1..36: mol_type = unassigned RNA
gctttcagacttggactgagtcatgctactggttct

SEQ ID NO: 12117 - DNA, 36 bp, Homo sapiens
  source 1..36: mol_type = unassigned DNA
gctttcagacttggactgagtcatgctactggttct

SEQ ID NO: 12118 - DNA, 36 bp, Homo sapiens
  source 1..36: mol_type = unassigned DNA
agaaccagtagcatgactcagtccaagtctgaaagc

SEQ ID NO: 12119 - RNA, 92 nt, Homo sapiens
  source 1..92: mol_type = unassigned RNA
cccattggtcctagttctgtctctgaacctccatagtataaatctcgtaatgcttctttcaagtgacagtactctgactatttaaactaagc

SEQ ID NO: 12120 - DNA, 92 bp, Homo sapiens
  source 1..92: mol_type = unassigned DNA
cccattggtcctagttctgtctctgaacctccatagtataaatctcgtaatgcttctttcaagtgacagtactctgactatttaaactaagc

SEQ ID NO: 12121 - DNA, 92 bp, Homo sapiens
  source 1..92: mol_type = unassigned DNA
gcttagtttaaatagtcagagtactgtcacttgaaagaagcattacgagatttatactatggaggttcagagacagaactaggaccaatggg

SEQ ID NO: 12122 - RNA, 152 nt, Homo sapiens
  source 1..152: mol_type = unassigned RNA
cctatgttttcctccccaccgctgtgccatcggctgcaatttttctgctgtccaccatggcaaccttctcacgtgttccttctgccacacatgcaatctccctaccgtgcgacctgctaaaggctttctgctgtcttccatgtcatcttcac

SEQ ID NO: 12123 - DNA, 152 bp, Homo sapiens
  source 1..152: mol_type = unassigned DNA
cctatgttttcctccccaccgctgtgccatcggctgcaatttttctgctgtccaccatggcaaccttctcacgtgttccttctgccacacatgcaatctccctaccgtgcgacctgctaaaggctttctgctgtcttccatgtcatcttcac

SEQ ID NO: 12124 - DNA, 152 bp, Homo sapiens
  source 1..152: mol_type = unassigned DNA
gtgaagatgacatggaagacagcagaaagcctttagcaggtcgcacggtagggagattgcatgtgtggcagaaggaacacgtgagaaggttgccatggtggacagcagaaaaattgcagccgatggcacagcggtggggaggaaaacatagg

SEQ ID NO: 12125 - RNA, 54 nt, Homo sapiens
  source 1..54: mol_type = unassigned RNA
aagtgctgggattacaggcgtgagccactgcactgagccgtgaaaccccatttc

SEQ ID NO: 12126 - DNA, 54 bp, Homo sapiens
  source 1..54: mol_type = unassigned DNA
aagtgctgggattacaggcgtgagccactgcactgagccgtgaaaccccatttc

SEQ ID NO: 12127 - DNA, 54 bp, Homo sapiens
  source 1..54: mol_type = unassigned DNA
gaaatggggtttcacggctcagtgcagtggctcacgcctgtaatcccagcactt

SEQ ID NO: 12128 - RNA, 26 nt, Homo sapiens
  source 1..26: mol_type = unassigned RNA
agatttatgccttcttctgcttctta

SEQ ID NO: 12129 - DNA, 26 bp, Homo sapiens
  source 1..26: mol_type = unassigned DNA
agatttatgccttcttctgcttctta

SEQ ID NO: 12130 - DNA, 26 bp, Homo sapiens
  source 1..26: mol_type = unassigned DNA
taagaagcagaagaaggcataaatct

SEQ ID NO: 12131 - RNA, 61 nt, Homo sapiens
  source 1..61: mol_type = unassigned RNA
agctcctgtcccacccccttcccccaacccatccattaggccagcaacgcttgtagagctc

SEQ ID NO: 12132 - DNA, 61 bp, Homo sapiens
  source 1..61: mol_type = unassigned DNA
agctcctgtcccacccccttcccccaacccatccattaggccagcaacgcttgtagagctc

SEQ ID NO: 12133 - DNA, 61 bp, Homo sapiens
  source 1..61: mol_type = unassigned DNA
gagctctacaagcgttgctggcctaatggatgggttgggggaagggggtgggacaggagct

SEQ ID NO: 12134 - RNA, 30 nt, Homo sapiens
  source 1..30: mol_type = unassigned RNA
gttcctctgaagcctgtggtcaggccgccg

SEQ ID NO: 12135 - DNA, 30 bp, Homo sapiens
  source 1..30: mol_type = unassigned DNA
gttcctctgaagcctgtggtcaggccgccg

SEQ ID NO: 12136 - DNA, 30 bp, Homo sapiens
  source 1..30: mol_type = unassigned DNA
cggcggcctgaccacaggcttcagaggaac

SEQ ID NO: 12137 - RNA, 38 nt, Homo sapiens
  source 1..38: mol_type = unassigned RNA
ctccctctgatgattttaaaggcacttagtgccataat

SEQ ID NO: 12138 - DNA, 38 bp, Homo sapiens
  source 1..38: mol_type = unassigned DNA
ctccctctgatgattttaaaggcacttagtgccataat

SEQ ID NO: 12139 - DNA, 38 bp, Homo sapiens
  source 1..38: mol_type = unassigned DNA
attatggcactaagtgcctttaaaatcatcagagggag

SEQ ID NO: 12140 - RNA, 28 nt, Homo sapiens
  source 1..28: mol_type = unassigned RNA
gtagaaaggaactcagaatagagacact

SEQ ID NO: 12141 - DNA, 28 bp, Homo sapiens
  source 1..28: mol_type = unassigned DNA
gtagaaaggaactcagaatagagacact

SEQ ID NO: 12142 - DNA, 28 bp, Homo sapiens
  source 1..28: mol_type = unassigned DNA
agtgtctctattctgagttcctttctac

SEQ ID NO: 12143 - RNA, 57 nt, Homo sapiens
  source 1..57: mol_type = unassigned RNA
accccagagctgtgggctggaatggggcaacaggattgacagagctgttaacatgcc

SEQ ID NO: 12144 - DNA, 57 bp, Homo sapiens
  source 1..57: mol_type = unassigned DNA
accccagagctgtgggctggaatggggcaacaggattgacagagctgttaacatgcc

SEQ ID NO: 12145 - DNA, 57 bp, Homo sapiens
  source 1..57: mol_type = unassigned DNA
ggcatgttaacagctctgtcaatcctgttgccccattccagcccacagctctggggt

SEQ ID NO: 12146 - RNA, 35 nt, Homo sapiens
  source 1..35: mol_type = unassigned RNA
ggaggtgagattctgaattctgattgtaagctgct

SEQ ID NO: 12147 - DNA, 35 bp, Homo sapiens
  source 1..35: mol_type = unassigned DNA
ggaggtgagattctgaattctgattgtaagctgct

SEQ ID NO: 12148 - DNA, 35 bp, Homo sapiens
  source 1..35: mol_type = unassigned DNA
agcagcttacaatcagaattcagaatctcacctcc

SEQ ID NO: 12149 - RNA, 63 nt, Homo sapiens
  source 1..63: mol_type = unassigned RNA
ctttggcacttttctctgtctctgaactctcctcctctgatctcattgctggcaacgctgaag

SEQ ID NO: 12150 - DNA, 63 bp, Homo sapiens
  source 1..63: mol_type = unassigned DNA
ctttggcacttttctctgtctctgaactctcctcctctgatctcattgctggcaacgctgaag

SEQ ID NO: 12151 - DNA, 63 bp, Homo sapiens
  source 1..63: mol_type = unassigned DNA
cttcagcgttgccagcaatgagatcagaggaggagagttcagagacagagaaaagtgccaaag

SEQ ID NO: 12152 - RNA, 70 nt, Homo sapiens
  source 1..70: mol_type = unassigned RNA
gccctttgaaggtttagcaacgttgtcactgtcagaatgctctctctgtatctttccaaagcccttcctt

SEQ ID NO: 12153 - DNA, 70 bp, Homo sapiens
  source 1..70: mol_type = unassigned DNA
gccctttgaaggtttagcaacgttgtcactgtcagaatgctctctctgtatctttccaaagcccttcctt

SEQ ID NO: 12154 - DNA, 70 bp, Homo sapiens
  source 1..70: mol_type = unassigned DNA
aaggaagggctttggaaagatacagagagagcattctgacagtgacaacgttgctaaaccttcaaagggc

SEQ ID NO: 12155 - RNA, 31 nt, Homo sapiens
  source 1..31: mol_type = unassigned RNA
ctggtcattctgtgcttctggaggcaactga

SEQ ID NO: 12156 - DNA, 31 bp, Homo sapiens
  source 1..31: mol_type = unassigned DNA
ctggtcattctgtgcttctggaggcaactga

SEQ ID NO: 12157 - DNA, 31 bp, Homo sapiens
  source 1..31: mol_type = unassigned DNA
tcagttgcctccagaagcacagaatgaccag

SEQ ID NO: 12158 - RNA, 30 nt, Homo sapiens
  source 1..30: mol_type = unassigned RNA
tatttcctgatgccattagactgagatttg

SEQ ID NO: 12159 - DNA, 30 bp, Homo sapiens
  source 1..30: mol_type = unassigned DNA
tatttcctgatgccattagactgagatttg

SEQ ID NO: 12160 - DNA, 30 bp, Homo sapiens
  source 1..30: mol_type = unassigned DNA
caaatctcagtctaatggcatcaggaaata

SEQ ID NO: 12161 - RNA, 22 nt, Homo sapiens
  source 1..22: mol_type = unassigned RNA
cgggccagcagcgcaatgcacc

SEQ ID NO: 12162 - DNA, 22 bp, Homo sapiens
  source 1..22: mol_type = unassigned DNA
cgggccagcagcgcaatgcacc

SEQ ID NO: 12163 - DNA, 22 bp, Homo sapiens
  source 1..22: mol_type = unassigned DNA
ggtgcattgcgctgctggcccg

SEQ ID NO: 12164 - RNA, 32 nt, Homo sapiens
  source 1..32: mol_type = unassigned RNA
ggccaataggaccggctctgtggaggctcaga

SEQ ID NO: 12165 - DNA, 32 bp, Homo sapiens
  source 1..32: mol_type = unassigned DNA
ggccaataggaccggctctgtggaggctcaga

SEQ ID NO: 12166 - DNA, 32 bp, Homo sapiens
  source 1..32: mol_type = unassigned DNA
tctgagcctccacagagccggtcctattggcc

SEQ ID NO: 12167 - RNA, 35 nt, Homo sapiens
  source 1..35: mol_type = unassigned RNA
tgtaaaaatgttagaactcagaggaacctcagaga

SEQ ID NO: 12168 - DNA, 35 bp, Homo sapiens
  source 1..35: mol_type = unassigned DNA
tgtaaaaatgttagaactcagaggaacctcagaga

SEQ ID NO: 12169 - DNA, 35 bp, Homo sapiens
  source 1..35: mol_type = unassigned DNA
tctctgaggttcctctgagttctaacatttttaca

SEQ ID NO: 12170 - RNA, 32 nt, Homo sapiens
  source 1..32: mol_type = unassigned RNA
ataacagaagtcttggatctggatctgataaa

SEQ ID NO: 12171 - DNA, 32 bp, Homo sapiens
  source 1..32: mol_type = unassigned DNA
ataacagaagtcttggatctggatctgataaa

SEQ ID NO: 12172 - DNA, 32 bp, Homo sapiens
  source 1..32: mol_type = unassigned DNA
tttatcagatccagatccaagacttctgttat

SEQ ID NO: 12173 - RNA, 30 nt, Homo sapiens
  source 1..30: mol_type = unassigned RNA
ttagttttaaccagtgacactccccttctc

SEQ ID NO: 12174 - DNA, 30 bp, Homo sapiens
  source 1..30: mol_type = unassigned DNA
ttagttttaaccagtgacactccccttctc

SEQ ID NO: 12175 - DNA, 30 bp, Homo sapiens
  source 1..30: mol_type = unassigned DNA
gagaaggggagtgtcactggttaaaactaa

SEQ ID NO: 12176 - RNA, 37 nt, Homo sapiens
  source 1..37: mol_type = unassigned RNA
ccccaatggggactgtcatggatgtcctgaagggaga

SEQ ID NO: 12177 - DNA, 37 bp, Homo sapiens
  source 1..37: mol_type = unassigned DNA
ccccaatggggactgtcatggatgtcctgaagggaga

SEQ ID NO: 12178 - DNA, 37 bp, Homo sapiens
  source 1..37: mol_type = unassigned DNA
tctcccttcaggacatccatgacagtccccattgggg

SEQ ID NO: 12179 - RNA, 30 nt, Homo sapiens
  source 1..30: mol_type = unassigned RNA
tgccctgtttcttgagcccaagcgacccac

SEQ ID NO: 12180 - DNA, 30 bp, Homo sapiens
  source 1..30: mol_type = unassigned DNA
tgccctgtttcttgagcccaagcgacccac

SEQ ID NO: 12181 - DNA, 30 bp, Homo sapiens
  source 1..30: mol_type = unassigned DNA
gtgggtcgcttgggctcaagaaacagggca

SEQ ID NO: 12182 - RNA, 78 nt, Homo sapiens
  source 1..78: mol_type = unassigned RNA
tctctttggaaccttccacacgcacaccacagtcgatgggcattagctagtaatgtccttggaccagggctataacac

SEQ ID NO: 12183 - DNA, 78 bp, Homo sapiens
  source 1..78: mol_type = unassigned DNA
tctctttggaaccttccacacgcacaccacagtcgatgggcattagctagtaatgtccttggaccagggctataacac

SEQ ID NO: 12184 - DNA, 78 bp, Homo sapiens
  source 1..78: mol_type = unassigned DNA
gtgttatagccctggtccaaggacattactagctaatgcccatcgactgtggtgtgcgtgtggaaggttccaaagaga

SEQ ID NO: 12185 - RNA, 31 nt, Homo sapiens
  source 1..31: mol_type = unassigned RNA
ttccccgtttgcttttcttttcttcccttct

SEQ ID NO: 12186 - DNA, 31 bp, Homo sapiens
  source 1..31: mol_type = unassigned DNA
ttccccgtttgcttttcttttcttcccttct

SEQ ID NO: 12187 - DNA, 31 bp, Homo sapiens
  source 1..31: mol_type = unassigned DNA
agaagggaagaaaagaaaagcaaacggggaa

SEQ ID NO: 12188 - RNA, 43 nt, Homo sapiens
  source 1..43: mol_type = unassigned RNA
ccttcatacaaggaggaagctggaacagaaattgagcaagcca

SEQ ID NO: 12189 - DNA, 43 bp, Homo sapiens
  source 1..43: mol_type = unassigned DNA
ccttcatacaaggaggaagctggaacagaaattgagcaagcca

SEQ ID NO: 12190 - DNA, 43 bp, Homo sapiens
  source 1..43: mol_type = unassigned DNA
tggcttgctcaatttctgttccagcttcctccttgtatgaagg

SEQ ID NO: 12191 - RNA, 32 nt, Homo sapiens
  source 1..32: mol_type = unassigned RNA
cgagactgcaccatgcaggaagcgccagctgc

SEQ ID NO: 12192 - DNA, 32 bp, Homo sapiens
  source 1..32: mol_type = unassigned DNA
cgagactgcaccatgcaggaagcgccagctgc

SEQ ID NO: 12193 - DNA, 32 bp, Homo sapiens
  source 1..32: mol_type = unassigned DNA
gcagctggcgcttcctgcatggtgcagtctcg

SEQ ID NO: 12194 - RNA, 161 nt, Homo sapiens
  source 1..161: mol_type = unassigned RNA
aaagctgtttctcaaacggcatgttatagaactcagactaggactgtgcagcttatttttcacatggcggggacgggggaagtggttctagctaacagctctggtaatgcttgaagtcccactcttggggaatgaaggggagaaagatagatgatgagtta

SEQ ID NO: 12195 - DNA, 161 bp, Homo sapiens
  source 1..161: mol_type = unassigned DNA
aaagctgtttctcaaacggcatgttatagaactcagactaggactgtgcagcttatttttcacatggcggggacgggggaagtggttctagctaacagctctggtaatgcttgaagtcccactcttggggaatgaaggggagaaagatagatgatgagtta

SEQ ID NO: 12196 - DNA, 161 bp, Homo sapiens
  source 1..161: mol_type = unassigned DNA
taactcatcatctatctttctccccttcattccccaagagtgggacttcaagcattaccagagctgttagctagaaccacttcccccgtccccgccatgtgaaaaataagctgcacagtcctagtctgagttctataacatgccgtttgagaaacagcttt

SEQ ID NO: 12197 - RNA, 30 nt, Homo sapiens
  source 1..30: mol_type = unassigned RNA
agttctctctctcttctgcttgttgcattg

SEQ ID NO: 12198 - DNA, 30 bp, Homo sapiens
  source 1..30: mol_type = unassigned DNA
agttctctctctcttctgcttgttgcattg

SEQ ID NO: 12199 - DNA, 30 bp, Homo sapiens
  source 1..30: mol_type = unassigned DNA
caatgcaacaagcagaagagagagagaact

SEQ ID NO: 12200 - RNA, 30 nt, Homo sapiens
  source 1..30: mol_type = unassigned RNA
gtatcttttgagattctagaacacatggga

SEQ ID NO: 12201 - DNA, 30 bp, Homo sapiens
  source 1..30: mol_type = unassigned DNA
gtatcttttgagattctagaacacatggga

SEQ ID NO: 12202 - DNA, 30 bp, Homo sapiens
  source 1..30: mol_type = unassigned DNA
tcccatgtgttctagaatctcaaaagatac

SEQ ID NO: 12203 - RNA, 59 nt, Homo sapiens
  source 1..59: mol_type = unassigned RNA
gtctgcaaagggccagatactgaatccagtactttcagtttggcgagccgtgaggtctc

SEQ ID NO: 12204 - DNA, 59 bp, Homo sapiens
  source 1..59: mol_type = unassigned DNA
gtctgcaaagggccagatactgaatccagtactttcagtttggcgagccgtgaggtctc

SEQ ID NO: 12205 - DNA, 59 bp, Homo sapiens
  source 1..59: mol_type = unassigned DNA
gagacctcacggctcgccaaactgaaagtactggattcagtatctggccctttgcagac

SEQ ID NO: 12206 - RNA, 32 nt, Homo sapiens
  source 1..32: mol_type = unassigned RNA
gcccagggtgtcatctggactgtgtttaacca

SEQ ID NO: 12207 - DNA, 32 bp, Homo sapiens
  source 1..32: mol_type = unassigned DNA
gcccagggtgtcatctggactgtgtttaacca

SEQ ID NO: 12208 - DNA, 32 bp, Homo sapiens
  source 1..32: mol_type = unassigned DNA
tggttaaacacagtccagatgacaccctgggc

SEQ ID NO: 12209 - RNA, 155 nt, Homo sapiens
  source 1..155: mol_type = unassigned RNA
ggcaactcccgcctgaagaatagattctctggttcacagccgtctgcaggctcaggaacagatctgggcgggcagaacagagccctgaggccaagagcccagcagtctgcgagtgactgcagccctaagggaagctacaaacacccaaggaaaga

SEQ ID NO: 12210 - DNA, 155 bp, Homo sapiens
  source 1..155: mol_type = unassigned DNA
ggcaactcccgcctgaagaatagattctctggttcacagccgtctgcaggctcaggaacagatctgggcgggcagaacagagccctgaggccaagagcccagcagtctgcgagtgactgcagccctaagggaagctacaaacacccaaggaaaga

SEQ ID NO: 12211 - DNA, 155 bp, Homo sapiens
  source 1..155: mol_type = unassigned DNA
tctttccttgggtgtttgtagcttcccttagggctgcagtcactcgcagactgctgggctcttggcctcagggctctgttctgcccgcccagatctgttcctgagcctgcagacggctgtgaaccagagaatctattcttcaggcgggagttgcc

SEQ ID NO: 12212 - RNA, 21 nt, Homo sapiens
  source 1..21: mol_type = unassigned RNA
agcgaagaatcctaccaggta

SEQ ID NO: 12213 - DNA, 21 bp, Homo sapiens
  source 1..21: mol_type = unassigned DNA
agcgaagaatcctaccaggta

SEQ ID NO: 12214 - DNA, 21 bp, Homo sapiens
  source 1..21: mol_type = unassigned DNA
tacctggtaggattcttcgct

SEQ ID NO: 12215 - RNA, 40 nt, Homo sapiens
  source 1..40: mol_type = unassigned RNA
tccacttggaagaagcctctgaagataaaccttaatccca

SEQ ID NO: 12216 - DNA, 40 bp, Homo sapiens
  source 1..40: mol_type = unassigned DNA
tccacttggaagaagcctctgaagataaaccttaatccca

SEQ ID NO: 12217 - DNA, 40 bp, Homo sapiens
  source 1..40: mol_type = unassigned DNA
tgggattaaggtttatcttcagaggcttcttccaagtgga

SEQ ID NO: 12218 - RNA, 29 nt, Homo sapiens
  source 1..29: mol_type = unassigned RNA
ccctgctcagaggcagggaattgtgcagc

SEQ ID NO: 12219 - DNA, 29 bp, Homo sapiens
  source 1..29: mol_type = unassigned DNA
ccctgctcagaggcagggaattgtgcagc

SEQ ID NO: 12220 - DNA, 29 bp, Homo sapiens
  source 1..29: mol_type = unassigned DNA
gctgcacaattccctgcctctgagcaggg

SEQ ID NO: 12221 - RNA, 47 nt, Homo sapiens
  source 1..47: mol_type = unassigned RNA
tcttggttagacttctgtttcctggcctgtgttacagcggctgaaac

SEQ ID NO: 12222 - DNA, 47 bp, Homo sapiens
  source 1..47: mol_type = unassigned DNA
tcttggttagacttctgtttcctggcctgtgttacagcggctgaaac

SEQ ID NO: 12223 - DNA, 47 bp, Homo sapiens
  source 1..47: mol_type = unassigned DNA
gtttcagccgctgtaacacaggccaggaaacagaagtctaaccaaga

SEQ ID NO: 12224 - RNA, 26 nt, Homo sapiens
  source 1..26: mol_type = unassigned RNA
gttgcaagaaaattcttactgagcct

SEQ ID NO: 12225 - DNA, 26 bp, Homo sapiens
  source 1..26: mol_type = unassigned DNA
gttgcaagaaaattcttactgagcct

SEQ ID NO: 12226 - DNA, 26 bp, Homo sapiens
  source 1..26: mol_type = unassigned DNA
aggctcagtaagaattttcttgcaac

SEQ ID NO: 12227 - RNA, 33 nt, Homo sapiens
  source 1..33: mol_type = unassigned RNA
ccccgacgtaggggggaagggactgagattggc

SEQ ID NO: 12228 - DNA, 33 bp, Homo sapiens
  source 1..33: mol_type = unassigned DNA
ccccgacgtaggggggaagggactgagattggc

SEQ ID NO: 12229 - DNA, 33 bp, Homo sapiens
  source 1..33: mol_type = unassigned DNA
gccaatctcagtcccttcccccctacgtcgggg

SEQ ID NO: 12230 - RNA, 79 nt, Homo sapiens
  source 1..79: mol_type = unassigned RNA
tgggcaggctggtctcgaactcctgacctcaggtgattcgtatgcctcggcctcccaaagtgctgggattacaggtatg

SEQ ID NO: 12231 - DNA, 79 bp, Homo sapiens
  source 1..79: mol_type = unassigned DNA
tgggcaggctggtctcgaactcctgacctcaggtgattcgtatgcctcggcctcccaaagtgctgggattacaggtatg

SEQ ID NO: 12232 - DNA, 79 bp, Homo sapiens
  source 1..79: mol_type = unassigned DNA
catacctgtaatcccagcactttgggaggccgaggcatacgaatcacctgaggtcaggagttcgagaccagcctgccca

SEQ ID NO: 12233 - RNA, 34 nt, Homo sapiens
  source 1..34: mol_type = unassigned RNA
tctcgcggctgagaccagggaggaggcgtgggca

SEQ ID NO: 12234 - DNA, 34 bp, Homo sapiens
  source 1..34: mol_type = unassigned DNA
tctcgcggctgagaccagggaggaggcgtgggca

SEQ ID NO: 12235 - DNA, 34 bp, Homo sapiens
  source 1..34: mol_type = unassigned DNA
tgcccacgcctcctccctggtctcagccgcgaga

SEQ ID NO: 12236 - RNA, 31 nt, Homo sapiens
  source 1..31: mol_type = unassigned RNA
tctgcctggttagactctggagtgactggga

SEQ ID NO: 12237 - DNA, 31 bp, Homo sapiens
  source 1..31: mol_type = unassigned DNA
tctgcctggttagactctggagtgactggga

SEQ ID NO: 12238 - DNA, 31 bp, Homo sapiens
  source 1..31: mol_type = unassigned DNA
tcccagtcactccagagtctaaccaggcaga

SEQ ID NO: 12239 - RNA, 29 nt, Homo sapiens
  source 1..29: mol_type = unassigned RNA
caacaactgagtctgaacgaatgccacgt

SEQ ID NO: 12240 - DNA, 29 bp, Homo sapiens
  source 1..29: mol_type = unassigned DNA
caacaactgagtctgaacgaatgccacgt

SEQ ID NO: 12241 - DNA, 29 bp, Homo sapiens
  source 1..29: mol_type = unassigned DNA
acgtggcattcgttcagactcagttgttg

SEQ ID NO: 12242 - RNA, 31 nt, Homo sapiens
  source 1..31: mol_type = unassigned RNA
cttatctgacagagcatcagaaccagaggct

SEQ ID NO: 12243 - DNA, 31 bp, Homo sapiens
  source 1..31: mol_type = unassigned DNA
cttatctgacagagcatcagaaccagaggct

SEQ ID NO: 12244 - DNA, 31 bp, Homo sapiens
  source 1..31: mol_type = unassigned DNA
agcctctggttctgatgctctgtcagataag

SEQ ID NO: 12245 - RNA, 28 nt, Homo sapiens
  source 1..28: mol_type = unassigned RNA
agcggcctgtctttatcagaggtccctc

SEQ ID NO: 12246 - DNA, 28 bp, Homo sapiens
  source 1..28: mol_type = unassigned DNA
agcggcctgtctttatcagaggtccctc

SEQ ID NO: 12247 - DNA, 28 bp, Homo sapiens
  source 1..28: mol_type = unassigned DNA
gagggacctctgataaagacaggccgct

SEQ ID NO: 12248 - RNA, 29 nt, Homo sapiens
  source 1..29: mol_type = unassigned RNA
ggcaacagtcgtggtctgaacagagacgt

SEQ ID NO: 12249 - DNA, 29 bp, Homo sapiens
  source 1..29: mol_type = unassigned DNA
ggcaacagtcgtggtctgaacagagacgt

SEQ ID NO: 12250 - DNA, 29 bp, Homo sapiens
  source 1..29: mol_type = unassigned DNA
acgtctctgttcagaccacgactgttgcc

SEQ ID NO: 12251 - RNA, 32 nt, Homo sapiens
  source 1..32: mol_type = unassigned RNA
taagttacagaacaggctgtagagtatgatct

SEQ ID NO: 12252 - DNA, 32 bp, Homo sapiens
  source 1..32: mol_type = unassigned DNA
taagttacagaacaggctgtagagtatgatct

SEQ ID NO: 12253 - DNA, 32 bp, Homo sapiens
  source 1..32: mol_type = unassigned DNA
agatcatactctacagcctgttctgtaactta

SEQ ID NO: 12254 - RNA, 55 nt, Homo sapiens
  source 1..55: mol_type = unassigned RNA
tactgccctctccactgtcatcactaatctgtatctcttctccttctcctggtcc

SEQ ID NO: 12255 - DNA, 55 bp, Homo sapiens
  source 1..55: mol_type = unassigned DNA
tactgccctctccactgtcatcactaatctgtatctcttctccttctcctggtcc

SEQ ID NO: 12256 - DNA, 55 bp, Homo sapiens
  source 1..55: mol_type = unassigned DNA
ggaccaggagaaggagaagagatacagattagtgatgacagtggagagggcagta

SEQ ID NO: 12257 - RNA, 37 nt, Homo sapiens
  source 1..37: mol_type = unassigned RNA
ctaagagactatctgaactctatactccagacagtta

SEQ ID NO: 12258 - DNA, 37 bp, Homo sapiens
  source 1..37: mol_type = unassigned DNA
ctaagagactatctgaactctatactccagacagtta

SEQ ID NO: 12259 - DNA, 37 bp, Homo sapiens
  source 1..37: mol_type = unassigned DNA
taactgtctggagtatagagttcagatagtctcttag

SEQ ID NO: 12260 - RNA, 37 nt, Homo sapiens
  source 1..37: mol_type = unassigned RNA
acaactcacagaactcaggaagttgctatacttacag

SEQ ID NO: 12261 - DNA, 37 bp, Homo sapiens
  source 1..37: mol_type = unassigned DNA
acaactcacagaactcaggaagttgctatacttacag

SEQ ID NO: 12262 - DNA, 37 bp, Homo sapiens
  source 1..37: mol_type = unassigned DNA
ctgtaagtatagcaacttcctgagttctgtgagttgt

SEQ ID NO: 12263 - RNA, 52 nt, Homo sapiens
  source 1..52: mol_type = unassigned RNA
gtgtgcctgatgaaaaactgggttcctgtaagttatgaatggcatccaggga

SEQ ID NO: 12264 - DNA, 52 bp, Homo sapiens
  source 1..52: mol_type = unassigned DNA
gtgtgcctgatgaaaaactgggttcctgtaagttatgaatggcatccaggga

SEQ ID NO: 12265 - DNA, 52 bp, Homo sapiens
  source 1..52: mol_type = unassigned DNA
tccctggatgccattcataacttacaggaacccagtttttcatcaggcacac

SEQ ID NO: 12266 - RNA, 31 nt, Homo sapiens
  source 1..31: mol_type = unassigned RNA
agtccagatttcttaaatttggccaagttat

SEQ ID NO: 12267 - DNA, 31 bp, Homo sapiens
  source 1..31: mol_type = unassigned DNA
agtccagatttcttaaatttggccaagttat

SEQ ID NO: 12268 - DNA, 31 bp, Homo sapiens
  source 1..31: mol_type = unassigned DNA
ataacttggccaaatttaagaaatctggact

SEQ ID NO: 12269 - RNA, 38 nt, Homo sapiens
  source 1..38: mol_type = unassigned RNA
ctcccattctgtaggttacctgttcactcggatgatag

SEQ ID NO: 12270 - DNA, 38 bp, Homo sapiens
  source 1..38: mol_type = unassigned DNA
ctcccattctgtaggttacctgttcactcggatgatag

SEQ ID NO: 12271 - DNA, 38 bp, Homo sapiens
  source 1..38: mol_type = unassigned DNA
ctatcatccgagtgaacaggtaacctacagaatgggag

SEQ ID NO: 12272 - RNA, 21 nt, Homo sapiens
  source 1..21: mol_type = unassigned RNA
gtgtcagtcatttccaggggc

SEQ ID NO: 12273 - DNA, 21 bp, Homo sapiens
  source 1..21: mol_type = unassigned DNA
gtgtcagtcatttccaggggc

SEQ ID NO: 12274 - DNA, 21 bp, Homo sapiens
  source 1..21: mol_type = unassigned DNA
gcccctggaaatgactgacac

SEQ ID NO: 12275 - RNA, 102 nt, Homo sapiens
  source 1..102: mol_type = unassigned RNA
actggtgctgacgttgagtaaccctatcttaagctgaactcatcatctctccattccagccttggtggattctgtctcctctgaaccattcccatctcactt

SEQ ID NO: 12276 - DNA, 102 bp, Homo sapiens
  source 1..102: mol_type = unassigned DNA
actggtgctgacgttgagtaaccctatcttaagctgaactcatcatctctccattccagccttggtggattctgtctcctctgaaccattcccatctcactt

SEQ ID NO: 12277 - DNA, 102 bp, Homo sapiens
  source 1..102: mol_type = unassigned DNA
aagtgagatgggaatggttcagaggagacagaatccaccaaggctggaatggagagatgatgagttcagcttaagatagggttactcaacgtcagcaccagt

SEQ ID NO: 12278 - RNA, 25 nt, Homo sapiens
  source 1..25: mol_type = unassigned RNA
actgaatatttctcttctgcttgtt

SEQ ID NO: 12279 - DNA, 25 bp, Homo sapiens
  source 1..25: mol_type = unassigned DNA
actgaatatttctcttctgcttgtt

SEQ ID NO: 12280 - DNA, 25 bp, Homo sapiens
  source 1..25: mol_type = unassigned DNA
aacaagcagaagagaaatattcagt

SEQ ID NO: 12281 - RNA, 69 nt, Homo sapiens
  source 1..69: mol_type = unassigned RNA
tgatgtgttatatgggagcttttcaactgatgttgttatgtagtattttgaaattctaatgcattgcag

SEQ ID NO: 12282 - DNA, 69 bp, Homo sapiens
  source 1..69: mol_type = unassigned DNA
tgatgtgttatatgggagcttttcaactgatgttgttatgtagtattttgaaattctaatgcattgcag

SEQ ID NO: 12283 - DNA, 69 bp, Homo sapiens
  source 1..69: mol_type = unassigned DNA
ctgcaatgcattagaatttcaaaatactacataacaacatcagttgaaaagctcccatataacacatca

SEQ ID NO: 12284 - RNA, 43 nt, Homo sapiens
  source 1..43: mol_type = unassigned RNA
aaaacaggtgcccaggtttgcactgcatggtagaagacttagc

SEQ ID NO: 12285 - DNA, 43 bp, Homo sapiens
  source 1..43: mol_type = unassigned DNA
aaaacaggtgcccaggtttgcactgcatggtagaagacttagc

SEQ ID NO: 12286 - DNA, 43 bp, Homo sapiens
  source 1..43: mol_type = unassigned DNA
gctaagtcttctaccatgcagtgcaaacctgggcacctgtttt

SEQ ID NO: 12287 - RNA, 31 nt, Homo sapiens
  source 1..31: mol_type = unassigned RNA
cctcattcgatcagatgatatgatagaaaca

SEQ ID NO: 12288 - DNA, 31 bp, Homo sapiens
  source 1..31: mol_type = unassigned DNA
cctcattcgatcagatgatatgatagaaaca

SEQ ID NO: 12289 - DNA, 31 bp, Homo sapiens
  source 1..31: mol_type = unassigned DNA
tgtttctatcatatcatctgatcgaatgagg

SEQ ID NO: 12290 - RNA, 60 nt, Homo sapiens
  source 1..60: mol_type = unassigned RNA
tgagatactctgatctttgaatccaaggtgttcttctattacaatagtctaaatataatc

SEQ ID NO: 12291 - DNA, 60 bp, Homo sapiens
  source 1..60: mol_type = unassigned DNA
tgagatactctgatctttgaatccaaggtgttcttctattacaatagtctaaatataatc

SEQ ID NO: 12292 - DNA, 60 bp, Homo sapiens
  source 1..60: mol_type = unassigned DNA
gattatatttagactattgtaatagaagaacaccttggattcaaagatcagagtatctca

SEQ ID NO: 12293 - RNA, 177 nt, Homo sapiens
  source 1..177: mol_type = unassigned RNA
catagttaagagcatgggatctggagtcgaactcatgtcacttattaacctcgtgtgcctgaataagttacttaacttccttctgccttcgtttttctcatctataacactccttaagagctgttatgaggatcgaacgagtaaatgcttgtaaaatgcttggaacgggtctggcat

SEQ ID NO: 12294 - DNA, 177 bp, Homo sapiens
  source 1..177: mol_type = unassigned DNA
catagttaagagcatgggatctggagtcgaactcatgtcacttattaacctcgtgtgcctgaataagttacttaacttccttctgccttcgtttttctcatctataacactccttaagagctgttatgaggatcgaacgagtaaatgcttgtaaaatgcttggaacgggtctggcat

SEQ ID NO: 12295 - DNA, 177 bp, Homo sapiens
  source 1..177: mol_type = unassigned DNA
atgccagacccgttccaagcattttacaagcatttactcgttcgatcctcataacagctcttaaggagtgttatagatgagaaaaacgaaggcagaaggaagttaagtaacttattcaggcacacgaggttaataagtgacatgagttcgactccagatcccatgctcttaactatg

SEQ ID NO: 12296 - RNA, 33 nt, Homo sapiens
  source 1..33: mol_type = unassigned RNA
taaactctaattatgacagctacactgaaaaat

SEQ ID NO: 12297 - DNA, 33 bp, Homo sapiens
  source 1..33: mol_type = unassigned DNA
taaactctaattatgacagctacactgaaaaat

SEQ ID NO: 12298 - DNA, 33 bp, Homo sapiens
  source 1..33: mol_type = unassigned DNA
atttttcagtgtagctgtcataattagagttta

SEQ ID NO: 12299 - RNA, 108 nt, Homo sapiens
  source 1..108: mol_type = unassigned RNA
ttgagtaatcacacgtgtcggtaaaaagctgtaattacctaagaaaagcatagcatttttgtctgtgcagggctcacctatttcgtatgtctttaaaactttgaccaa

SEQ ID NO: 12300 - DNA, 108 bp, Homo sapiens
  source 1..108: mol_type = unassigned DNA
ttgagtaatcacacgtgtcggtaaaaagctgtaattacctaagaaaagcatagcatttttgtctgtgcagggctcacctatttcgtatgtctttaaaactttgaccaa

SEQ ID NO: 12301 - DNA, 108 bp, Homo sapiens
  source 1..108: mol_type = unassigned DNA
ttggtcaaagttttaaagacatacgaaataggtgagccctgcacagacaaaaatgctatgcttttcttaggtaattacagctttttaccgacacgtgtgattactcaa

SEQ ID NO: 12302 - RNA, 32 nt, Homo sapiens
  source 1..32: mol_type = unassigned RNA
tacctactgttgaggctcctggagatcctcaa

SEQ ID NO: 12303 - DNA, 32 bp, Homo sapiens
  source 1..32: mol_type = unassigned DNA
tacctactgttgaggctcctggagatcctcaa

SEQ ID NO: 12304 - DNA, 32 bp, Homo sapiens
  source 1..32: mol_type = unassigned DNA
ttgaggatctccaggagcctcaacagtaggta

SEQ ID NO: 12305 - RNA, 31 nt, Homo sapiens
  source 1..31: mol_type = unassigned RNA
ttgatcataaagcctgtatactgaaccacat

SEQ ID NO: 12306 - DNA, 31 bp, Homo sapiens
  source 1..31: mol_type = unassigned DNA
ttgatcataaagcctgtatactgaaccacat

SEQ ID NO: 12307 - DNA, 31 bp, Homo sapiens
  source 1..31: mol_type = unassigned DNA
atgtggttcagtatacaggctttatgatcaa

SEQ ID NO: 12308 - RNA, 66 nt, Homo sapiens
  source 1..66: mol_type = unassigned RNA
tgggtagagagttctgtcgatatctgttagatccatctggtcaagcattgagttcaggtcccgaat

SEQ ID NO: 12309 - DNA, 66 bp, Homo sapiens
  source 1..66: mol_type = unassigned DNA
tgggtagagagttctgtcgatatctgttagatccatctggtcaagcattgagttcaggtcccgaat

SEQ ID NO: 12310 - DNA, 66 bp, Homo sapiens
  source 1..66: mol_type = unassigned DNA
attcgggacctgaactcaatgcttgaccagatggatctaacagatatcgacagaactctctaccca

SEQ ID NO: 12311 - RNA, 163 nt, Homo sapiens
  source 1..163: mol_type = unassigned RNA
acattcattgtctactggcttgcaaaatccattgaaagttctaaagtttgagcttctcagccagggctctgcctgttctgaaccctgcctgtatctccagcctcttctctgcctcatgctttaggttccagcaacactgaatggcatcttcatgggtactgtg

SEQ ID NO: 12312 - DNA, 163 bp, Homo sapiens
  source 1..163: mol_type = unassigned DNA
acattcattgtctactggcttgcaaaatccattgaaagttctaaagtttgagcttctcagccagggctctgcctgttctgaaccctgcctgtatctccagcctcttctctgcctcatgctttaggttccagcaacactgaatggcatcttcatgggtactgtg

SEQ ID NO: 12313 - DNA, 163 bp, Homo sapiens
  source 1..163: mol_type = unassigned DNA
cacagtacccatgaagatgccattcagtgttgctggaacctaaagcatgaggcagagaagaggctggagatacaggcagggttcagaacaggcagagccctggctgagaagctcaaactttagaactttcaatggattttgcaagccagtagacaatgaatgt

SEQ ID NO: 12314 - RNA, 32 nt, Homo sapiens
  source 1..32: mol_type = unassigned RNA
tccattcagaggttgtccagattagaagtgag

SEQ ID NO: 12315 - DNA, 32 bp, Homo sapiens
  source 1..32: mol_type = unassigned DNA
tccattcagaggttgtccagattagaagtgag

SEQ ID NO: 12316 - DNA, 32 bp, Homo sapiens
  source 1..32: mol_type = unassigned DNA
ctcacttctaatctggacaacctctgaatgga

SEQ ID NO: 12317 - RNA, 22 nt, Homo sapiens
  source 1..22: mol_type = unassigned RNA
actctactgtcttctgtttgtt

SEQ ID NO: 12318 - DNA, 22 bp, Homo sapiens
  source 1..22: mol_type = unassigned DNA
actctactgtcttctgtttgtt

SEQ ID NO: 12319 - DNA, 22 bp, Homo sapiens
  source 1..22: mol_type = unassigned DNA
aacaaacagaagacagtagagt

SEQ ID NO: 12320 - RNA, 86 nt, Homo sapiens
  source 1..86: mol_type = unassigned RNA
tagggatttagaatctgcaaatttgacagccaatcagcattcagatgttatctgtcaatcagaacctgacgacagctttccaagta

SEQ ID NO: 12321 - DNA, 86 bp, Homo sapiens
  source 1..86: mol_type = unassigned DNA
tagggatttagaatctgcaaatttgacagccaatcagcattcagatgttatctgtcaatcagaacctgacgacagctttccaagta

SEQ ID NO: 12322 - DNA, 86 bp, Homo sapiens
  source 1..86: mol_type = unassigned DNA
tacttggaaagctgtcgtcaggttctgattgacagataacatctgaatgctgattggctgtcaaatttgcagattctaaatcccta

SEQ ID NO: 12323 - RNA, 37 nt, Homo sapiens
  source 1..37: mol_type = unassigned RNA
atctcaccgtttctgcttgtcagaaatcttgatgtgg

SEQ ID NO: 12324 - DNA, 37 bp, Homo sapiens
  source 1..37: mol_type = unassigned DNA
atctcaccgtttctgcttgtcagaaatcttgatgtgg

SEQ ID NO: 12325 - DNA, 37 bp, Homo sapiens
  source 1..37: mol_type = unassigned DNA
ccacatcaagatttctgacaagcagaaacggtgagat

SEQ ID NO: 12326 - RNA, 24 nt, Homo sapiens
  source 1..24: mol_type = unassigned RNA
gcaatcccaccctcctctccagtt

SEQ ID NO: 12327 - DNA, 24 bp, Homo sapiens
  source 1..24: mol_type = unassigned DNA
gcaatcccaccctcctctccagtt

SEQ ID NO: 12328 - DNA, 24 bp, Homo sapiens
  source 1..24: mol_type = unassigned DNA
aactggagaggagggtgggattgc

SEQ ID NO: 12329 - RNA, 29 nt, Homo sapiens
  source 1..29: mol_type = unassigned RNA
gcctattatgtgttaggactgaaagatga

SEQ ID NO: 12330 - DNA, 29 bp, Homo sapiens
  source 1..29: mol_type = unassigned DNA
gcctattatgtgttaggactgaaagatga

SEQ ID NO: 12331 - DNA, 29 bp, Homo sapiens
  source 1..29: mol_type = unassigned DNA
tcatctttcagtcctaacacataataggc

SEQ ID NO: 12332 - RNA, 37 nt, Homo sapiens
  source 1..37: mol_type = unassigned RNA
tatgcatatatgtggattgtgacaggaggaagaagaa

SEQ ID NO: 12333 - DNA, 37 bp, Homo sapiens
  source 1..37: mol_type = unassigned DNA
tatgcatatatgtggattgtgacaggaggaagaagaa

SEQ ID NO: 12334 - DNA, 37 bp, Homo sapiens
  source 1..37: mol_type = unassigned DNA
ttcttcttcctcctgtcacaatccacatatatgcata

SEQ ID NO: 12335 - RNA, 36 nt, Homo sapiens
  source 1..36: mol_type = unassigned RNA
tttactgtctagaatggatgttaccagctgcatctc

SEQ ID NO: 12336 - DNA, 36 bp, Homo sapiens
  source 1..36: mol_type = unassigned DNA
tttactgtctagaatggatgttaccagctgcatctc

SEQ ID NO: 12337 - DNA, 36 bp, Homo sapiens
  source 1..36: mol_type = unassigned DNA
gagatgcagctggtaacatccattctagacagtaaa

SEQ ID NO: 12338 - RNA, 23 nt, Homo sapiens
  source 1..23: mol_type = unassigned RNA
ctggattgagccatgcttagaaa

SEQ ID NO: 12339 - DNA, 23 bp, Homo sapiens
  source 1..23: mol_type = unassigned DNA
ctggattgagccatgcttagaaa

SEQ ID NO: 12340 - DNA, 23 bp, Homo sapiens
  source 1..23: mol_type = unassigned DNA
tttctaagcatggctcaatccag

SEQ ID NO: 12341 - RNA, 126 nt, Homo sapiens
  source 1..126: mol_type = unassigned RNA
attatgtaaatggactttccacttggacagtgccatcttgtctgctccttactgtacacgttgctggcaaagagaagagaagacgacccaccattttgatcatgcctagtcacaggtagccttttt

SEQ ID NO: 12342 - DNA, 126 bp, Homo sapiens
  source 1..126: mol_type = unassigned DNA
attatgtaaatggactttccacttggacagtgccatcttgtctgctccttactgtacacgttgctggcaaagagaagagaagacgacccaccattttgatcatgcctagtcacaggtagccttttt

SEQ ID NO: 12343 - DNA, 126 bp, Homo sapiens
  source 1..126: mol_type = unassigned DNA
aaaaaggctacctgtgactaggcatgatcaaaatggtgggtcgtcttctcttctctttgccagcaacgtgtacagtaaggagcagacaagatggcactgtccaagtggaaagtccatttacataat

SEQ ID NO: 12344 - RNA, 140 nt, Homo sapiens
  source 1..140: mol_type = unassigned RNA
attcacagtctgcagactcaaataaacggccctccaccttaggaagccagttcaaacagtctctggaccagctgatgaaaatcctgaccaactgccagccttacttcatccgctgcatcaaacctaatgagtacaagaag

SEQ ID NO: 12345 - DNA, 140 bp, Homo sapiens
  source 1..140: mol_type = unassigned DNA
attcacagtctgcagactcaaataaacggccctccaccttaggaagccagttcaaacagtctctggaccagctgatgaaaatcctgaccaactgccagccttacttcatccgctgcatcaaacctaatgagtacaagaag

SEQ ID NO: 12346 - DNA, 140 bp, Homo sapiens
  source 1..140: mol_type = unassigned DNA
cttcttgtactcattaggtttgatgcagcggatgaagtaaggctggcagttggtcaggattttcatcagctggtccagagactgtttgaactggcttcctaaggtggagggccgtttatttgagtctgcagactgtgaat

SEQ ID NO: 12347 - RNA, 33 nt, Homo sapiens
  source 1..33: mol_type = unassigned RNA
ttagcctccaactgggagggcgaggccaggccc

SEQ ID NO: 12348 - DNA, 33 bp, Homo sapiens
  source 1..33: mol_type = unassigned DNA
ttagcctccaactgggagggcgaggccaggccc

SEQ ID NO: 12349 - DNA, 33 bp, Homo sapiens
  source 1..33: mol_type = unassigned DNA
gggcctggcctcgccctcccagttggaggctaa

SEQ ID NO: 12350 - RNA, 32 nt, Homo sapiens
  source 1..32: mol_type = unassigned RNA
tctctttgaatgactgtctggacaaacacaat

SEQ ID NO: 12351 - DNA, 32 bp, Homo sapiens
  source 1..32: mol_type = unassigned DNA
tctctttgaatgactgtctggacaaacacaat

SEQ ID NO: 12352 - DNA, 32 bp, Homo sapiens
  source 1..32: mol_type = unassigned DNA
attgtgtttgtccagacagtcattcaaagaga

SEQ ID NO: 12353 - RNA, 93 nt, Homo sapiens
  source 1..93: mol_type = unassigned RNA
ctacgtcttacgcctcatggtcgggctttggaagtgctcatctctgtcaagtcatctgttaattcctctgttgtgaagtctatgagatcttga

SEQ ID NO: 12354 - DNA, 93 bp, Homo sapiens
  source 1..93: mol_type = unassigned DNA
ctacgtcttacgcctcatggtcgggctttggaagtgctcatctctgtcaagtcatctgttaattcctctgttgtgaagtctatgagatcttga

SEQ ID NO: 12355 - DNA, 93 bp, Homo sapiens
  source 1..93: mol_type = unassigned DNA
tcaagatctcatagacttcacaacagaggaattaacagatgacttgacagagatgagcacttccaaagcccgaccatgaggcgtaagacgtag

SEQ ID NO: 12356 - RNA, 31 nt, Homo sapiens
  source 1..31: mol_type = unassigned RNA
gcagcctcctgaaccacccaagattgcacac

SEQ ID NO: 12357 - DNA, 31 bp, Homo sapiens
  source 1..31: mol_type = unassigned DNA
gcagcctcctgaaccacccaagattgcacac

SEQ ID NO: 12358 - DNA, 31 bp, Homo sapiens
  source 1..31: mol_type = unassigned DNA
gtgtgcaatcttgggtggttcaggaggctgc

SEQ ID NO: 12359 - RNA, 143 nt, Homo sapiens
  source 1..143: mol_type = unassigned RNA
atgatttcactttcatttaacccttgtactgacccttgttttccaacgcgttggctctttctgccgtctgagactgtgtgatgtgctgaagccaagaaggtaagtgtccctggcaacccgaagcctgcaaacctctctccaag

SEQ ID NO: 12360 - DNA, 143 bp, Homo sapiens
  source 1..143: mol_type = unassigned DNA
atgatttcactttcatttaacccttgtactgacccttgttttccaacgcgttggctctttctgccgtctgagactgtgtgatgtgctgaagccaagaaggtaagtgtccctggcaacccgaagcctgcaaacctctctccaag

SEQ ID NO: 12361 - DNA, 143 bp, Homo sapiens
  source 1..143: mol_type = unassigned DNA
cttggagagaggtttgcaggcttcgggttgccagggacacttaccttcttggcttcagcacatcacacagtctcagacggcagaaagagccaacgcgttggaaaacaagggtcagtacaagggttaaatgaaagtgaaatcat

SEQ ID NO: 12362 - RNA, 51 nt, Homo sapiens
  source 1..51: mol_type = unassigned RNA
tggtatggcattggctttctactgttataggaactctgcggtgccatcact

SEQ ID NO: 12363 - DNA, 51 bp, Homo sapiens
  source 1..51: mol_type = unassigned DNA
tggtatggcattggctttctactgttataggaactctgcggtgccatcact

SEQ ID NO: 12364 - DNA, 51 bp, Homo sapiens
  source 1..51: mol_type = unassigned DNA
agtgatggcaccgcagagttcctataacagtagaaagccaatgccatacca

SEQ ID NO: 12365 - RNA, 55 nt, Homo sapiens
  source 1..55: mol_type = unassigned RNA
ggcaggaaagacagtactggaggatcagcctctttgctctgatcttcctcctgag

SEQ ID NO: 12366 - DNA, 55 bp, Homo sapiens
  source 1..55: mol_type = unassigned DNA
ggcaggaaagacagtactggaggatcagcctctttgctctgatcttcctcctgag

SEQ ID NO: 12367 - DNA, 55 bp, Homo sapiens
  source 1..55: mol_type = unassigned DNA
ctcaggaggaagatcagagcaaagaggctgatcctccagtactgtctttcctgcc

SEQ ID NO: 12368 - RNA, 37 nt, Homo sapiens
  source 1..37: mol_type = unassigned RNA
aagcttactggattgatgttgatgtactcttactaaa

SEQ ID NO: 12369 - DNA, 37 bp, Homo sapiens
  source 1..37: mol_type = unassigned DNA
aagcttactggattgatgttgatgtactcttactaaa

SEQ ID NO: 12370 - DNA, 37 bp, Homo sapiens
  source 1..37: mol_type = unassigned DNA
tttagtaagagtacatcaacatcaatccagtaagctt

SEQ ID NO: 12371 - RNA, 20 nt, Homo sapiens
  source 1..20: mol_type = unassigned RNA
gtgtcagtgacttccagtgg

SEQ ID NO: 12372 - DNA, 20 bp, Homo sapiens
  source 1..20: mol_type = unassigned DNA
gtgtcagtgacttccagtgg

SEQ ID NO: 12373 - DNA, 20 bp, Homo sapiens
  source 1..20: mol_type = unassigned DNA
ccactggaagtcactgacac

SEQ ID NO: 12374 - RNA, 27 nt, Homo sapiens
  source 1..27: mol_type = unassigned RNA
ttgcatgttcgtggcctctaagatgaa

SEQ ID NO: 12375 - DNA, 27 bp, Homo sapiens
  source 1..27: mol_type = unassigned DNA
ttgcatgttcgtggcctctaagatgaa

SEQ ID NO: 12376 - DNA, 27 bp, Homo sapiens
  source 1..27: mol_type = unassigned DNA
ttcatcttagaggccacgaacatgcaa

SEQ ID NO: 12377 - RNA, 142 nt, Homo sapiens
  source 1..142: mol_type = unassigned RNA
aggaaatgactcatttgaaggcactatcaagatcaagtaaggcagtagatctcaaactggcagcataacctgaagggacctataaaaatgtagaggccctggctccaccacacctaatcaatcagaagatcagaagggaagg

SEQ ID NO: 12378 - DNA, 142 bp, Homo sapiens
  source 1..142: mol_type = unassigned DNA
aggaaatgactcatttgaaggcactatcaagatcaagtaaggcagtagatctcaaactggcagcataacctgaagggacctataaaaatgtagaggccctggctccaccacacctaatcaatcagaagatcagaagggaagg

SEQ ID NO: 12379 - DNA, 142 bp, Homo sapiens
  source 1..142: mol_type = unassigned DNA
ccttcccttctgatcttctgattgattaggtgtggtggagccagggcctctacatttttataggtcccttcaggttatgctgccagtttgagatctactgccttacttgatcttgatagtgccttcaaatgagtcatttcct

SEQ ID NO: 12380 - RNA, 30 nt, Homo sapiens
  source 1..30: mol_type = unassigned RNA
cccattcttaaccagttcacgcctgctaac

SEQ ID NO: 12381 - DNA, 30 bp, Homo sapiens
  source 1..30: mol_type = unassigned DNA
cccattcttaaccagttcacgcctgctaac

SEQ ID NO: 12382 - DNA, 30 bp, Homo sapiens
  source 1..30: mol_type = unassigned DNA
gttagcaggcgtgaactggttaagaatggg

SEQ ID NO: 12383 - RNA, 22 nt, Homo sapiens
  source 1..22: mol_type = unassigned RNA
agtttgtgctgatttgcaggga

SEQ ID NO: 12384 - DNA, 22 bp, Homo sapiens
  source 1..22: mol_type = unassigned DNA
agtttgtgctgatttgcaggga

SEQ ID NO: 12385 - DNA, 22 bp, Homo sapiens
  source 1..22: mol_type = unassigned DNA
tccctgcaaatcagcacaaact

SEQ ID NO: 12386 - RNA, 62 nt, Homo sapiens
  source 1..62: mol_type = unassigned RNA
cagaagcaagccagacctagcaggctgttccatgttctatttttgactgtagccacagctgc

SEQ ID NO: 12387 - DNA, 62 bp, Homo sapiens
  source 1..62: mol_type = unassigned DNA
cagaagcaagccagacctagcaggctgttccatgttctatttttgactgtagccacagctgc

SEQ ID NO: 12388 - DNA, 62 bp, Homo sapiens
  source 1..62: mol_type = unassigned DNA
gcagctgtggctacagtcaaaaatagaacatggaacagcctgctaggtctggcttgcttctg

SEQ ID NO: 12389 - RNA, 23 nt, Homo sapiens
  source 1..23: mol_type = unassigned RNA
tggatttccaacatattgccaga

SEQ ID NO: 12390 - DNA, 23 bp, Homo sapiens
  source 1..23: mol_type = unassigned DNA
tggatttccaacatattgccaga

SEQ ID NO: 12391 - DNA, 23 bp, Homo sapiens
  source 1..23: mol_type = unassigned DNA
tctggcaatatgttggaaatcca

SEQ ID NO: 12392 - RNA, 88 nt, Homo sapiens
  source 1..88: mol_type = unassigned RNA
atgttgcctggctcagtacttaagtactgttgtcatctcgtaatggtacatatactctgaactctgaacttcatttagttgcctaatg

SEQ ID NO: 12393 - DNA, 88 bp, Homo sapiens
  source 1..88: mol_type = unassigned DNA
atgttgcctggctcagtacttaagtactgttgtcatctcgtaatggtacatatactctgaactctgaacttcatttagttgcctaatg

SEQ ID NO: 12394 - DNA, 88 bp, Homo sapiens
  source 1..88: mol_type = unassigned DNA
cattaggcaactaaatgaagttcagagttcagagtatatgtaccattacgagatgacaacagtacttaagtactgagccaggcaacat

SEQ ID NO: 12395 - RNA, 156 nt, Homo sapiens
  source 1..156: mol_type = unassigned RNA
cacacatccatttcaaccagactcttagaatcttccagttgtttctttctcttaccacagtcctagagagcagttagtgtctgatctacctttaccatgtatctcgtatccacctgcatctttctgtccccactgctgtcgcaggcttcaggcctg

SEQ ID NO: 12396 - DNA, 156 bp, Homo sapiens
  source 1..156: mol_type = unassigned DNA
cacacatccatttcaaccagactcttagaatcttccagttgtttctttctcttaccacagtcctagagagcagttagtgtctgatctacctttaccatgtatctcgtatccacctgcatctttctgtccccactgctgtcgcaggcttcaggcctg

SEQ ID NO: 12397 - DNA, 156 bp, Homo sapiens
  source 1..156: mol_type = unassigned DNA
caggcctgaagcctgcgacagcagtggggacagaaagatgcaggtggatacgagatacatggtaaaggtagatcagacactaactgctctctaggactgtggtaagagaaagaaacaactggaagattctaagagtctggttgaaatggatgtgtg

SEQ ID NO: 12398 - RNA, 28 nt, Homo sapiens
  source 1..28: mol_type = unassigned RNA
tccctctgtgtctcttgaagaacttagg

SEQ ID NO: 12399 - DNA, 28 bp, Homo sapiens
  source 1..28: mol_type = unassigned DNA
tccctctgtgtctcttgaagaacttagg

SEQ ID NO: 12400 - DNA, 28 bp, Homo sapiens
  source 1..28: mol_type = unassigned DNA
cctaagttcttcaagagacacagaggga

SEQ ID NO: 12401 - RNA, 30 nt, Homo sapiens
  source 1..30: mol_type = unassigned RNA
tgctcgattatgcactggaagtagagaaga

SEQ ID NO: 12402 - DNA, 30 bp, Homo sapiens
  source 1..30: mol_type = unassigned DNA
tgctcgattatgcactggaagtagagaaga

SEQ ID NO: 12403 - DNA, 30 bp, Homo sapiens
  source 1..30: mol_type = unassigned DNA
tcttctctacttccagtgcataatcgagca

SEQ ID NO: 12404 - RNA, 134 nt, Homo sapiens
  source 1..134: mol_type = unassigned RNA
tttgtcagtgctcagtttcagttgactgacttatctccttactgtgggccatattttttttgctgctttgtatgtctgatagtttttactagatgtttcacattgtgagtcttatctcgtgtgctggctacttt

SEQ ID NO: 12405 - DNA, 134 bp, Homo sapiens
  source 1..134: mol_type = unassigned DNA
tttgtcagtgctcagtttcagttgactgacttatctccttactgtgggccatattttttttgctgctttgtatgtctgatagtttttactagatgtttcacattgtgagtcttatctcgtgtgctggctacttt

SEQ ID NO: 12406 - DNA, 134 bp, Homo sapiens
  source 1..134: mol_type = unassigned DNA
aaagtagccagcacacgagataagactcacaatgtgaaacatctagtaaaaactatcagacatacaaagcagcaaaaaaaatatggcccacagtaaggagataagtcagtcaactgaaactgagcactgacaaa

SEQ ID NO: 12407 - RNA, 29 nt, Homo sapiens
  source 1..29: mol_type = unassigned RNA
ctttaatttatcctctgaacagctacaaa

SEQ ID NO: 12408 - DNA, 29 bp, Homo sapiens
  source 1..29: mol_type = unassigned DNA
ctttaatttatcctctgaacagctacaaa

SEQ ID NO: 12409 - DNA, 29 bp, Homo sapiens
  source 1..29: mol_type = unassigned DNA
tttgtagctgttcagaggataaattaaag

SEQ ID NO: 12410 - RNA, 38 nt, Homo sapiens
  source 1..38: mol_type = unassigned RNA
tttttctctagtagaactccttgcttcatatatttcat

SEQ ID NO: 12411 - DNA, 38 bp, Homo sapiens
  source 1..38: mol_type = unassigned DNA
tttttctctagtagaactccttgcttcatatatttcat

SEQ ID NO: 12412 - DNA, 38 bp, Homo sapiens
  source 1..38: mol_type = unassigned DNA
atgaaatatatgaagcaaggagttctactagagaaaaa

SEQ ID NO: 12413 - RNA, 162 nt, Homo sapiens
  source 1..162: mol_type = unassigned RNA
tgagaagaaacatagtgccaagaaaaacagacacaagacctgtggaaggctgggcaccagtgctctaaagcaagatctgcctaaactggcaggaacatttttcacagcagacaggagttggtctggattctgtctggggccaggctgagagggaggtggggg

SEQ ID NO: 12414 - DNA, 162 bp, Homo sapiens
  source 1..162: mol_type = unassigned DNA
tgagaagaaacatagtgccaagaaaaacagacacaagacctgtggaaggctgggcaccagtgctctaaagcaagatctgcctaaactggcaggaacatttttcacagcagacaggagttggtctggattctgtctggggccaggctgagagggaggtggggg

SEQ ID NO: 12415 - DNA, 162 bp, Homo sapiens
  source 1..162: mol_type = unassigned DNA
cccccacctccctctcagcctggccccagacagaatccagaccaactcctgtctgctgtgaaaaatgttcctgccagtttaggcagatcttgctttagagcactggtgcccagccttccacaggtcttgtgtctgtttttcttggcactatgtttcttctca

SEQ ID NO: 12416 - RNA, 29 nt, Homo sapiens
  source 1..29: mol_type = unassigned RNA
tggctgtcacgcagccaccaggtcatctc

SEQ ID NO: 12417 - DNA, 29 bp, Homo sapiens
  source 1..29: mol_type = unassigned DNA
tggctgtcacgcagccaccaggtcatctc

SEQ ID NO: 12418 - DNA, 29 bp, Homo sapiens
  source 1..29: mol_type = unassigned DNA
gagatgacctggtggctgcgtgacagcca

SEQ ID NO: 12419 - RNA, 71 nt, Homo sapiens
  source 1..71: mol_type = unassigned RNA
agtagagatggggtttcaccatgttgcctgggctggttgcaaactcttgagctcaggcagtctgcctgcct

SEQ ID NO: 12420 - DNA, 71 bp, Homo sapiens
  source 1..71: mol_type = unassigned DNA
agtagagatggggtttcaccatgttgcctgggctggttgcaaactcttgagctcaggcagtctgcctgcct

SEQ ID NO: 12421 - DNA, 71 bp, Homo sapiens
  source 1..71: mol_type = unassigned DNA
aggcaggcagactgcctgagctcaagagtttgcaaccagcccaggcaacatggtgaaaccccatctctact

SEQ ID NO: 12422 - RNA, 30 nt, Homo sapiens
  source 1..30: mol_type = unassigned RNA
ttaaaaagcaaacactgggaccgtagctta

SEQ ID NO: 12423 - DNA, 30 bp, Homo sapiens
  source 1..30: mol_type = unassigned DNA
ttaaaaagcaaacactgggaccgtagctta

SEQ ID NO: 12424 - DNA, 30 bp, Homo sapiens
  source 1..30: mol_type = unassigned DNA
taagctacggtcccagtgtttgctttttaa

SEQ ID NO: 12425 - RNA, 26 nt, Homo sapiens
  source 1..26: mol_type = unassigned RNA
gttcttccggaacacatgagcatgta

SEQ ID NO: 12426 - DNA, 26 bp, Homo sapiens
  source 1..26: mol_type = unassigned DNA
gttcttccggaacacatgagcatgta

SEQ ID NO: 12427 - DNA, 26 bp, Homo sapiens
  source 1..26: mol_type = unassigned DNA
tacatgctcatgtgttccggaagaac

SEQ ID NO: 12428 - RNA, 167 nt, Homo sapiens
  source 1..167: mol_type = unassigned RNA
ttttggatcaaagccattttaactgtggtgagatgatatctcattgtagttttgatttgcatttctttgatgatgcgggatgttcttatacctgttcaccatttgtatgtcgtcttttgagaaatgtttatttagatcttttgcccagattgttagattgttagatt

SEQ ID NO: 12429 - DNA, 167 bp, Homo sapiens
  source 1..167: mol_type = unassigned DNA
ttttggatcaaagccattttaactgtggtgagatgatatctcattgtagttttgatttgcatttctttgatgatgcgggatgttcttatacctgttcaccatttgtatgtcgtcttttgagaaatgtttatttagatcttttgcccagattgttagattgttagatt

SEQ ID NO: 12430 - DNA, 167 bp, Homo sapiens
  source 1..167: mol_type = unassigned DNA
aatctaacaatctaacaatctgggcaaaagatctaaataaacatttctcaaaagacgacatacaaatggtgaacaggtataagaacatcccgcatcatcaaagaaatgcaaatcaaaactacaatgagatatcatctcaccacagttaaaatggctttgatccaaaa

SEQ ID NO: 12431 - RNA, 31 nt, Homo sapiens
  source 1..31: mol_type = unassigned RNA
gggctggttggcctgcaggagtctgtaaggt

SEQ ID NO: 12432 - DNA, 31 bp, Homo sapiens
  source 1..31: mol_type = unassigned DNA
gggctggttggcctgcaggagtctgtaaggt

SEQ ID NO: 12433 - DNA, 31 bp, Homo sapiens
  source 1..31: mol_type = unassigned DNA
accttacagactcctgcaggccaaccagccc

SEQ ID NO: 12434 - RNA, 33 nt, Homo sapiens
  source 1..33: mol_type = unassigned RNA
atcgggtaggagtttgctcaaaatcttgaggtc

SEQ ID NO: 12435 - DNA, 33 bp, Homo sapiens
  source 1..33: mol_type = unassigned DNA
atcgggtaggagtttgctcaaaatcttgaggtc

SEQ ID NO: 12436 - DNA, 33 bp, Homo sapiens
  source 1..33: mol_type = unassigned DNA
gacctcaagattttgagcaaactcctacccgat

SEQ ID NO: 12437 - RNA, 31 nt, Homo sapiens
  source 1..31: mol_type = unassigned RNA
ctgtctctgtctctctctctctgcctgtctc

SEQ ID NO: 12438 - DNA, 31 bp, Homo sapiens
  source 1..31: mol_type = unassigned DNA
ctgtctctgtctctctctctctgcctgtctc

SEQ ID NO: 12439 - DNA, 31 bp, Homo sapiens
  source 1..31: mol_type = unassigned DNA
gagacaggcagagagagagagacagagacag

SEQ ID NO: 12440 - RNA, 22 nt, Homo sapiens
  source 1..22: mol_type = unassigned RNA
aactgacagctctagagaaagg

SEQ ID NO: 12441 - DNA, 22 bp, Homo sapiens
  source 1..22: mol_type = unassigned DNA
aactgacagctctagagaaagg

SEQ ID NO: 12442 - DNA, 22 bp, Homo sapiens
  source 1..22: mol_type = unassigned DNA
cctttctctagagctgtcagtt

SEQ ID NO: 12443 - RNA, 142 nt, Homo sapiens
  source 1..142: mol_type = unassigned RNA
cttggagatgctgttttctccctgtatcttcacatcatcttccccctgcttgtattcttaccctcatctcttcttataaagacaccagacgtattggagtagtgctcaccctaatgatctcttttcaccttaattgcctctt

SEQ ID NO: 12444 - DNA, 142 bp, Homo sapiens
  source 1..142: mol_type = unassigned DNA
cttggagatgctgttttctccctgtatcttcacatcatcttccccctgcttgtattcttaccctcatctcttcttataaagacaccagacgtattggagtagtgctcaccctaatgatctcttttcaccttaattgcctctt

SEQ ID NO: 12445 - DNA, 142 bp, Homo sapiens
  source 1..142: mol_type = unassigned DNA
aagaggcaattaaggtgaaaagagatcattagggtgagcactactccaatacgtctggtgtctttataagaagagatgagggtaagaatacaagcagggggaagatgatgtgaagatacagggagaaaacagcatctccaag

SEQ ID NO: 12446 - RNA, 36 nt, Homo sapiens
  source 1..36: mol_type = unassigned RNA
ctctaagtcagatagtctcctcttcttctgcttgta

SEQ ID NO: 12447 - DNA, 36 bp, Homo sapiens
  source 1..36: mol_type = unassigned DNA
ctctaagtcagatagtctcctcttcttctgcttgta

SEQ ID NO: 12448 - DNA, 36 bp, Homo sapiens
  source 1..36: mol_type = unassigned DNA
tacaagcagaagaagaggagactatctgacttagag

SEQ ID NO: 12449 - RNA, 30 nt, Homo sapiens
  source 1..30: mol_type = unassigned RNA
ctcgtctctaaggctgggtctgtgggcttg

SEQ ID NO: 12450 - DNA, 30 bp, Homo sapiens
  source 1..30: mol_type = unassigned DNA
ctcgtctctaaggctgggtctgtgggcttg

SEQ ID NO: 12451 - DNA, 30 bp, Homo sapiens
  source 1..30: mol_type = unassigned DNA
caagcccacagacccagccttagagacgag

SEQ ID NO: 12452 - RNA, 33 nt, Homo sapiens
  source 1..33: mol_type = unassigned RNA
ggacatgaccttgccagcatggaggataaaaca

SEQ ID NO: 12453 - DNA, 33 bp, Homo sapiens
  source 1..33: mol_type = unassigned DNA
ggacatgaccttgccagcatggaggataaaaca

SEQ ID NO: 12454 - DNA, 33 bp, Homo sapiens
  source 1..33: mol_type = unassigned DNA
tgttttatcctccatgctggcaaggtcatgtcc

SEQ ID NO: 12455 - RNA, 70 nt, Homo sapiens
  source 1..70: mol_type = unassigned RNA
gcctcttttttaaccctgagccaggaaggggaagagttggggacagttactggaatgctgaatggtagct

SEQ ID NO: 12456 - DNA, 70 bp, Homo sapiens
  source 1..70: mol_type = unassigned DNA
gcctcttttttaaccctgagccaggaaggggaagagttggggacagttactggaatgctgaatggtagct

SEQ ID NO: 12457 - DNA, 70 bp, Homo sapiens
  source 1..70: mol_type = unassigned DNA
agctaccattcagcattccagtaactgtccccaactcttccccttcctggctcagggttaaaaaagaggc

SEQ ID NO: 12458 - RNA, 33 nt, Homo sapiens
  source 1..33: mol_type = unassigned RNA
gacagtcatactagcagggattgcccagaagtc

SEQ ID NO: 12459 - DNA, 33 bp, Homo sapiens
  source 1..33: mol_type = unassigned DNA
gacagtcatactagcagggattgcccagaagtc

SEQ ID NO: 12460 - DNA, 33 bp, Homo sapiens
  source 1..33: mol_type = unassigned DNA
gacttctgggcaatccctgctagtatgactgtc

SEQ ID NO: 12461 - RNA, 43 nt, Homo sapiens
  source 1..43: mol_type = unassigned RNA
gtagagatggggttttgccatccttacctcaagtgatccaccc

SEQ ID NO: 12462 - DNA, 43 bp, Homo sapiens
  source 1..43: mol_type = unassigned DNA
gtagagatggggttttgccatccttacctcaagtgatccaccc

SEQ ID NO: 12463 - DNA, 43 bp, Homo sapiens
  source 1..43: mol_type = unassigned DNA
gggtggatcacttgaggtaaggatggcaaaaccccatctctac

SEQ ID NO: 12464 - RNA, 27 nt, Homo sapiens
  source 1..27: mol_type = unassigned RNA
gtgtcagtctattccagcgggactact

SEQ ID NO: 12465 - DNA, 27 bp, Homo sapiens
  source 1..27: mol_type = unassigned DNA
gtgtcagtctattccagcgggactact

SEQ ID NO: 12466 - DNA, 27 bp, Homo sapiens
  source 1..27: mol_type = unassigned DNA
agtagtcccgctggaatagactgacac

SEQ ID NO: 12467 - RNA, 30 nt, Homo sapiens
  source 1..30: mol_type = unassigned RNA
tatttgttttcccacggttgtccagcaatt

SEQ ID NO: 12468 - DNA, 30 bp, Homo sapiens
  source 1..30: mol_type = unassigned DNA
tatttgttttcccacggttgtccagcaatt

SEQ ID NO: 12469 - DNA, 30 bp, Homo sapiens
  source 1..30: mol_type = unassigned DNA
aattgctggacaaccgtgggaaaacaaata

SEQ ID NO: 12470 - RNA, 29 nt, Homo sapiens
  source 1..29: mol_type = unassigned RNA
tgctcaggacgcggaccagaactacgact

SEQ ID NO: 12471 - DNA, 29 bp, Homo sapiens
  source 1..29: mol_type = unassigned DNA
tgctcaggacgcggaccagaactacgact

SEQ ID NO: 12472 - DNA, 29 bp, Homo sapiens
  source 1..29: mol_type = unassigned DNA
agtcgtagttctggtccgcgtcctgagca

SEQ ID NO: 12473 - RNA, 31 nt, Homo sapiens
  source 1..31: mol_type = unassigned RNA
caggcccagaggtacagggctgtggccttcg

SEQ ID NO: 12474 - DNA, 31 bp, Homo sapiens
  source 1..31: mol_type = unassigned DNA
caggcccagaggtacagggctgtggccttcg

SEQ ID NO: 12475 - DNA, 31 bp, Homo sapiens
  source 1..31: mol_type = unassigned DNA
cgaaggccacagccctgtacctctgggcctg

SEQ ID NO: 12476 - RNA, 29 nt, Homo sapiens
  source 1..29: mol_type = unassigned RNA
aactattctgttgtgactatgagaacatt

SEQ ID NO: 12477 - DNA, 29 bp, Homo sapiens
  source 1..29: mol_type = unassigned DNA
aactattctgttgtgactatgagaacatt

SEQ ID NO: 12478 - DNA, 29 bp, Homo sapiens
  source 1..29: mol_type = unassigned DNA
aatgttctcatagtcacaacagaatagtt

SEQ ID NO: 12479 - RNA, 30 nt, Homo sapiens
  source 1..30: mol_type = unassigned RNA
gggatgtgagagcagtgattgtagacagac

SEQ ID NO: 12480 - DNA, 30 bp, Homo sapiens
  source 1..30: mol_type = unassigned DNA
gggatgtgagagcagtgattgtagacagac

SEQ ID NO: 12481 - DNA, 30 bp, Homo sapiens
  source 1..30: mol_type = unassigned DNA
gtctgtctacaatcactgctctcacatccc

SEQ ID NO: 12482 - RNA, 66 nt, Homo sapiens
  source 1..66: mol_type = unassigned RNA
ctgtgcagttcaactgatagttactgttgtgacctgaagttcaccatgaaaagggattacccaagc

SEQ ID NO: 12483 - DNA, 66 bp, Homo sapiens
  source 1..66: mol_type = unassigned DNA
ctgtgcagttcaactgatagttactgttgtgacctgaagttcaccatgaaaagggattacccaagc

SEQ ID NO: 12484 - DNA, 66 bp, Homo sapiens
  source 1..66: mol_type = unassigned DNA
gcttgggtaatcccttttcatggtgaacttcaggtcacaacagtaactatcagttgaactgcacag

SEQ ID NO: 12485 - RNA, 75 nt, Homo sapiens
  source 1..75: mol_type = unassigned RNA
attctttttaggaatgtggactctgggtattgacagatgcaaacctcacgaaggattatattgatggtgtttgta

SEQ ID NO: 12486 - DNA, 75 bp, Homo sapiens
  source 1..75: mol_type = unassigned DNA
attctttttaggaatgtggactctgggtattgacagatgcaaacctcacgaaggattatattgatggtgtttgta

SEQ ID NO: 12487 - DNA, 75 bp, Homo sapiens
  source 1..75: mol_type = unassigned DNA
tacaaacaccatcaatataatccttcgtgaggtttgcatctgtcaatacccagagtccacattcctaaaaagaat

SEQ ID NO: 12488 - RNA, 32 nt, Homo sapiens
  source 1..32: mol_type = unassigned RNA
ggggcaaaagctcggtctgaagggcctgaaat

SEQ ID NO: 12489 - DNA, 32 bp, Homo sapiens
  source 1..32: mol_type = unassigned DNA
ggggcaaaagctcggtctgaagggcctgaaat

SEQ ID NO: 12490 - DNA, 32 bp, Homo sapiens
  source 1..32: mol_type = unassigned DNA
atttcaggcccttcagaccgagcttttgcccc

SEQ ID NO: 12491 - RNA, 31 nt, Homo sapiens
  source 1..31: mol_type = unassigned RNA
ggcttctggaatgagcatgctactgaatcac

SEQ ID NO: 12492 - DNA, 31 bp, Homo sapiens
  source 1..31: mol_type = unassigned DNA
ggcttctggaatgagcatgctactgaatcac

SEQ ID NO: 12493 - DNA, 31 bp, Homo sapiens
  source 1..31: mol_type = unassigned DNA
gtgattcagtagcatgctcattccagaagcc

SEQ ID NO: 12494 - RNA, 29 nt, Homo sapiens
  source 1..29: mol_type = unassigned RNA
cagtagtagctcagtctgagtccaaaagc

SEQ ID NO: 12495 - DNA, 29 bp, Homo sapiens
  source 1..29: mol_type = unassigned DNA
cagtagtagctcagtctgagtccaaaagc

SEQ ID NO: 12496 - DNA, 29 bp, Homo sapiens
  source 1..29: mol_type = unassigned DNA
gcttttggactcagactgagctactactg

SEQ ID NO: 12497 - RNA, 29 nt, Homo sapiens
  source 1..29: mol_type = unassigned RNA
tataggttaaagccgagccagccaaaata

SEQ ID NO: 12498 - DNA, 29 bp, Homo sapiens
  source 1..29: mol_type = unassigned DNA
tataggttaaagccgagccagccaaaata

SEQ ID NO: 12499 - DNA, 29 bp, Homo sapiens
  source 1..29: mol_type = unassigned DNA
tattttggctggctcggctttaacctata

SEQ ID NO: 12500 - RNA, 31 nt, Homo sapiens
  source 1..31: mol_type = unassigned RNA
atgctggtgcgtgtcacaggggctgaggctg

SEQ ID NO: 12501 - DNA, 31 bp, Homo sapiens
  source 1..31: mol_type = unassigned DNA
atgctggtgcgtgtcacaggggctgaggctg

SEQ ID NO: 12502 - DNA, 31 bp, Homo sapiens
  source 1..31: mol_type = unassigned DNA
cagcctcagcccctgtgacacgcaccagcat

SEQ ID NO: 12503 - RNA, 38 nt, Homo sapiens
  source 1..38: mol_type = unassigned RNA
ggcctagcacccaggtgacattgtgacactcgtatgca

SEQ ID NO: 12504 - DNA, 38 bp, Homo sapiens
  source 1..38: mol_type = unassigned DNA
ggcctagcacccaggtgacattgtgacactcgtatgca

SEQ ID NO: 12505 - DNA, 38 bp, Homo sapiens
  source 1..38: mol_type = unassigned DNA
tgcatacgagtgtcacaatgtcacctgggtgctaggcc

SEQ ID NO: 12506 - RNA, 184 nt, Homo sapiens
  source 1..184: mol_type = unassigned RNA
gtaacttcctcagcttaacagaatcattgtgtgggaggcagtgagggaagatatcctgtgtgaactcagtgaagaaagacctctcagaatggagtactctacagagataattacagctttgggaaaatgtgctcagaataaagccaaagggctggaattcatcagattaagagaaagtggaaag

SEQ ID NO: 12507 - DNA, 184 bp, Homo sapiens
  source 1..184: mol_type = unassigned DNA
gtaacttcctcagcttaacagaatcattgtgtgggaggcagtgagggaagatatcctgtgtgaactcagtgaagaaagacctctcagaatggagtactctacagagataattacagctttgggaaaatgtgctcagaataaagccaaagggctggaattcatcagattaagagaaagtggaaag

SEQ ID NO: 12508 - DNA, 184 bp, Homo sapiens
  source 1..184: mol_type = unassigned DNA
ctttccactttctcttaatctgatgaattccagccctttggctttattctgagcacattttcccaaagctgtaattatctctgtagagtactccattctgagaggtctttcttcactgagttcacacaggatatcttccctcactgcctcccacacaatgattctgttaagctgaggaagttac

SEQ ID NO: 12509 - RNA, 121 nt, Homo sapiens
  source 1..121: mol_type = unassigned RNA
acttattcttccctcctactcctgagttcttagtcactgcctgaaacctctgacaaatctgtcctcgctctaaatacagataacgaattctggtgtttagagcccatgaaagccccttttt

SEQ ID NO: 12510 - DNA, 121 bp, Homo sapiens
  source 1..121: mol_type = unassigned DNA
acttattcttccctcctactcctgagttcttagtcactgcctgaaacctctgacaaatctgtcctcgctctaaatacagataacgaattctggtgtttagagcccatgaaagccccttttt

SEQ ID NO: 12511 - DNA, 121 bp, Homo sapiens
  source 1..121: mol_type = unassigned DNA
aaaaaggggctttcatgggctctaaacaccagaattcgttatctgtatttagagcgaggacagatttgtcagaggtttcaggcagtgactaagaactcaggagtaggagggaagaataagt

SEQ ID NO: 12512 - RNA, 185 nt, Homo sapiens
  source 1..185: mol_type = unassigned RNA
gcttggtgggcggggcctggcccagctgccagcttggaggtgtttttctgcctgtaggaggctggggaatgtttacgctgcagggcaggaaaggggtgggttcactgctggtcaagtaggggcactgggagagggaggggttccactgggccctcacaggtagccccagggccacccctgcccca

SEQ ID NO: 12513 - DNA, 185 bp, Homo sapiens
  source 1..185: mol_type = unassigned DNA
gcttggtgggcggggcctggcccagctgccagcttggaggtgtttttctgcctgtaggaggctggggaatgtttacgctgcagggcaggaaaggggtgggttcactgctggtcaagtaggggcactgggagagggaggggttccactgggccctcacaggtagccccagggccacccctgcccca

SEQ ID NO: 12514 - DNA, 185 bp, Homo sapiens
  source 1..185: mol_type = unassigned DNA
tggggcaggggtggccctggggctacctgtgagggcccagtggaacccctccctctcccagtgcccctacttgaccagcagtgaacccacccctttcctgccctgcagcgtaaacattccccagcctcctacaggcagaaaaacacctccaagctggcagctgggccaggccccgcccaccaagc

SEQ ID NO: 12515 - RNA, 47 nt, Homo sapiens
  source 1..47: mol_type = unassigned RNA
tttgtcaagtacttactctgtgctgagacagaggctgaaggctttta

SEQ ID NO: 12516 - DNA, 47 bp, Homo sapiens
  source 1..47: mol_type = unassigned DNA
tttgtcaagtacttactctgtgctgagacagaggctgaaggctttta

SEQ ID NO: 12517 - DNA, 47 bp, Homo sapiens
  source 1..47: mol_type = unassigned DNA
taaaagccttcagcctctgtctcagcacagagtaagtacttgacaaa

SEQ ID NO: 12518 - RNA, 28 nt, Homo sapiens
  source 1..28: mol_type = unassigned RNA
cctcgctagcgtgcctgggctgtgcccc

SEQ ID NO: 12519 - DNA, 28 bp, Homo sapiens
  source 1..28: mol_type = unassigned DNA
cctcgctagcgtgcctgggctgtgcccc

SEQ ID NO: 12520 - DNA, 28 bp, Homo sapiens
  source 1..28: mol_type = unassigned DNA
ggggcacagcccaggcacgctagcgagg

SEQ ID NO: 12521 - RNA, 22 nt, Homo sapiens
  source 1..22: mol_type = unassigned RNA
tgatttccaatcacttgccaga

SEQ ID NO: 12522 - DNA, 22 bp, Homo sapiens
  source 1..22: mol_type = unassigned DNA
tgatttccaatcacttgccaga

SEQ ID NO: 12523 - DNA, 22 bp, Homo sapiens
  source 1..22: mol_type = unassigned DNA
tctggcaagtgattggaaatca

SEQ ID NO: 12524 - RNA, 83 nt, Homo sapiens
  source 1..83: mol_type = unassigned RNA
gctcctctagctaaaactcagtttgttccctctgtccacatcctggtatgccatgtctagctgccttgagtccaggctggtga

SEQ ID NO: 12525 - DNA, 83 bp, Homo sapiens
  source 1..83: mol_type = unassigned DNA
gctcctctagctaaaactcagtttgttccctctgtccacatcctggtatgccatgtctagctgccttgagtccaggctggtga

SEQ ID NO: 12526 - DNA, 83 bp, Homo sapiens
  source 1..83: mol_type = unassigned DNA
tcaccagcctggactcaaggcagctagacatggcataccaggatgtggacagagggaacaaactgagttttagctagaggagc

SEQ ID NO: 12527 - RNA, 32 nt, Homo sapiens
  source 1..32: mol_type = unassigned RNA
ctcgctgtgtgtctctggatctcacttatctc

SEQ ID NO: 12528 - DNA, 32 bp, Homo sapiens
  source 1..32: mol_type = unassigned DNA
ctcgctgtgtgtctctggatctcacttatctc

SEQ ID NO: 12529 - DNA, 32 bp, Homo sapiens
  source 1..32: mol_type = unassigned DNA
gagataagtgagatccagagacacacagcgag

SEQ ID NO: 12530 - RNA, 30 nt, Homo sapiens
  source 1..30: mol_type = unassigned RNA
atacaaggtcagtttgtggattgtaatccc

SEQ ID NO: 12531 - DNA, 30 bp, Homo sapiens
  source 1..30: mol_type = unassigned DNA
atacaaggtcagtttgtggattgtaatccc

SEQ ID NO: 12532 - DNA, 30 bp, Homo sapiens
  source 1..30: mol_type = unassigned DNA
gggattacaatccacaaactgaccttgtat

SEQ ID NO: 12533 - RNA, 28 nt, Homo sapiens
  source 1..28: mol_type = unassigned RNA
atacaaaatcaatctgaacacaattcat

SEQ ID NO: 12534 - DNA, 28 bp, Homo sapiens
  source 1..28: mol_type = unassigned DNA
atacaaaatcaatctgaacacaattcat

SEQ ID NO: 12535 - DNA, 28 bp, Homo sapiens
  source 1..28: mol_type = unassigned DNA
atgaattgtgttcagattgattttgtat

SEQ ID NO: 12536 - RNA, 24 nt, Homo sapiens
  source 1..24: mol_type = unassigned RNA
gctcctccttctcttctgcttgtg

SEQ ID NO: 12537 - DNA, 24 bp, Homo sapiens
  source 1..24: mol_type = unassigned DNA
gctcctccttctcttctgcttgtg

SEQ ID NO: 12538 - DNA, 24 bp, Homo sapiens
  source 1..24: mol_type = unassigned DNA
cacaagcagaagagaaggaggagc

SEQ ID NO: 12539 - RNA, 33 nt, Homo sapiens
  source 1..33: mol_type = unassigned RNA
gaggatggatcggaggtcccgggctcagcagtg

SEQ ID NO: 12540 - DNA, 33 bp, Homo sapiens
  source 1..33: mol_type = unassigned DNA
gaggatggatcggaggtcccgggctcagcagtg

SEQ ID NO: 12541 - DNA, 33 bp, Homo sapiens
  source 1..33: mol_type = unassigned DNA
cactgctgagcccgggacctccgatccatcctc

SEQ ID NO: 12542 - RNA, 31 nt, Homo sapiens
  source 1..31: mol_type = unassigned RNA
catgaaaaagtgtcttgagttgtggacccat

SEQ ID NO: 12543 - DNA, 31 bp, Homo sapiens
  source 1..31: mol_type = unassigned DNA
catgaaaaagtgtcttgagttgtggacccat

SEQ ID NO: 12544 - DNA, 31 bp, Homo sapiens
  source 1..31: mol_type = unassigned DNA
atgggtccacaactcaagacactttttcatg

SEQ ID NO: 12545 - RNA, 29 nt, Homo sapiens
  source 1..29: mol_type = unassigned RNA
ctctagggctgcttttaactctggcaaag

SEQ ID NO: 12546 - DNA, 29 bp, Homo sapiens
  source 1..29: mol_type = unassigned DNA
ctctagggctgcttttaactctggcaaag

SEQ ID NO: 12547 - DNA, 29 bp, Homo sapiens
  source 1..29: mol_type = unassigned DNA
ctttgccagagttaaaagcagccctagag

SEQ ID NO: 12548 - RNA, 137 nt, Homo sapiens
  source 1..137: mol_type = unassigned RNA
caactgggcttggggtggaggaggaagggcgggtttgacgccctgaaacaggaaggttgtgtcaaaattagcaaaatccctgagcggggcagagagctggcagggcttcaattcactcgtcccgtcttcattcattc

SEQ ID NO: 12549 - DNA, 137 bp, Homo sapiens
  source 1..137: mol_type = unassigned DNA
caactgggcttggggtggaggaggaagggcgggtttgacgccctgaaacaggaaggttgtgtcaaaattagcaaaatccctgagcggggcagagagctggcagggcttcaattcactcgtcccgtcttcattcattc

SEQ ID NO: 12550 - DNA, 137 bp, Homo sapiens
  source 1..137: mol_type = unassigned DNA
gaatgaatgaagacgggacgagtgaattgaagccctgccagctctctgccccgctcagggattttgctaattttgacacaaccttcctgtttcagggcgtcaaacccgcccttcctcctccaccccaagcccagttg

SEQ ID NO: 12551 - RNA, 59 nt, Homo sapiens
  source 1..59: mol_type = unassigned RNA
caacaacacagccaatgggctgtatgtttagtcgaatcgctatgtctgcttgactgtaa

SEQ ID NO: 12552 - DNA, 59 bp, Homo sapiens
  source 1..59: mol_type = unassigned DNA
caacaacacagccaatgggctgtatgtttagtcgaatcgctatgtctgcttgactgtaa

SEQ ID NO: 12553 - DNA, 59 bp, Homo sapiens
  source 1..59: mol_type = unassigned DNA
ttacagtcaagcagacatagcgattcgactaaacatacagcccattggctgtgttgttg

SEQ ID NO: 12554 - RNA, 40 nt, Homo sapiens
  source 1..40: mol_type = unassigned RNA
ttgcactgcatggtacttcctctgacacctcattggctac

SEQ ID NO: 12555 - DNA, 40 bp, Homo sapiens
  source 1..40: mol_type = unassigned DNA
ttgcactgcatggtacttcctctgacacctcattggctac

SEQ ID NO: 12556 - DNA, 40 bp, Homo sapiens
  source 1..40: mol_type = unassigned DNA
gtagccaatgaggtgtcagaggaagtaccatgcagtgcaa

SEQ ID NO: 12557 - RNA, 30 nt, Homo sapiens
  source 1..30: mol_type = unassigned RNA
cctggctgtgaggtttctggggaggcagag

SEQ ID NO: 12558 - DNA, 30 bp, Homo sapiens
  source 1..30: mol_type = unassigned DNA
cctggctgtgaggtttctggggaggcagag

SEQ ID NO: 12559 - DNA, 30 bp, Homo sapiens
  source 1..30: mol_type = unassigned DNA
ctctgcctccccagaaacctcacagccagg

SEQ ID NO: 12560 - RNA, 39 nt, Homo sapiens
  source 1..39: mol_type = unassigned RNA
agatctcttcccagagaagtcagctccactgtcgtatgc

SEQ ID NO: 12561 - DNA, 39 bp, Homo sapiens
  source 1..39: mol_type = unassigned DNA
agatctcttcccagagaagtcagctccactgtcgtatgc

SEQ ID NO: 12562 - DNA, 39 bp, Homo sapiens
  source 1..39: mol_type = unassigned DNA
gcatacgacagtggagctgacttctctgggaagagatct

SEQ ID NO: 12563 - RNA, 30 nt, Homo sapiens
  source 1..30: mol_type = unassigned RNA
tcacaagatacgtgtgtacccaacaatctc

SEQ ID NO: 12564 - DNA, 30 bp, Homo sapiens
  source 1..30: mol_type = unassigned DNA
tcacaagatacgtgtgtacccaacaatctc

SEQ ID NO: 12565 - DNA, 30 bp, Homo sapiens
  source 1..30: mol_type = unassigned DNA
gagattgttgggtacacacgtatcttgtga

SEQ ID NO: 12566 - RNA, 184 nt, Homo sapiens
  source 1..184: mol_type = unassigned RNA
taaggggggaggtaatatgcttgtatgttacattgacattgctctgcatgtctctactgggagatatttggatttcaatgatagcttgactggttggacattgcatcaaatacacgccccatgtatcctttctgtcgtaaagttaagaacgctcttgcatttgatgtggaataaatatagatga

SEQ ID NO: 12567 - DNA, 184 bp, Homo sapiens
  source 1..184: mol_type = unassigned DNA
taaggggggaggtaatatgcttgtatgttacattgacattgctctgcatgtctctactgggagatatttggatttcaatgatagcttgactggttggacattgcatcaaatacacgccccatgtatcctttctgtcgtaaagttaagaacgctcttgcatttgatgtggaataaatatagatga

SEQ ID NO: 12568 - DNA, 184 bp, Homo sapiens
  source 1..184: mol_type = unassigned DNA
tcatctatatttattccacatcaaatgcaagagcgttcttaactttacgacagaaaggatacatggggcgtgtatttgatgcaatgtccaaccagtcaagctatcattgaaatccaaatatctcccagtagagacatgcagagcaatgtcaatgtaacatacaagcatattacctcccccctta

SEQ ID NO: 12569 - RNA, 27 nt, Homo sapiens
  source 1..27: mol_type = unassigned RNA
cactgtgtggtcctgctccctagagaa

SEQ ID NO: 12570 - DNA, 27 bp, Homo sapiens
  source 1..27: mol_type = unassigned DNA
cactgtgtggtcctgctccctagagaa

SEQ ID NO: 12571 - DNA, 27 bp, Homo sapiens
  source 1..27: mol_type = unassigned DNA
ttctctagggagcaggaccacacagtg

SEQ ID NO: 12572 - RNA, 29 nt, Homo sapiens
  source 1..29: mol_type = unassigned RNA
atcacctgtggcctctgagaccgccccat

SEQ ID NO: 12573 - DNA, 29 bp, Homo sapiens
  source 1..29: mol_type = unassigned DNA
atcacctgtggcctctgagaccgccccat

SEQ ID NO: 12574 - DNA, 29 bp, Homo sapiens
  source 1..29: mol_type = unassigned DNA
atggggcggtctcagaggccacaggtgat

SEQ ID NO: 12575 - RNA, 102 nt, Homo sapiens
  source 1..102: mol_type = unassigned RNA
ttaacagataaaaagtgcttagaactgtgcctgacacatcatagtgatgttgactgttgaagtagccacctagctgactgacctctgtagctgttcctcttc

SEQ ID NO: 12576 - DNA, 102 bp, Homo sapiens
  source 1..102: mol_type = unassigned DNA
ttaacagataaaaagtgcttagaactgtgcctgacacatcatagtgatgttgactgttgaagtagccacctagctgactgacctctgtagctgttcctcttc

SEQ ID NO: 12577 - DNA, 102 bp, Homo sapiens
  source 1..102: mol_type = unassigned DNA
gaagaggaacagctacagaggtcagtcagctaggtggctacttcaacagtcaacatcactatgatgtgtcaggcacagttctaagcactttttatctgttaa

SEQ ID NO: 12578 - RNA, 33 nt, Homo sapiens
  source 1..33: mol_type = unassigned RNA
gctcttgactgataacagctctgtcaatatttt

SEQ ID NO: 12579 - DNA, 33 bp, Homo sapiens
  source 1..33: mol_type = unassigned DNA
gctcttgactgataacagctctgtcaatatttt

SEQ ID NO: 12580 - DNA, 33 bp, Homo sapiens
  source 1..33: mol_type = unassigned DNA
aaaatattgacagagctgttatcagtcaagagc

SEQ ID NO: 12581 - RNA, 90 nt, Homo sapiens
  source 1..90: mol_type = unassigned RNA
atcctctgtgtgggttatctgtagaaaactgccaatctctgacagccgacatagtcccagctcccatgaagaatatccatcagtctgaaa

SEQ ID NO: 12582 - DNA, 90 bp, Homo sapiens
  source 1..90: mol_type = unassigned DNA
atcctctgtgtgggttatctgtagaaaactgccaatctctgacagccgacatagtcccagctcccatgaagaatatccatcagtctgaaa

SEQ ID NO: 12583 - DNA, 90 bp, Homo sapiens
  source 1..90: mol_type = unassigned DNA
tttcagactgatggatattcttcatgggagctgggactatgtcggctgtcagagattggcagttttctacagataacccacacagaggat

SEQ ID NO: 12584 - RNA, 31 nt, Homo sapiens
  source 1..31: mol_type = unassigned RNA
ttctgcttacccagctgggactgctgactgc

SEQ ID NO: 12585 - DNA, 31 bp, Homo sapiens
  source 1..31: mol_type = unassigned DNA
ttctgcttacccagctgggactgctgactgc

SEQ ID NO: 12586 - DNA, 31 bp, Homo sapiens
  source 1..31: mol_type = unassigned DNA
gcagtcagcagtcccagctgggtaagcagaa

SEQ ID NO: 12587 - RNA, 31 nt, Homo sapiens
  source 1..31: mol_type = unassigned RNA
gttgctttgctggccagtctgcaggatggag

SEQ ID NO: 12588 - DNA, 31 bp, Homo sapiens
  source 1..31: mol_type = unassigned DNA
gttgctttgctggccagtctgcaggatggag

SEQ ID NO: 12589 - DNA, 31 bp, Homo sapiens
  source 1..31: mol_type = unassigned DNA
ctccatcctgcagactggccagcaaagcaac

SEQ ID NO: 12590 - RNA, 23 nt, Homo sapiens
  source 1..23: mol_type = unassigned RNA
ttcaaacatctatgcaaaactgg

SEQ ID NO: 12591 - DNA, 23 bp, Homo sapiens
  source 1..23: mol_type = unassigned DNA
ttcaaacatctatgcaaaactgg

SEQ ID NO: 12592 - DNA, 23 bp, Homo sapiens
  source 1..23: mol_type = unassigned DNA
ccagttttgcatagatgtttgaa

SEQ ID NO: 12593 - RNA, 44 nt, Homo sapiens
  source 1..44: mol_type = unassigned RNA
cagtagagggaatgattagatctggactgagcaatgctttggat

SEQ ID NO: 12594 - DNA, 44 bp, Homo sapiens
  source 1..44: mol_type = unassigned DNA
cagtagagggaatgattagatctggactgagcaatgctttggat

SEQ ID NO: 12595 - DNA, 44 bp, Homo sapiens
  source 1..44: mol_type = unassigned DNA
atccaaagcattgctcagtccagatctaatcattccctctactg

SEQ ID NO: 12596 - RNA, 81 nt, Homo sapiens
  source 1..81: mol_type = unassigned RNA
cttaagacgtttcagatccttaattccaggccaaccagtttgaagagccccacagaggaagtgaaccagcatgagaataca

SEQ ID NO: 12597 - DNA, 81 bp, Homo sapiens
  source 1..81: mol_type = unassigned DNA
cttaagacgtttcagatccttaattccaggccaaccagtttgaagagccccacagaggaagtgaaccagcatgagaataca

SEQ ID NO: 12598 - DNA, 81 bp, Homo sapiens
  source 1..81: mol_type = unassigned DNA
tgtattctcatgctggttcacttcctctgtggggctcttcaaactggttggcctggaattaaggatctgaaacgtcttaag

SEQ ID NO: 12599 - RNA, 57 nt, Homo sapiens
  source 1..57: mol_type = unassigned RNA
gttcaagagattctcctgcctcagcctccattacaggcgtgcaccaccatgctcggc

SEQ ID NO: 12600 - DNA, 57 bp, Homo sapiens
  source 1..57: mol_type = unassigned DNA
gttcaagagattctcctgcctcagcctccattacaggcgtgcaccaccatgctcggc

SEQ ID NO: 12601 - DNA, 57 bp, Homo sapiens
  source 1..57: mol_type = unassigned DNA
gccgagcatggtggtgcacgcctgtaatggaggctgaggcaggagaatctcttgaac

SEQ ID NO: 12602 - RNA, 98 nt, Homo sapiens
  source 1..98: mol_type = unassigned RNA
acaacctgcttgggtggagaagccattgtcttcagaaaccttggtgtaattgaattgatagttactgttgtgacctgaagttcaccattaaaagggac

SEQ ID NO: 12603 - DNA, 98 bp, Homo sapiens
  source 1..98: mol_type = unassigned DNA
acaacctgcttgggtggagaagccattgtcttcagaaaccttggtgtaattgaattgatagttactgttgtgacctgaagttcaccattaaaagggac

SEQ ID NO: 12604 - DNA, 98 bp, Homo sapiens
  source 1..98: mol_type = unassigned DNA
gtcccttttaatggtgaacttcaggtcacaacagtaactatcaattcaattacaccaaggtttctgaagacaatggcttctccacccaagcaggttgt

SEQ ID NO: 12605 - RNA, 29 nt, Homo sapiens
  source 1..29: mol_type = unassigned RNA
agcatctagaacgacaaccttagcacgtc

SEQ ID NO: 12606 - DNA, 29 bp, Homo sapiens
  source 1..29: mol_type = unassigned DNA
agcatctagaacgacaaccttagcacgtc

SEQ ID NO: 12607 - DNA, 29 bp, Homo sapiens
  source 1..29: mol_type = unassigned DNA
gacgtgctaaggttgtcgttctagatgct

SEQ ID NO: 12608 - RNA, 55 nt, Homo sapiens
  source 1..55: mol_type = unassigned RNA
cacccaagtaacaaaaggatcagaggctactccctttgcactgcatggtagatga

SEQ ID NO: 12609 - DNA, 55 bp, Homo sapiens
  source 1..55: mol_type = unassigned DNA
cacccaagtaacaaaaggatcagaggctactccctttgcactgcatggtagatga

SEQ ID NO: 12610 - DNA, 55 bp, Homo sapiens
  source 1..55: mol_type = unassigned DNA
tcatctaccatgcagtgcaaagggagtagcctctgatccttttgttacttgggtg

SEQ ID NO: 12611 - RNA, 32 nt, Homo sapiens
  source 1..32: mol_type = unassigned RNA
cttccccccagtcagtattaccctgtgaagcc

SEQ ID NO: 12612 - DNA, 32 bp, Homo sapiens
  source 1..32: mol_type = unassigned DNA
cttccccccagtcagtattaccctgtgaagcc

SEQ ID NO: 12613 - DNA, 32 bp, Homo sapiens
  source 1..32: mol_type = unassigned DNA
ggcttcacagggtaatactgactggggggaag

SEQ ID NO: 12614 - RNA, 106 nt, Homo sapiens
  source 1..106: mol_type = unassigned RNA
ctggcctcatattctgtatacacagtccctgaacagggtttctgactgtgtaagtaaagaatatcactttttgacaagtgcagacgccccaggtttatcttgggcc

SEQ ID NO: 12615 - DNA, 106 bp, Homo sapiens
  source 1..106: mol_type = unassigned DNA
ctggcctcatattctgtatacacagtccctgaacagggtttctgactgtgtaagtaaagaatatcactttttgacaagtgcagacgccccaggtttatcttgggcc

SEQ ID NO: 12616 - DNA, 106 bp, Homo sapiens
  source 1..106: mol_type = unassigned DNA
ggcccaagataaacctggggcgtctgcacttgtcaaaaagtgatattctttacttacacagtcagaaaccctgttcagggactgtgtatacagaatatgaggccag

SEQ ID NO: 12617 - RNA, 139 nt, Homo sapiens
  source 1..139: mol_type = unassigned RNA
caaacaaaaacgaaatgggcattcacttgaaggaattatttgaactcgtatgctatttttctgtctgtggaaaaagagaagtctttgaatttacctggttttcagagcacagttaatttctcctttaggggagaagact

SEQ ID NO: 12618 - DNA, 139 bp, Homo sapiens
  source 1..139: mol_type = unassigned DNA
caaacaaaaacgaaatgggcattcacttgaaggaattatttgaactcgtatgctatttttctgtctgtggaaaaagagaagtctttgaatttacctggttttcagagcacagttaatttctcctttaggggagaagact

SEQ ID NO: 12619 - DNA, 139 bp, Homo sapiens
  source 1..139: mol_type = unassigned DNA
agtcttctcccctaaaggagaaattaactgtgctctgaaaaccaggtaaattcaaagacttctctttttccacagacagaaaaatagcatacgagttcaaataattccttcaagtgaatgcccatttcgtttttgtttg

SEQ ID NO: 12620 - RNA, 34 nt, Homo sapiens
  source 1..34: mol_type = unassigned RNA
ttcatttcctaacgttttcaggattgcagagatt

SEQ ID NO: 12621 - DNA, 34 bp, Homo sapiens
  source 1..34: mol_type = unassigned DNA
ttcatttcctaacgttttcaggattgcagagatt

SEQ ID NO: 12622 - DNA, 34 bp, Homo sapiens
  source 1..34: mol_type = unassigned DNA
aatctctgcaatcctgaaaacgttaggaaatgaa

SEQ ID NO: 12623 - RNA, 28 nt, Homo sapiens
  source 1..28: mol_type = unassigned RNA
aagttaaagcttatcagactgtcaaaag

SEQ ID NO: 12624 - DNA, 28 bp, Homo sapiens
  source 1..28: mol_type = unassigned DNA
aagttaaagcttatcagactgtcaaaag

SEQ ID NO: 12625 - DNA, 28 bp, Homo sapiens
  source 1..28: mol_type = unassigned DNA
cttttgacagtctgataagctttaactt

SEQ ID NO: 12626 - RNA, 116 nt, Homo sapiens
  source 1..116: mol_type = unassigned RNA
atgtagggtgtaatctgtaagtcagcttttgaaatggggtgccctctactttgaatatctcgatactgtactaataaagtaacagaactctcctatgccagaaatatagaaatttt

SEQ ID NO: 12627 - DNA, 116 bp, Homo sapiens
  source 1..116: mol_type = unassigned DNA
atgtagggtgtaatctgtaagtcagcttttgaaatggggtgccctctactttgaatatctcgatactgtactaataaagtaacagaactctcctatgccagaaatatagaaatttt

SEQ ID NO: 12628 - DNA, 116 bp, Homo sapiens
  source 1..116: mol_type = unassigned DNA
aaaatttctatatttctggcataggagagttctgttactttattagtacagtatcgagatattcaaagtagagggcaccccatttcaaaagctgacttacagattacaccctacat

SEQ ID NO: 12629 - RNA, 31 nt, Homo sapiens
  source 1..31: mol_type = unassigned RNA
gaaatcttcttgaacagattgtcctgccttt

SEQ ID NO: 12630 - DNA, 31 bp, Homo sapiens
  source 1..31: mol_type = unassigned DNA
gaaatcttcttgaacagattgtcctgccttt

SEQ ID NO: 12631 - DNA, 31 bp, Homo sapiens
  source 1..31: mol_type = unassigned DNA
aaaggcaggacaatctgttcaagaagatttc

SEQ ID NO: 12632 - RNA, 37 nt, Homo sapiens
  source 1..37: mol_type = unassigned RNA
ataactctgggattcccaaattgactcttcgtaggcg

SEQ ID NO: 12633 - DNA, 37 bp, Homo sapiens
  source 1..37: mol_type = unassigned DNA
ataactctgggattcccaaattgactcttcgtaggcg

SEQ ID NO: 12634 - DNA, 37 bp, Homo sapiens
  source 1..37: mol_type = unassigned DNA
cgcctacgaagagtcaatttgggaatcccagagttat

SEQ ID NO: 12635 - RNA, 53 nt, Homo sapiens
  source 1..53: mol_type = unassigned RNA
cttcagatgatgaaactgagctgtgacagcggaaagtgcatttaactggtccc

SEQ ID NO: 12636 - DNA, 53 bp, Homo sapiens
  source 1..53: mol_type = unassigned DNA
cttcagatgatgaaactgagctgtgacagcggaaagtgcatttaactggtccc

SEQ ID NO: 12637 - DNA, 53 bp, Homo sapiens
  source 1..53: mol_type = unassigned DNA
gggaccagttaaatgcactttccgctgtcacagctcagtttcatcatctgaag

SEQ ID NO: 12638 - RNA, 179 nt, Homo sapiens
  source 1..179: mol_type = unassigned RNA
agtttgaatgattacagatcttaactgatgatcaccaagcaatttttctgttttcatttagacttggattctcacttgcatttatcttcagctgctcctatttaatcctctcgtcaaaactgaagggatctgcaggaatcgtgtgactaataatgtaaaagacgtcactaaattggtaa

SEQ ID NO: 12639 - DNA, 179 bp, Homo sapiens
  source 1..179: mol_type = unassigned DNA
agtttgaatgattacagatcttaactgatgatcaccaagcaatttttctgttttcatttagacttggattctcacttgcatttatcttcagctgctcctatttaatcctctcgtcaaaactgaagggatctgcaggaatcgtgtgactaataatgtaaaagacgtcactaaattggtaa

SEQ ID NO: 12640 - DNA, 179 bp, Homo sapiens
  source 1..179: mol_type = unassigned DNA
ttaccaatttagtgacgtcttttacattattagtcacacgattcctgcagatcccttcagttttgacgagaggattaaataggagcagctgaagataaatgcaagtgagaatccaagtctaaatgaaaacagaaaaattgcttggtgatcatcagttaagatctgtaatcattcaaact

SEQ ID NO: 12641 - RNA, 33 nt, Homo sapiens
  source 1..33: mol_type = unassigned RNA
ttcattgtggagttgttgagactatgaaagact

SEQ ID NO: 12642 - DNA, 33 bp, Homo sapiens
  source 1..33: mol_type = unassigned DNA
ttcattgtggagttgttgagactatgaaagact

SEQ ID NO: 12643 - DNA, 33 bp, Homo sapiens
  source 1..33: mol_type = unassigned DNA
agtctttcatagtctcaacaactccacaatgaa

SEQ ID NO: 12644 - RNA, 190 nt, Homo sapiens
  source 1..190: mol_type = unassigned RNA
ctcaagggtgagcctgttcagttaccagggcattcccctctcggactcccagccagccctaggacctgcacgtaggtaagagtaggaggtgggtatgagggccaggaggaagcccagagagggggcactccagggtatagtggcaactcagtcgactatagatacgtgctcacaagttcaggtagctagg

SEQ ID NO: 12645 - DNA, 190 bp, Homo sapiens
  source 1..190: mol_type = unassigned DNA
ctcaagggtgagcctgttcagttaccagggcattcccctctcggactcccagccagccctaggacctgcacgtaggtaagagtaggaggtgggtatgagggccaggaggaagcccagagagggggcactccagggtatagtggcaactcagtcgactatagatacgtgctcacaagttcaggtagctagg

SEQ ID NO: 12646 - DNA, 190 bp, Homo sapiens
  source 1..190: mol_type = unassigned DNA
cctagctacctgaacttgtgagcacgtatctatagtcgactgagttgccactataccctggagtgccccctctctgggcttcctcctggccctcatacccacctcctactcttacctacgtgcaggtcctagggctggctgggagtccgagaggggaatgccctggtaactgaacaggctcacccttgag

SEQ ID NO: 12647 - RNA, 89 nt, Homo sapiens
  source 1..89: mol_type = unassigned RNA
ggggaaagctcagtctgaggaacaggcaggttcccacattaccaagtatcttccatcaccatggtggggcaacactgtcctggactaga

SEQ ID NO: 12648 - DNA, 89 bp, Homo sapiens
  source 1..89: mol_type = unassigned DNA
ggggaaagctcagtctgaggaacaggcaggttcccacattaccaagtatcttccatcaccatggtggggcaacactgtcctggactaga

SEQ ID NO: 12649 - DNA, 89 bp, Homo sapiens
  source 1..89: mol_type = unassigned DNA
tctagtccaggacagtgttgccccaccatggtgatggaagatacttggtaatgtgggaacctgcctgttcctcagactgagctttcccc

SEQ ID NO: 12650 - RNA, 75 nt, Homo sapiens
  source 1..75: mol_type = unassigned RNA
atgattcatgccctagctctggcactcattagctctgtggcttctgcattgtctggacctgagcctcggtttcct

SEQ ID NO: 12651 - DNA, 75 bp, Homo sapiens
  source 1..75: mol_type = unassigned DNA
atgattcatgccctagctctggcactcattagctctgtggcttctgcattgtctggacctgagcctcggtttcct

SEQ ID NO: 12652 - DNA, 75 bp, Homo sapiens
  source 1..75: mol_type = unassigned DNA
aggaaaccgaggctcaggtccagacaatgcagaagccacagagctaatgagtgccagagctagggcatgaatcat

SEQ ID NO: 12653 - RNA, 27 nt, Homo sapiens
  source 1..27: mol_type = unassigned RNA
gggcctctccttattagggcagctccc

SEQ ID NO: 12654 - DNA, 27 bp, Homo sapiens
  source 1..27: mol_type = unassigned DNA
gggcctctccttattagggcagctccc

SEQ ID NO: 12655 - DNA, 27 bp, Homo sapiens
  source 1..27: mol_type = unassigned DNA
gggagctgccctaataaggagaggccc

SEQ ID NO: 12656 - RNA, 175 nt, Homo sapiens
  source 1..175: mol_type = unassigned RNA
agggacgatctacacgcagtgttaggagggggcacggagtccacagatcatgggaagaactccatgaatggcctgtgacttgaagcagaagcagacactttccagacaggaaaagaggtgaggagaggcaagggtggtaaagcgccgtatttttggtgaactggccaaaggctgg

SEQ ID NO: 12657 - DNA, 175 bp, Homo sapiens
  source 1..175: mol_type = unassigned DNA
agggacgatctacacgcagtgttaggagggggcacggagtccacagatcatgggaagaactccatgaatggcctgtgacttgaagcagaagcagacactttccagacaggaaaagaggtgaggagaggcaagggtggtaaagcgccgtatttttggtgaactggccaaaggctgg

SEQ ID NO: 12658 - DNA, 175 bp, Homo sapiens
  source 1..175: mol_type = unassigned DNA
ccagcctttggccagttcaccaaaaatacggcgctttaccacccttgcctctcctcacctcttttcctgtctggaaagtgtctgcttctgcttcaagtcacaggccattcatggagttcttcccatgatctgtggactccgtgccccctcctaacactgcgtgtagatcgtccct

SEQ ID NO: 12659 - RNA, 49 nt, Homo sapiens
  source 1..49: mol_type = unassigned RNA
catgacaactcacggattagcttttcagccagaaggacccaaaagcaat

SEQ ID NO: 12660 - DNA, 49 bp, Homo sapiens
  source 1..49: mol_type = unassigned DNA
catgacaactcacggattagcttttcagccagaaggacccaaaagcaat

SEQ ID NO: 12661 - DNA, 49 bp, Homo sapiens
  source 1..49: mol_type = unassigned DNA
attgcttttgggtccttctggctgaaaagctaatccgtgagttgtcatg

SEQ ID NO: 12662 - RNA, 60 nt, Homo sapiens
  source 1..60: mol_type = unassigned RNA
actctcggttctgggtctgggaaaatgactgcagctttttccattatctttcttcacagc

SEQ ID NO: 12663 - DNA, 60 bp, Homo sapiens
  source 1..60: mol_type = unassigned DNA
actctcggttctgggtctgggaaaatgactgcagctttttccattatctttcttcacagc

SEQ ID NO: 12664 - DNA, 60 bp, Homo sapiens
  source 1..60: mol_type = unassigned DNA
gctgtgaagaaagataatggaaaaagctgcagtcattttcccagacccagaaccgagagt

SEQ ID NO: 12665 - RNA, 28 nt, Homo sapiens
  source 1..28: mol_type = unassigned RNA
tctctgtttacttagatctctgccaact

SEQ ID NO: 12666 - DNA, 28 bp, Homo sapiens
  source 1..28: mol_type = unassigned DNA
tctctgtttacttagatctctgccaact

SEQ ID NO: 12667 - DNA, 28 bp, Homo sapiens
  source 1..28: mol_type = unassigned DNA
agttggcagagatctaagtaaacagaga

SEQ ID NO: 12668 - RNA, 27 nt, Homo sapiens
  source 1..27: mol_type = unassigned RNA
cctagccatcctctgaaaacagtatga

SEQ ID NO: 12669 - DNA, 27 bp, Homo sapiens
  source 1..27: mol_type = unassigned DNA
cctagccatcctctgaaaacagtatga

SEQ ID NO: 12670 - DNA, 27 bp, Homo sapiens
  source 1..27: mol_type = unassigned DNA
tcatactgttttcagaggatggctagg

SEQ ID NO: 12671 - RNA, 130 nt, Homo sapiens
  source 1..130: mol_type = unassigned RNA
aaaaaatagtgacagatactttagccagatctggactttcatttaggatgtcgtaaatgctcatggtacagttgacaaataagactcttcttatttgtcaggcttcgccaggtacaagttttctagggaa

SEQ ID NO: 12672 - DNA, 130 bp, Homo sapiens
  source 1..130: mol_type = unassigned DNA
aaaaaatagtgacagatactttagccagatctggactttcatttaggatgtcgtaaatgctcatggtacagttgacaaataagactcttcttatttgtcaggcttcgccaggtacaagttttctagggaa

SEQ ID NO: 12673 - DNA, 130 bp, Homo sapiens
  source 1..130: mol_type = unassigned DNA
ttccctagaaaacttgtacctggcgaagcctgacaaataagaagagtcttatttgtcaactgtaccatgagcatttacgacatcctaaatgaaagtccagatctggctaaagtatctgtcactatttttt

SEQ ID NO: 12674 - RNA, 120 nt, Homo sapiens
  source 1..120: mol_type = unassigned RNA
ttctcttgcattgccagccgcatccctgagacatcatggtgaaggtgaaggccagagtcgacagatttggtcatgttaggtgtctggtcaccagggctgcttttaactctgctaaagtag

SEQ ID NO: 12675 - DNA, 120 bp, Homo sapiens
  source 1..120: mol_type = unassigned DNA
ttctcttgcattgccagccgcatccctgagacatcatggtgaaggtgaaggccagagtcgacagatttggtcatgttaggtgtctggtcaccagggctgcttttaactctgctaaagtag

SEQ ID NO: 12676 - DNA, 120 bp, Homo sapiens
  source 1..120: mol_type = unassigned DNA
ctactttagcagagttaaaagcagccctggtgaccagacacctaacatgaccaaatctgtcgactctggccttcaccttcaccatgatgtctcagggatgcggctggcaatgcaagagaa

SEQ ID NO: 12677 - RNA, 35 nt, Homo sapiens
  source 1..35: mol_type = unassigned RNA
gagtcagaaggtgtgggaaccaggagcattgatgt

SEQ ID NO: 12678 - DNA, 35 bp, Homo sapiens
  source 1..35: mol_type = unassigned DNA
gagtcagaaggtgtgggaaccaggagcattgatgt

SEQ ID NO: 12679 - DNA, 35 bp, Homo sapiens
  source 1..35: mol_type = unassigned DNA
acatcaatgctcctggttcccacaccttctgactc

SEQ ID NO: 12680 - RNA, 29 nt, Homo sapiens
  source 1..29: mol_type = unassigned RNA
tgtggctgcatcagggctcaacacgatgc

SEQ ID NO: 12681 - DNA, 29 bp, Homo sapiens
  source 1..29: mol_type = unassigned DNA
tgtggctgcatcagggctcaacacgatgc

SEQ ID NO: 12682 - DNA, 29 bp, Homo sapiens
  source 1..29: mol_type = unassigned DNA
gcatcgtgttgagccctgatgcagccaca

SEQ ID NO: 12683 - RNA, 28 nt, Homo sapiens
  source 1..28: mol_type = unassigned RNA
atttaatgccgatatactctagatgaag

SEQ ID NO: 12684 - DNA, 28 bp, Homo sapiens
  source 1..28: mol_type = unassigned DNA
atttaatgccgatatactctagatgaag

SEQ ID NO: 12685 - DNA, 28 bp, Homo sapiens
  source 1..28: mol_type = unassigned DNA
cttcatctagagtatatcggcattaaat

SEQ ID NO: 12686 - RNA, 167 nt, Homo sapiens
  source 1..167: mol_type = unassigned RNA
gctgctgtttcagtacttgtcagcaaaaatcaaaccaccagggctccctgtttttacctccctctgagtcatttcctctccaattctctcctttaaatattattgcttcagtctccagttagtttcctctgtatattagttgagtgcttctgcttgaaaacaaaagt

SEQ ID NO: 12687 - DNA, 167 bp, Homo sapiens
  source 1..167: mol_type = unassigned DNA
gctgctgtttcagtacttgtcagcaaaaatcaaaccaccagggctccctgtttttacctccctctgagtcatttcctctccaattctctcctttaaatattattgcttcagtctccagttagtttcctctgtatattagttgagtgcttctgcttgaaaacaaaagt

SEQ ID NO: 12688 - DNA, 167 bp, Homo sapiens
  source 1..167: mol_type = unassigned DNA
acttttgttttcaagcagaagcactcaactaatatacagaggaaactaactggagactgaagcaataatatttaaaggagagaattggagaggaaatgactcagagggaggtaaaaacagggagccctggtggtttgatttttgctgacaagtactgaaacagcagc

SEQ ID NO: 12689 - RNA, 80 nt, Homo sapiens
  source 1..80: mol_type = unassigned RNA
ccaggggatggtagaggttgtaacccaggttgtccaggctgcgtgggataatggagtccctccacaggttacgaaggtcc

SEQ ID NO: 12690 - DNA, 80 bp, Homo sapiens
  source 1..80: mol_type = unassigned DNA
ccaggggatggtagaggttgtaacccaggttgtccaggctgcgtgggataatggagtccctccacaggttacgaaggtcc

SEQ ID NO: 12691 - DNA, 80 bp, Homo sapiens
  source 1..80: mol_type = unassigned DNA
ggaccttcgtaacctgtggagggactccattatcccacgcagcctggacaacctgggttacaacctctaccatcccctgg

SEQ ID NO: 12692 - RNA, 39 nt, Homo sapiens
  source 1..39: mol_type = unassigned RNA
tcttgcattctgggcacctgaagactctgcaccacatgg

SEQ ID NO: 12693 - DNA, 39 bp, Homo sapiens
  source 1..39: mol_type = unassigned DNA
tcttgcattctgggcacctgaagactctgcaccacatgg

SEQ ID NO: 12694 - DNA, 39 bp, Homo sapiens
  source 1..39: mol_type = unassigned DNA
ccatgtggtgcagagtcttcaggtgcccagaatgcaaga

SEQ ID NO: 12695 - RNA, 78 nt, Homo sapiens
  source 1..78: mol_type = unassigned RNA
cctctctgcatcaacagtgtcacaagaagccactgtctgccatctgtatctattctgcctgttgcaggattcaatgct

SEQ ID NO: 12696 - DNA, 78 bp, Homo sapiens
  source 1..78: mol_type = unassigned DNA
cctctctgcatcaacagtgtcacaagaagccactgtctgccatctgtatctattctgcctgttgcaggattcaatgct

SEQ ID NO: 12697 - DNA, 78 bp, Homo sapiens
  source 1..78: mol_type = unassigned DNA
agcattgaatcctgcaacaggcagaatagatacagatggcagacagtggcttcttgtgacactgttgatgcagagagg

SEQ ID NO: 12698 - RNA, 99 nt, Homo sapiens
  source 1..99: mol_type = unassigned RNA
ttctggcaaatgaacatggatgtgggtcttctagtcttctgcttgtgagctgtaggcctagctgctagacttcttagatgaacccaggagggttctttt

SEQ ID NO: 12699 - DNA, 99 bp, Homo sapiens
  source 1..99: mol_type = unassigned DNA
ttctggcaaatgaacatggatgtgggtcttctagtcttctgcttgtgagctgtaggcctagctgctagacttcttagatgaacccaggagggttctttt

SEQ ID NO: 12700 - DNA, 99 bp, Homo sapiens
  source 1..99: mol_type = unassigned DNA
aaaagaaccctcctgggttcatctaagaagtctagcagctaggcctacagctcacaagcagaagactagaagacccacatccatgttcatttgccagaa

SEQ ID NO: 12701 - RNA, 30 nt, Homo sapiens
  source 1..30: mol_type = unassigned RNA
ctcaaggtacaccagggctgataggccagc

SEQ ID NO: 12702 - DNA, 30 bp, Homo sapiens
  source 1..30: mol_type = unassigned DNA
ctcaaggtacaccagggctgataggccagc

SEQ ID NO: 12703 - DNA, 30 bp, Homo sapiens
  source 1..30: mol_type = unassigned DNA
gctggcctatcagccctggtgtaccttgag

SEQ ID NO: 12704 - RNA, 29 nt, Homo sapiens
  source 1..29: mol_type = unassigned RNA
actcacctccaggataaccgtgggcggcc

SEQ ID NO: 12705 - DNA, 29 bp, Homo sapiens
  source 1..29: mol_type = unassigned DNA
actcacctccaggataaccgtgggcggcc

SEQ ID NO: 12706 - DNA, 29 bp, Homo sapiens
  source 1..29: mol_type = unassigned DNA
ggccgcccacggttatcctggaggtgagt

SEQ ID NO: 12707 - RNA, 126 nt, Homo sapiens
  source 1..126: mol_type = unassigned RNA
ctctgggtaccctgagctgcccacacccaggagagaggtccagtctgaaagtgcccaggagccaggtgcaggcccgggaccccctgggtgagggctggggcaggggagggctgagggaccccgacc

SEQ ID NO: 12708 - DNA, 126 bp, Homo sapiens
  source 1..126: mol_type = unassigned DNA
ctctgggtaccctgagctgcccacacccaggagagaggtccagtctgaaagtgcccaggagccaggtgcaggcccgggaccccctgggtgagggctggggcaggggagggctgagggaccccgacc

SEQ ID NO: 12709 - DNA, 126 bp, Homo sapiens
  source 1..126: mol_type = unassigned DNA
ggtcggggtccctcagccctcccctgccccagccctcacccagggggtcccgggcctgcacctggctcctgggcactttcagactggacctctctcctgggtgtgggcagctcagggtacccagag

SEQ ID NO: 12710 - RNA, 33 nt, Homo sapiens
  source 1..33: mol_type = unassigned RNA
ccttgtgtgcttgcatgatcagaccctgtaata

SEQ ID NO: 12711 - DNA, 33 bp, Homo sapiens
  source 1..33: mol_type = unassigned DNA
ccttgtgtgcttgcatgatcagaccctgtaata

SEQ ID NO: 12712 - DNA, 33 bp, Homo sapiens
  source 1..33: mol_type = unassigned DNA
tattacagggtctgatcatgcaagcacacaagg

SEQ ID NO: 12713 - RNA, 31 nt, Homo sapiens
  source 1..31: mol_type = unassigned RNA
actgtactctggttatgtaagaggatgtcat

SEQ ID NO: 12714 - DNA, 31 bp, Homo sapiens
  source 1..31: mol_type = unassigned DNA
actgtactctggttatgtaagaggatgtcat

SEQ ID NO: 12715 - DNA, 31 bp, Homo sapiens
  source 1..31: mol_type = unassigned DNA
atgacatcctcttacataaccagagtacagt

SEQ ID NO: 12716 - RNA, 31 nt, Homo sapiens
  source 1..31: mol_type = unassigned RNA
ctgtgttcatttgaacccatttactgatctc

SEQ ID NO: 12717 - DNA, 31 bp, Homo sapiens
  source 1..31: mol_type = unassigned DNA
ctgtgttcatttgaacccatttactgatctc

SEQ ID NO: 12718 - DNA, 31 bp, Homo sapiens
  source 1..31: mol_type = unassigned DNA
gagatcagtaaatgggttcaaatgaacacag

SEQ ID NO: 12719 - RNA, 62 nt, Homo sapiens
  source 1..62: mol_type = unassigned RNA
gctctacagattacgtacttctgtgtcttcgtatgctcaacactgtcctttgtcctccatga

SEQ ID NO: 12720 - DNA, 62 bp, Homo sapiens
  source 1..62: mol_type = unassigned DNA
gctctacagattacgtacttctgtgtcttcgtatgctcaacactgtcctttgtcctccatga

SEQ ID NO: 12721 - DNA, 62 bp, Homo sapiens
  source 1..62: mol_type = unassigned DNA
tcatggaggacaaaggacagtgttgagcatacgaagacacagaagtacgtaatctgtagagc

SEQ ID NO: 12722 - RNA, 85 nt, Homo sapiens
  source 1..85: mol_type = unassigned RNA
ccatattctcatctacaaaataggagtaatatatatcctagagttgtataattctgttgacctcatgaacactaactcgtatgca

SEQ ID NO: 12723 - DNA, 85 bp, Homo sapiens
  source 1..85: mol_type = unassigned DNA
ccatattctcatctacaaaataggagtaatatatatcctagagttgtataattctgttgacctcatgaacactaactcgtatgca

SEQ ID NO: 12724 - DNA, 85 bp, Homo sapiens
  source 1..85: mol_type = unassigned DNA
tgcatacgagttagtgttcatgaggtcaacagaattatacaactctaggatatatattactcctattttgtagatgagaatatgg

SEQ ID NO: 12725 - RNA, 31 nt, Homo sapiens
  source 1..31: mol_type = unassigned RNA
ctggctggatgggatgtgtggagtggagtgg

SEQ ID NO: 12726 - DNA, 31 bp, Homo sapiens
  source 1..31: mol_type = unassigned DNA
ctggctggatgggatgtgtggagtggagtgg

SEQ ID NO: 12727 - DNA, 31 bp, Homo sapiens
  source 1..31: mol_type = unassigned DNA
ccactccactccacacatcccatccagccag

SEQ ID NO: 12728 - RNA, 29 nt, Homo sapiens
  source 1..29: mol_type = unassigned RNA
aatttggaacagccattgactgggcacag

SEQ ID NO: 12729 - DNA, 29 bp, Homo sapiens
  source 1..29: mol_type = unassigned DNA
aatttggaacagccattgactgggcacag

SEQ ID NO: 12730 - DNA, 29 bp, Homo sapiens
  source 1..29: mol_type = unassigned DNA
ctgtgcccagtcaatggctgttccaaatt

SEQ ID NO: 12731 - RNA, 167 nt, Homo sapiens
  source 1..167: mol_type = unassigned RNA
cccatagcaacaaggcttcttgtctcaggtctgcagtgtgtcacatgccagactcctcagactcaacaggcagctctgcacatccacaatcaaggagcttgttttccacacttcatggagacttccctcttgtctagtttgacttcctctccatttttagcatcaga

SEQ ID NO: 12732 - DNA, 167 bp, Homo sapiens
  source 1..167: mol_type = unassigned DNA
cccatagcaacaaggcttcttgtctcaggtctgcagtgtgtcacatgccagactcctcagactcaacaggcagctctgcacatccacaatcaaggagcttgttttccacacttcatggagacttccctcttgtctagtttgacttcctctccatttttagcatcaga

SEQ ID NO: 12733 - DNA, 167 bp, Homo sapiens
  source 1..167: mol_type = unassigned DNA
tctgatgctaaaaatggagaggaagtcaaactagacaagagggaagtctccatgaagtgtggaaaacaagctccttgattgtggatgtgcagagctgcctgttgagtctgaggagtctggcatgtgacacactgcagacctgagacaagaagccttgttgctatggg

SEQ ID NO: 12734 - RNA, 127 nt, Homo sapiens
  source 1..127: mol_type = unassigned RNA
gccctcccactgtggtgactggtggagacctggtcaagacacagagagctgtgtgcatgctgagcaataccacagccattgctgaggcctgggctcacctggaccacaagtttgacttgaatgtatg

SEQ ID NO: 12735 - DNA, 127 bp, Homo sapiens
  source 1..127: mol_type = unassigned DNA
gccctcccactgtggtgactggtggagacctggtcaagacacagagagctgtgtgcatgctgagcaataccacagccattgctgaggcctgggctcacctggaccacaagtttgacttgaatgtatg

SEQ ID NO: 12736 - DNA, 127 bp, Homo sapiens
  source 1..127: mol_type = unassigned DNA
catacattcaagtcaaacttgtggtccaggtgagcccaggcctcagcaatggctgtggtattgctcagcatgcacacagctctctgtgtcttgaccaggtctccaccagtcaccacagtgggagggc

SEQ ID NO: 12737 - RNA, 39 nt, Homo sapiens
  source 1..39: mol_type = unassigned RNA
ttcagacttggactgagccatgctaccagaatcccaggg

SEQ ID NO: 12738 - DNA, 39 bp, Homo sapiens
  source 1..39: mol_type = unassigned DNA
ttcagacttggactgagccatgctaccagaatcccaggg

SEQ ID NO: 12739 - DNA, 39 bp, Homo sapiens
  source 1..39: mol_type = unassigned DNA
ccctgggattctggtagcatggctcagtccaagtctgaa

SEQ ID NO: 12740 - RNA, 105 nt, Homo sapiens
  source 1..105: mol_type = unassigned RNA
cccattgtgacttcagagtcacaggactgtgggttagaagaaggatactaagggtcatcgggctccagccggctccagccgtgtcttcgagtgtctgataatgag

SEQ ID NO: 12741 - DNA, 105 bp, Homo sapiens
  source 1..105: mol_type = unassigned DNA
cccattgtgacttcagagtcacaggactgtgggttagaagaaggatactaagggtcatcgggctccagccggctccagccgtgtcttcgagtgtctgataatgag

SEQ ID NO: 12742 - DNA, 105 bp, Homo sapiens
  source 1..105: mol_type = unassigned DNA
ctcattatcagacactcgaagacacggctggagccggctggagcccgatgacccttagtatccttcttctaacccacagtcctgtgactctgaagtcacaatggg

SEQ ID NO: 12743 - RNA, 34 nt, Homo sapiens
  source 1..34: mol_type = unassigned RNA
aatctatatctcttctggttgtttatggccctcc

SEQ ID NO: 12744 - DNA, 34 bp, Homo sapiens
  source 1..34: mol_type = unassigned DNA
aatctatatctcttctggttgtttatggccctcc

SEQ ID NO: 12745 - DNA, 34 bp, Homo sapiens
  source 1..34: mol_type = unassigned DNA
ggagggccataaacaaccagaagagatatagatt

SEQ ID NO: 12746 - RNA, 45 nt, Homo sapiens
  source 1..45: mol_type = unassigned RNA
tggttttcaggctttgggacttggactgagccatgctgctggttt

SEQ ID NO: 12747 - DNA, 45 bp, Homo sapiens
  source 1..45: mol_type = unassigned DNA
tggttttcaggctttgggacttggactgagccatgctgctggttt

SEQ ID NO: 12748 - DNA, 45 bp, Homo sapiens
  source 1..45: mol_type = unassigned DNA
aaaccagcagcatggctcagtccaagtcccaaagcctgaaaacca

SEQ ID NO: 12749 - RNA, 56 nt, Homo sapiens
  source 1..56: mol_type = unassigned RNA
ctagacaaccctgaggggaaccagccagaagggaaccagctgccttaaaggaaagg

SEQ ID NO: 12750 - DNA, 56 bp, Homo sapiens
  source 1..56: mol_type = unassigned DNA
ctagacaaccctgaggggaaccagccagaagggaaccagctgccttaaaggaaagg

SEQ ID NO: 12751 - DNA, 56 bp, Homo sapiens
  source 1..56: mol_type = unassigned DNA
cctttcctttaaggcagctggttcccttctggctggttcccctcagggttgtctag

SEQ ID NO: 12752 - RNA, 193 nt, Homo sapiens
  source 1..193: mol_type = unassigned RNA
ggacagggctccagccagcagggggcgcgcgcgttcacctcggggccaggttggctgaaagcccctctcccgttcccctcttctagagcaaaagtcttccaaagccttgacctcttagacaacgctactttagtgaccgaagcacttttcctttccctttcatgcgagttttttgcaaccatgggtggctagt

SEQ ID NO: 12753 - DNA, 193 bp, Homo sapiens
  source 1..193: mol_type = unassigned DNA
ggacagggctccagccagcagggggcgcgcgcgttcacctcggggccaggttggctgaaagcccctctcccgttcccctcttctagagcaaaagtcttccaaagccttgacctcttagacaacgctactttagtgaccgaagcacttttcctttccctttcatgcgagttttttgcaaccatgggtggctagt

SEQ ID NO: 12754 - DNA, 193 bp, Homo sapiens
  source 1..193: mol_type = unassigned DNA
actagccacccatggttgcaaaaaactcgcatgaaagggaaaggaaaagtgcttcggtcactaaagtagcgttgtctaagaggtcaaggctttggaagacttttgctctagaagaggggaacgggagaggggctttcagccaacctggccccgaggtgaacgcgcgcgccccctgctggctggagccctgtcc

SEQ ID NO: 12755 - RNA, 30 nt, Homo sapiens
  source 1..30: mol_type = unassigned RNA
atctactatctgaacaagaattgggatgcc

SEQ ID NO: 12756 - DNA, 30 bp, Homo sapiens
  source 1..30: mol_type = unassigned DNA
atctactatctgaacaagaattgggatgcc

SEQ ID NO: 12757 - DNA, 30 bp, Homo sapiens
  source 1..30: mol_type = unassigned DNA
ggcatcccaattcttgttcagatagtagat

SEQ ID NO: 12758 - RNA, 28 nt, Homo sapiens
  source 1..28: mol_type = unassigned RNA
attcctctgtgacacacaatgggaattc

SEQ ID NO: 12759 - DNA, 28 bp, Homo sapiens
  source 1..28: mol_type = unassigned DNA
attcctctgtgacacacaatgggaattc

SEQ ID NO: 12760 - DNA, 28 bp, Homo sapiens
  source 1..28: mol_type = unassigned DNA
gaattcccattgtgtgtcacagaggaat

SEQ ID NO: 12761 - RNA, 28 nt, Homo sapiens
  source 1..28: mol_type = unassigned RNA
tttactgtctttgaaggaaacgttcgca

SEQ ID NO: 12762 - DNA, 28 bp, Homo sapiens
  source 1..28: mol_type = unassigned DNA
tttactgtctttgaaggaaacgttcgca

SEQ ID NO: 12763 - DNA, 28 bp, Homo sapiens
  source 1..28: mol_type = unassigned DNA
tgcgaacgtttccttcaaagacagtaaa

SEQ ID NO: 12764 - RNA, 60 nt, Homo sapiens
  source 1..60: mol_type = unassigned RNA
ctcactctgtctctctctctctgcctgtcttatttctctctctctctgcttgtctctctc

SEQ ID NO: 12765 - DNA, 60 bp, Homo sapiens
  source 1..60: mol_type = unassigned DNA
ctcactctgtctctctctctctgcctgtcttatttctctctctctctgcttgtctctctc

SEQ ID NO: 12766 - DNA, 60 bp, Homo sapiens
  source 1..60: mol_type = unassigned DNA
gagagagacaagcagagagagagagaaataagacaggcagagagagagagacagagtgag

SEQ ID NO: 12767 - RNA, 31 nt, Homo sapiens
  source 1..31: mol_type = unassigned RNA
gcaaccccagagatgggctgaagagaaccac

SEQ ID NO: 12768 - DNA, 31 bp, Homo sapiens
  source 1..31: mol_type = unassigned DNA
gcaaccccagagatgggctgaagagaaccac

SEQ ID NO: 12769 - DNA, 31 bp, Homo sapiens
  source 1..31: mol_type = unassigned DNA
gtggttctcttcagcccatctctggggttgc

SEQ ID NO: 12770 - RNA, 32 nt, Homo sapiens
  source 1..32: mol_type = unassigned RNA
ggtatctactttgggatctagatgtctgaagt

SEQ ID NO: 12771 - DNA, 32 bp, Homo sapiens
  source 1..32: mol_type = unassigned DNA
ggtatctactttgggatctagatgtctgaagt

SEQ ID NO: 12772 - DNA, 32 bp, Homo sapiens
  source 1..32: mol_type = unassigned DNA
acttcagacatctagatcccaaagtagatacc

SEQ ID NO: 12773 - RNA, 22 nt, Homo sapiens
  source 1..22: mol_type = unassigned RNA
accagccatgttacctaatgga

SEQ ID NO: 12774 - DNA, 22 bp, Homo sapiens
  source 1..22: mol_type = unassigned DNA
accagccatgttacctaatgga

SEQ ID NO: 12775 - DNA, 22 bp, Homo sapiens
  source 1..22: mol_type = unassigned DNA
tccattaggtaacatggctggt

SEQ ID NO: 12776 - RNA, 44 nt, Homo sapiens
  source 1..44: mol_type = unassigned RNA
gaattgatagttactgttgtgacctgaagttcaccattaaaagg

SEQ ID NO: 12777 - DNA, 44 bp, Homo sapiens
  source 1..44: mol_type = unassigned DNA
gaattgatagttactgttgtgacctgaagttcaccattaaaagg

SEQ ID NO: 12778 - DNA, 44 bp, Homo sapiens
  source 1..44: mol_type = unassigned DNA
ccttttaatggtgaacttcaggtcacaacagtaactatcaattc

SEQ ID NO: 12779 - RNA, 34 nt, Homo sapiens
  source 1..34: mol_type = unassigned RNA
tcctcaggtctcctctactctgatgggcacagga

SEQ ID NO: 12780 - DNA, 34 bp, Homo sapiens
  source 1..34: mol_type = unassigned DNA
tcctcaggtctcctctactctgatgggcacagga

SEQ ID NO: 12781 - DNA, 34 bp, Homo sapiens
  source 1..34: mol_type = unassigned DNA
tcctgtgcccatcagagtagaggagacctgagga

SEQ ID NO: 12782 - RNA, 30 nt, Homo sapiens
  source 1..30: mol_type = unassigned RNA
ccccctctgtgtccctgggaaaggccagca

SEQ ID NO: 12783 - DNA, 30 bp, Homo sapiens
  source 1..30: mol_type = unassigned DNA
ccccctctgtgtccctgggaaaggccagca

SEQ ID NO: 12784 - DNA, 30 bp, Homo sapiens
  source 1..30: mol_type = unassigned DNA
tgctggcctttcccagggacacagaggggg

SEQ ID NO: 12785 - RNA, 114 nt, Homo sapiens
  source 1..114: mol_type = unassigned RNA
tcagctcaaatctatttgacaaagtaagcccagttgtatctcacaaagttgatcttgctgttttagctgcagttgagataagagggtcagtatgaatacttagttgagtatctc

SEQ ID NO: 12786 - DNA, 114 bp, Homo sapiens
  source 1..114: mol_type = unassigned DNA
tcagctcaaatctatttgacaaagtaagcccagttgtatctcacaaagttgatcttgctgttttagctgcagttgagataagagggtcagtatgaatacttagttgagtatctc

SEQ ID NO: 12787 - DNA, 114 bp, Homo sapiens
  source 1..114: mol_type = unassigned DNA
gagatactcaactaagtattcatactgaccctcttatctcaactgcagctaaaacagcaagatcaactttgtgagatacaactgggcttactttgtcaaatagatttgagctga

SEQ ID NO: 12788 - RNA, 85 nt, Homo sapiens
  source 1..85: mol_type = unassigned RNA
tctcctaaaagggcaggctgttgtgagggcctttgaccaaaccaagtatctcactccaggccgaggattgcaaggtaagccttga

SEQ ID NO: 12789 - DNA, 85 bp, Homo sapiens
  source 1..85: mol_type = unassigned DNA
tctcctaaaagggcaggctgttgtgagggcctttgaccaaaccaagtatctcactccaggccgaggattgcaaggtaagccttga

SEQ ID NO: 12790 - DNA, 85 bp, Homo sapiens
  source 1..85: mol_type = unassigned DNA
tcaaggcttaccttgcaatcctcggcctggagtgagatacttggtttggtcaaaggccctcacaacagcctgcccttttaggaga

SEQ ID NO: 12791 - RNA, 56 nt, Homo sapiens
  source 1..56: mol_type = unassigned RNA
tctctctttctgtgtctctctgtctcttatctgatcctgtgtgtgtctgtgtatct

SEQ ID NO: 12792 - DNA, 56 bp, Homo sapiens
  source 1..56: mol_type = unassigned DNA
tctctctttctgtgtctctctgtctcttatctgatcctgtgtgtgtctgtgtatct

SEQ ID NO: 12793 - DNA, 56 bp, Homo sapiens
  source 1..56: mol_type = unassigned DNA
agatacacagacacacacaggatcagataagagacagagagacacagaaagagaga

SEQ ID NO: 12794 - RNA, 29 nt, Homo sapiens
  source 1..29: mol_type = unassigned RNA
tgtaaacagatgggctgggctcttgctgc

SEQ ID NO: 12795 - DNA, 29 bp, Homo sapiens
  source 1..29: mol_type = unassigned DNA
tgtaaacagatgggctgggctcttgctgc

SEQ ID NO: 12796 - DNA, 29 bp, Homo sapiens
  source 1..29: mol_type = unassigned DNA
gcagcaagagcccagcccatctgtttaca

SEQ ID NO: 12797 - RNA, 59 nt, Homo sapiens
  source 1..59: mol_type = unassigned RNA
tggggatctgattcttctgcttgttctgtttgctgacactcccttgcagtgatttgtag

SEQ ID NO: 12798 - DNA, 59 bp, Homo sapiens
  source 1..59: mol_type = unassigned DNA
tggggatctgattcttctgcttgttctgtttgctgacactcccttgcagtgatttgtag

SEQ ID NO: 12799 - DNA, 59 bp, Homo sapiens
  source 1..59: mol_type = unassigned DNA
ctacaaatcactgcaagggagtgtcagcaaacagaacaagcagaagaatcagatcccca

SEQ ID NO: 12800 - RNA, 123 nt, Homo sapiens
  source 1..123: mol_type = unassigned RNA
gggcatctcagaaccagggctgagactgaccaccgttgtgagaactcaccctcactcggccaccctggcagggtccctgtgcctgtgaaaggggctgtgcttgtgccacttttgtgcttaggt

SEQ ID NO: 12801 - DNA, 123 bp, Homo sapiens
  source 1..123: mol_type = unassigned DNA
gggcatctcagaaccagggctgagactgaccaccgttgtgagaactcaccctcactcggccaccctggcagggtccctgtgcctgtgaaaggggctgtgcttgtgccacttttgtgcttaggt

SEQ ID NO: 12802 - DNA, 123 bp, Homo sapiens
  source 1..123: mol_type = unassigned DNA
acctaagcacaaaagtggcacaagcacagcccctttcacaggcacagggaccctgccagggtggccgagtgagggtgagttctcacaacggtggtcagtctcagccctggttctgagatgccc

SEQ ID NO: 12803 - RNA, 31 nt, Homo sapiens
  source 1..31: mol_type = unassigned RNA
caacaccagtctgggcaataaagtgagaccc

SEQ ID NO: 12804 - DNA, 31 bp, Homo sapiens
  source 1..31: mol_type = unassigned DNA
caacaccagtctgggcaataaagtgagaccc

SEQ ID NO: 12805 - DNA, 31 bp, Homo sapiens
  source 1..31: mol_type = unassigned DNA
gggtctcactttattgcccagactggtgttg

SEQ ID NO: 12806 - RNA, 29 nt, Homo sapiens
  source 1..29: mol_type = unassigned RNA
attccctctgctgccagtaaagaagcact

SEQ ID NO: 12807 - DNA, 29 bp, Homo sapiens
  source 1..29: mol_type = unassigned DNA
attccctctgctgccagtaaagaagcact

SEQ ID NO: 12808 - DNA, 29 bp, Homo sapiens
  source 1..29: mol_type = unassigned DNA
agtgcttctttactggcagcagagggaat

SEQ ID NO: 12809 - RNA, 155 nt, Homo sapiens
  source 1..155: mol_type = unassigned RNA
aaagtgtttaagattgtaattaaaatgatagttgattttcaaaagcattaattttttttcattgtttttaactttgctttcatgaccatcctgccatccttgactttgaactaatgataaagtaatgatctcaaactatgacagaaaagtaatgt

SEQ ID NO: 12810 - DNA, 155 bp, Homo sapiens
  source 1..155: mol_type = unassigned DNA
aaagtgtttaagattgtaattaaaatgatagttgattttcaaaagcattaattttttttcattgtttttaactttgctttcatgaccatcctgccatccttgactttgaactaatgataaagtaatgatctcaaactatgacagaaaagtaatgt

SEQ ID NO: 12811 - DNA, 155 bp, Homo sapiens
  source 1..155: mol_type = unassigned DNA
acattacttttctgtcatagtttgagatcattactttatcattagttcaaagtcaaggatggcaggatggtcatgaaagcaaagttaaaaacaatgaaaaaaaattaatgcttttgaaaatcaactatcattttaattacaatcttaaacacttt

SEQ ID NO: 12812 - RNA, 30 nt, Homo sapiens
  source 1..30: mol_type = unassigned RNA
ggtgtttggggatcaaggagcctagattct

SEQ ID NO: 12813 - DNA, 30 bp, Homo sapiens
  source 1..30: mol_type = unassigned DNA
ggtgtttggggatcaaggagcctagattct

SEQ ID NO: 12814 - DNA, 30 bp, Homo sapiens
  source 1..30: mol_type = unassigned DNA
agaatctaggctccttgatccccaaacacc

SEQ ID NO: 12815 - RNA, 30 nt, Homo sapiens
  source 1..30: mol_type = unassigned RNA
aggttctgtatctagccccagggacccgcc

SEQ ID NO: 12816 - DNA, 30 bp, Homo sapiens
  source 1..30: mol_type = unassigned DNA
aggttctgtatctagccccagggacccgcc

SEQ ID NO: 12817 - DNA, 30 bp, Homo sapiens
  source 1..30: mol_type = unassigned DNA
ggcgggtccctggggctagatacagaacct

SEQ ID NO: 12818 - RNA, 30 nt, Homo sapiens
  source 1..30: mol_type = unassigned RNA
cttaaatggcctgttgacttctgactatct

SEQ ID NO: 12819 - DNA, 30 bp, Homo sapiens
  source 1..30: mol_type = unassigned DNA
cttaaatggcctgttgacttctgactatct

SEQ ID NO: 12820 - DNA, 30 bp, Homo sapiens
  source 1..30: mol_type = unassigned DNA
agatagtcagaagtcaacaggccatttaag

SEQ ID NO: 12821 - RNA, 60 nt, Homo sapiens
  source 1..60: mol_type = unassigned RNA
ctttcagaattggacagagccatgctactgacttgcttctctctttgcccagcttgtaga

SEQ ID NO: 12822 - DNA, 60 bp, Homo sapiens
  source 1..60: mol_type = unassigned DNA
ctttcagaattggacagagccatgctactgacttgcttctctctttgcccagcttgtaga

SEQ ID NO: 12823 - DNA, 60 bp, Homo sapiens
  source 1..60: mol_type = unassigned DNA
tctacaagctgggcaaagagagaagcaagtcagtagcatggctctgtccaattctgaaag

SEQ ID NO: 12824 - RNA, 80 nt, Homo sapiens
  source 1..80: mol_type = unassigned RNA
tagttttcagttacagattgactggggactgccagtatgtctggcctactgatgtttgctggtagattatccttgtaaga

SEQ ID NO: 12825 - DNA, 80 bp, Homo sapiens
  source 1..80: mol_type = unassigned DNA
tagttttcagttacagattgactggggactgccagtatgtctggcctactgatgtttgctggtagattatccttgtaaga

SEQ ID NO: 12826 - DNA, 80 bp, Homo sapiens
  source 1..80: mol_type = unassigned DNA
tcttacaaggataatctaccagcaaacatcagtaggccagacatactggcagtccccagtcaatctgtaactgaaaacta

SEQ ID NO: 12827 - RNA, 126 nt, Homo sapiens
  source 1..126: mol_type = unassigned RNA
ttccccctcttcaactccactgacactaatgtatcagatccttctcatcatctctcactgtagtctctgaactgattcccttcctgtatgccaccttctgctccctgatctttccaaaatgtagta

SEQ ID NO: 12828 - DNA, 126 bp, Homo sapiens
  source 1..126: mol_type = unassigned DNA
ttccccctcttcaactccactgacactaatgtatcagatccttctcatcatctctcactgtagtctctgaactgattcccttcctgtatgccaccttctgctccctgatctttccaaaatgtagta

SEQ ID NO: 12829 - DNA, 126 bp, Homo sapiens
  source 1..126: mol_type = unassigned DNA
tactacattttggaaagatcagggagcagaaggtggcatacaggaagggaatcagttcagagactacagtgagagatgatgagaaggatctgatacattagtgtcagtggagttgaagagggggaa

SEQ ID NO: 12830 - RNA, 30 nt, Homo sapiens
  source 1..30: mol_type = unassigned RNA
aactcacaaatggccagttgcagaatggac

SEQ ID NO: 12831 - DNA, 30 bp, Homo sapiens
  source 1..30: mol_type = unassigned DNA
aactcacaaatggccagttgcagaatggac

SEQ ID NO: 12832 - DNA, 30 bp, Homo sapiens
  source 1..30: mol_type = unassigned DNA
gtccattctgcaactggccatttgtgagtt

SEQ ID NO: 12833 - RNA, 27 nt, Homo sapiens
  source 1..27: mol_type = unassigned RNA
tagcatatcaactgatattgtccacca

SEQ ID NO: 12834 - DNA, 27 bp, Homo sapiens
  source 1..27: mol_type = unassigned DNA
tagcatatcaactgatattgtccacca

SEQ ID NO: 12835 - DNA, 27 bp, Homo sapiens
  source 1..27: mol_type = unassigned DNA
tggtggacaatatcagttgatatgcta

SEQ ID NO: 12836 - RNA, 70 nt, Homo sapiens
  source 1..70: mol_type = unassigned RNA
agagtgcagctgcccagagcagctctgtgtacagcccggctcctcttgggtttctgatgccttccgtggc

SEQ ID NO: 12837 - DNA, 70 bp, Homo sapiens
  source 1..70: mol_type = unassigned DNA
agagtgcagctgcccagagcagctctgtgtacagcccggctcctcttgggtttctgatgccttccgtggc

SEQ ID NO: 12838 - DNA, 70 bp, Homo sapiens
  source 1..70: mol_type = unassigned DNA
gccacggaaggcatcagaaacccaagaggagccgggctgtacacagagctgctctgggcagctgcactct

SEQ ID NO: 12839 - RNA, 113 nt, Homo sapiens
  source 1..113: mol_type = unassigned RNA
gataatatatgacatgtgccccagaaagcaggaatcttggaggctatcttaaaattcaccttttaccatgtagcatactataggtagaattgcaagatagcctccaagtgcaa

SEQ ID NO: 12840 - DNA, 113 bp, Homo sapiens
  source 1..113: mol_type = unassigned DNA
gataatatatgacatgtgccccagaaagcaggaatcttggaggctatcttaaaattcaccttttaccatgtagcatactataggtagaattgcaagatagcctccaagtgcaa

SEQ ID NO: 12841 - DNA, 113 bp, Homo sapiens
  source 1..113: mol_type = unassigned DNA
ttgcacttggaggctatcttgcaattctacctatagtatgctacatggtaaaaggtgaattttaagatagcctccaagattcctgctttctggggcacatgtcatatattatc

SEQ ID NO: 12842 - RNA, 139 nt, Homo sapiens
  source 1..139: mol_type = unassigned RNA
taacgcctctgcctgcaaaaactgtctgtggaaggtcattagccaattgtagatgcatctctgaattttcagcaaagcatctctctctctctctctctgcctttctctctctctctctgcctgtctctctctgtctctc

SEQ ID NO: 12843 - DNA, 139 bp, Homo sapiens
  source 1..139: mol_type = unassigned DNA
taacgcctctgcctgcaaaaactgtctgtggaaggtcattagccaattgtagatgcatctctgaattttcagcaaagcatctctctctctctctctctgcctttctctctctctctctgcctgtctctctctgtctctc

SEQ ID NO: 12844 - DNA, 139 bp, Homo sapiens
  source 1..139: mol_type = unassigned DNA
gagagacagagagagacaggcagagagagagagagaaaggcagagagagagagagagagatgctttgctgaaaattcagagatgcatctacaattggctaatgaccttccacagacagtttttgcaggcagaggcgtta

SEQ ID NO: 12845 - RNA, 32 nt, Homo sapiens
  source 1..32: mol_type = unassigned RNA
gccccctgttgtagaaaatgccaagacctttg

SEQ ID NO: 12846 - DNA, 32 bp, Homo sapiens
  source 1..32: mol_type = unassigned DNA
gccccctgttgtagaaaatgccaagacctttg

SEQ ID NO: 12847 - DNA, 32 bp, Homo sapiens
  source 1..32: mol_type = unassigned DNA
caaaggtcttggcattttctacaacagggggc

SEQ ID NO: 12848 - RNA, 27 nt, Homo sapiens
  source 1..27: mol_type = unassigned RNA
aagatattattgccagatactaatctt

SEQ ID NO: 12849 - DNA, 27 bp, Homo sapiens
  source 1..27: mol_type = unassigned DNA
aagatattattgccagatactaatctt

SEQ ID NO: 12850 - DNA, 27 bp, Homo sapiens
  source 1..27: mol_type = unassigned DNA
aagattagtatctggcaataatatctt

SEQ ID NO: 12851 - RNA, 24 nt, Homo sapiens
  source 1..24: mol_type = unassigned RNA
tgtgactgcattatgaaaattctt

SEQ ID NO: 12852 - DNA, 24 bp, Homo sapiens
  source 1..24: mol_type = unassigned DNA
tgtgactgcattatgaaaattctt

SEQ ID NO: 12853 - DNA, 24 bp, Homo sapiens
  source 1..24: mol_type = unassigned DNA
aagaattttcataatgcagtcaca

SEQ ID NO: 12854 - RNA, 46 nt, Homo sapiens
  source 1..46: mol_type = unassigned RNA
accttctgggctttgataggtcctgctcgtggctgcttctgccgct

SEQ ID NO: 12855 - DNA, 46 bp, Homo sapiens
  source 1..46: mol_type = unassigned DNA
accttctgggctttgataggtcctgctcgtggctgcttctgccgct

SEQ ID NO: 12856 - DNA, 46 bp, Homo sapiens
  source 1..46: mol_type = unassigned DNA
agcggcagaagcagccacgagcaggacctatcaaagcccagaaggt

SEQ ID NO: 12857 - RNA, 37 nt, Homo sapiens
  source 1..37: mol_type = unassigned RNA
catctggatatgggtctttttcacttcttcgtatgcc

SEQ ID NO: 12858 - DNA, 37 bp, Homo sapiens
  source 1..37: mol_type = unassigned DNA
catctggatatgggtctttttcacttcttcgtatgcc

SEQ ID NO: 12859 - DNA, 37 bp, Homo sapiens
  source 1..37: mol_type = unassigned DNA
ggcatacgaagaagtgaaaaagacccatatccagatg

SEQ ID NO: 12860 - RNA, 32 nt, Homo sapiens
  source 1..32: mol_type = unassigned RNA
tctgcagaatggtcgcactggaggttcaagct

SEQ ID NO: 12861 - DNA, 32 bp, Homo sapiens
  source 1..32: mol_type = unassigned DNA
tctgcagaatggtcgcactggaggttcaagct

SEQ ID NO: 12862 - DNA, 32 bp, Homo sapiens
  source 1..32: mol_type = unassigned DNA
agcttgaacctccagtgcgaccattctgcaga

SEQ ID NO: 12863 - RNA, 88 nt, Homo sapiens
  source 1..88: mol_type = unassigned RNA
cttctggttgggcttccagagtgatgaaaaggaggttgcccttgggtgcactcctccctgactggttgcagcttcttgtagtctccag

SEQ ID NO: 12864 - DNA, 88 bp, Homo sapiens
  source 1..88: mol_type = unassigned DNA
cttctggttgggcttccagagtgatgaaaaggaggttgcccttgggtgcactcctccctgactggttgcagcttcttgtagtctccag

SEQ ID NO: 12865 - DNA, 88 bp, Homo sapiens
  source 1..88: mol_type = unassigned DNA
ctggagactacaagaagctgcaaccagtcagggaggagtgcacccaagggcaacctccttttcatcactctggaagcccaaccagaag

SEQ ID NO: 12866 - RNA, 82 nt, Homo sapiens
  source 1..82: mol_type = unassigned RNA
gtttcttaaagggactggtaggtgtgtagttacaaattaactgtaaaagtactgcaactcagtagatgggctgtgttaaaaa

SEQ ID NO: 12867 - DNA, 82 bp, Homo sapiens
  source 1..82: mol_type = unassigned DNA
gtttcttaaagggactggtaggtgtgtagttacaaattaactgtaaaagtactgcaactcagtagatgggctgtgttaaaaa

SEQ ID NO: 12868 - DNA, 82 bp, Homo sapiens
  source 1..82: mol_type = unassigned DNA
tttttaacacagcccatctactgagttgcagtacttttacagttaatttgtaactacacacctaccagtccctttaagaaac

SEQ ID NO: 12869 - RNA, 37 nt, Homo sapiens
  source 1..37: mol_type = unassigned RNA
ctgtaggctgtctgttcactatgatgattgtttgttt

SEQ ID NO: 12870 - DNA, 37 bp, Homo sapiens
  source 1..37: mol_type = unassigned DNA
ctgtaggctgtctgttcactatgatgattgtttgttt

SEQ ID NO: 12871 - DNA, 37 bp, Homo sapiens
  source 1..37: mol_type = unassigned DNA
aaacaaacaatcatcatagtgaacagacagcctacag

SEQ ID NO: 12872 - RNA, 31 nt, Homo sapiens
  source 1..31: mol_type = unassigned RNA
tctaattgctgccaggattgtcactccaaac

SEQ ID NO: 12873 - DNA, 31 bp, Homo sapiens
  source 1..31: mol_type = unassigned DNA
tctaattgctgccaggattgtcactccaaac

SEQ ID NO: 12874 - DNA, 31 bp, Homo sapiens
  source 1..31: mol_type = unassigned DNA
gtttggagtgacaatcctggcagcaattaga

SEQ ID NO: 12875 - RNA, 31 nt, Homo sapiens
  source 1..31: mol_type = unassigned RNA
agtctatgtgctctgagtattgacaggtaga

SEQ ID NO: 12876 - DNA, 31 bp, Homo sapiens
  source 1..31: mol_type = unassigned DNA
agtctatgtgctctgagtattgacaggtaga

SEQ ID NO: 12877 - DNA, 31 bp, Homo sapiens
  source 1..31: mol_type = unassigned DNA
tctacctgtcaatactcagagcacatagact

SEQ ID NO: 12878 - RNA, 30 nt, Homo sapiens
  source 1..30: mol_type = unassigned RNA
aatagggaatctgtatctgttttgcttgtg

SEQ ID NO: 12879 - DNA, 30 bp, Homo sapiens
  source 1..30: mol_type = unassigned DNA
aatagggaatctgtatctgttttgcttgtg

SEQ ID NO: 12880 - DNA, 30 bp, Homo sapiens
  source 1..30: mol_type = unassigned DNA
cacaagcaaaacagatacagattccctatt

SEQ ID NO: 12881 - RNA, 24 nt, Homo sapiens
  source 1..24: mol_type = unassigned RNA
ctgaagttctctcttctgcttgtt

SEQ ID NO: 12882 - DNA, 24 bp, Homo sapiens
  source 1..24: mol_type = unassigned DNA
ctgaagttctctcttctgcttgtt

SEQ ID NO: 12883 - DNA, 24 bp, Homo sapiens
  source 1..24: mol_type = unassigned DNA
aacaagcagaagagagaacttcag

SEQ ID NO: 12884 - RNA, 31 nt, Homo sapiens
  source 1..31: mol_type = unassigned RNA
ttaaccaagtgatgatcgtctggaagctgca

SEQ ID NO: 12885 - DNA, 31 bp, Homo sapiens
  source 1..31: mol_type = unassigned DNA
ttaaccaagtgatgatcgtctggaagctgca

SEQ ID NO: 12886 - DNA, 31 bp, Homo sapiens
  source 1..31: mol_type = unassigned DNA
tgcagcttccagacgatcatcacttggttaa

SEQ ID NO: 12887 - RNA, 34 nt, Homo sapiens
  source 1..34: mol_type = unassigned RNA
gccatcctgatctcagctctgggtcttggaaaat

SEQ ID NO: 12888 - DNA, 34 bp, Homo sapiens
  source 1..34: mol_type = unassigned DNA
gccatcctgatctcagctctgggtcttggaaaat

SEQ ID NO: 12889 - DNA, 34 bp, Homo sapiens
  source 1..34: mol_type = unassigned DNA
attttccaagacccagagctgagatcaggatggc

SEQ ID NO: 12890 - RNA, 34 nt, Homo sapiens
  source 1..34: mol_type = unassigned RNA
attctctgagtaggaacaatggagttgacttgct

SEQ ID NO: 12891 - DNA, 34 bp, Homo sapiens
  source 1..34: mol_type = unassigned DNA
attctctgagtaggaacaatggagttgacttgct

SEQ ID NO: 12892 - DNA, 34 bp, Homo sapiens
  source 1..34: mol_type = unassigned DNA
agcaagtcaactccattgttcctactcagagaat

SEQ ID NO: 12893 - RNA, 54 nt, Homo sapiens
  source 1..54: mol_type = unassigned RNA
cacaccagctgaccctcttctgagttcttgttgtggctctgtcactaactctcc

SEQ ID NO: 12894 - DNA, 54 bp, Homo sapiens
  source 1..54: mol_type = unassigned DNA
cacaccagctgaccctcttctgagttcttgttgtggctctgtcactaactctcc

SEQ ID NO: 12895 - DNA, 54 bp, Homo sapiens
  source 1..54: mol_type = unassigned DNA
ggagagttagtgacagagccacaacaagaactcagaagagggtcagctggtgtg

SEQ ID NO: 12896 - RNA, 98 nt, Homo sapiens
  source 1..98: mol_type = unassigned RNA
cctgcatacatggctgaacactctgagagccagcaagtgaaatcacttctgtgacccaaccaactggaacacggagtgtgggggagtgggaaacattc

SEQ ID NO: 12897 - DNA, 98 bp, Homo sapiens
  source 1..98: mol_type = unassigned DNA
cctgcatacatggctgaacactctgagagccagcaagtgaaatcacttctgtgacccaaccaactggaacacggagtgtgggggagtgggaaacattc

SEQ ID NO: 12898 - DNA, 98 bp, Homo sapiens
  source 1..98: mol_type = unassigned DNA
gaatgtttcccactcccccacactccgtgttccagttggttgggtcacagaagtgatttcacttgctggctctcagagtgttcagccatgtatgcagg

SEQ ID NO: 12899 - RNA, 57 nt, Homo sapiens
  source 1..57: mol_type = unassigned RNA
tgcattgcttggatgagaagtcagctgtcattctcatctctattcttctgcatgtaa

SEQ ID NO: 12900 - DNA, 57 bp, Homo sapiens
  source 1..57: mol_type = unassigned DNA
tgcattgcttggatgagaagtcagctgtcattctcatctctattcttctgcatgtaa

SEQ ID NO: 12901 - DNA, 57 bp, Homo sapiens
  source 1..57: mol_type = unassigned DNA
ttacatgcagaagaatagagatgagaatgacagctgacttctcatccaagcaatgca

SEQ ID NO: 12902 - RNA, 86 nt, Homo sapiens
  source 1..86: mol_type = unassigned RNA
gtgaattataaatgagataatccacagttattcattgtggagttgttgagactatgaaagactcattgtctttgtattcagctctt

SEQ ID NO: 12903 - DNA, 86 bp, Homo sapiens
  source 1..86: mol_type = unassigned DNA
gtgaattataaatgagataatccacagttattcattgtggagttgttgagactatgaaagactcattgtctttgtattcagctctt

SEQ ID NO: 12904 - DNA, 86 bp, Homo sapiens
  source 1..86: mol_type = unassigned DNA
aagagctgaatacaaagacaatgagtctttcatagtctcaacaactccacaatgaataactgtggattatctcatttataattcac

SEQ ID NO: 12905 - RNA, 20 nt, Homo sapiens
  source 1..20: mol_type = unassigned RNA
acttattgtcttctgctttt

SEQ ID NO: 12906 - DNA, 20 bp, Homo sapiens
  source 1..20: mol_type = unassigned DNA
acttattgtcttctgctttt

SEQ ID NO: 12907 - DNA, 20 bp, Homo sapiens
  source 1..20: mol_type = unassigned DNA
aaaagcagaagacaataagt

SEQ ID NO: 12908 - RNA, 29 nt, Homo sapiens
  source 1..29: mol_type = unassigned RNA
gacacacattctgttgacaagggaaaacc

SEQ ID NO: 12909 - DNA, 29 bp, Homo sapiens
  source 1..29: mol_type = unassigned DNA
gacacacattctgttgacaagggaaaacc

SEQ ID NO: 12910 - DNA, 29 bp, Homo sapiens
  source 1..29: mol_type = unassigned DNA
ggttttcccttgtcaacagaatgtgtgtc

SEQ ID NO: 12911 - RNA, 65 nt, Homo sapiens
  source 1..65: mol_type = unassigned RNA
attgatgtgcttttgtttcagtctctcaaatgatgattctgtagatgtctgagtagttactttaa

SEQ ID NO: 12912 - DNA, 65 bp, Homo sapiens
  source 1..65: mol_type = unassigned DNA
attgatgtgcttttgtttcagtctctcaaatgatgattctgtagatgtctgagtagttactttaa

SEQ ID NO: 12913 - DNA, 65 bp, Homo sapiens
  source 1..65: mol_type = unassigned DNA
ttaaagtaactactcagacatctacagaatcatcatttgagagactgaaacaaaagcacatcaat

SEQ ID NO: 12914 - RNA, 94 nt, Homo sapiens
  source 1..94: mol_type = unassigned RNA
accttctggtggctgccaactcttcttgaactgtggctacatcactctaatctctgcctccgtagtcgcatttcctcctcctcttctgcttgtg

SEQ ID NO: 12915 - DNA, 94 bp, Homo sapiens
  source 1..94: mol_type = unassigned DNA
accttctggtggctgccaactcttcttgaactgtggctacatcactctaatctctgcctccgtagtcgcatttcctcctcctcttctgcttgtg

SEQ ID NO: 12916 - DNA, 94 bp, Homo sapiens
  source 1..94: mol_type = unassigned DNA
cacaagcagaagaggaggaggaaatgcgactacggaggcagagattagagtgatgtagccacagttcaagaagagttggcagccaccagaaggt

SEQ ID NO: 12917 - RNA, 30 nt, Homo sapiens
  source 1..30: mol_type = unassigned RNA
tagctcactgtaggctagcctctgcttact

SEQ ID NO: 12918 - DNA, 30 bp, Homo sapiens
  source 1..30: mol_type = unassigned DNA
tagctcactgtaggctagcctctgcttact

SEQ ID NO: 12919 - DNA, 30 bp, Homo sapiens
  source 1..30: mol_type = unassigned DNA
agtaagcagaggctagcctacagtgagcta

SEQ ID NO: 12920 - RNA, 30 nt, Homo sapiens
  source 1..30: mol_type = unassigned RNA
cacccccagtaggacttgtgtgtcggcaga

SEQ ID NO: 12921 - DNA, 30 bp, Homo sapiens
  source 1..30: mol_type = unassigned DNA
cacccccagtaggacttgtgtgtcggcaga

SEQ ID NO: 12922 - DNA, 30 bp, Homo sapiens
  source 1..30: mol_type = unassigned DNA
tctgccgacacacaagtcctactgggggtg

SEQ ID NO: 12923 - RNA, 35 nt, Homo sapiens
  source 1..35: mol_type = unassigned RNA
cccttctttggccatactctgaacattatctcaga

SEQ ID NO: 12924 - DNA, 35 bp, Homo sapiens
  source 1..35: mol_type = unassigned DNA
cccttctttggccatactctgaacattatctcaga

SEQ ID NO: 12925 - DNA, 35 bp, Homo sapiens
  source 1..35: mol_type = unassigned DNA
tctgagataatgttcagagtatggccaaagaaggg

SEQ ID NO: 12926 - RNA, 64 nt, Homo sapiens
  source 1..64: mol_type = unassigned RNA
agaattggatttgactaagcagatctggatttaaattctggatagaagaacctgcgcaatttgc

SEQ ID NO: 12927 - DNA, 64 bp, Homo sapiens
  source 1..64: mol_type = unassigned DNA
agaattggatttgactaagcagatctggatttaaattctggatagaagaacctgcgcaatttgc

SEQ ID NO: 12928 - DNA, 64 bp, Homo sapiens
  source 1..64: mol_type = unassigned DNA
gcaaattgcgcaggttcttctatccagaatttaaatccagatctgcttagtcaaatccaattct

SEQ ID NO: 12929 - RNA, 29 nt, Homo sapiens
  source 1..29: mol_type = unassigned RNA
agcgtctctgcagggggagcaagagctgc

SEQ ID NO: 12930 - DNA, 29 bp, Homo sapiens
  source 1..29: mol_type = unassigned DNA
agcgtctctgcagggggagcaagagctgc

SEQ ID NO: 12931 - DNA, 29 bp, Homo sapiens
  source 1..29: mol_type = unassigned DNA
gcagctcttgctccccctgcagagacgct

SEQ ID NO: 12932 - RNA, 76 nt, Homo sapiens
  source 1..76: mol_type = unassigned RNA
ctcttcgccaaagccgagcttgatcagaactctgagctcctatctcttatctctgtgcctgtgtctgtgactcagc

SEQ ID NO: 12933 - DNA, 76 bp, Homo sapiens
  source 1..76: mol_type = unassigned DNA
ctcttcgccaaagccgagcttgatcagaactctgagctcctatctcttatctctgtgcctgtgtctgtgactcagc

SEQ ID NO: 12934 - DNA, 76 bp, Homo sapiens
  source 1..76: mol_type = unassigned DNA
gctgagtcacagacacaggcacagagataagagataggagctcagagttctgatcaagctcggctttggcgaagag

SEQ ID NO: 12935 - RNA, 120 nt, Homo sapiens
  source 1..120: mol_type = unassigned RNA
gcgttcttactcttaaatttcaggcagttccttttagtcttgacagtgttgcaaattccattcactccttattttctgaggaaactcctgttgttttgcagttggctcccagtgaggaag

SEQ ID NO: 12936 - DNA, 120 bp, Homo sapiens
  source 1..120: mol_type = unassigned DNA
gcgttcttactcttaaatttcaggcagttccttttagtcttgacagtgttgcaaattccattcactccttattttctgaggaaactcctgttgttttgcagttggctcccagtgaggaag

SEQ ID NO: 12937 - DNA, 120 bp, Homo sapiens
  source 1..120: mol_type = unassigned DNA
cttcctcactgggagccaactgcaaaacaacaggagtttcctcagaaaataaggagtgaatggaatttgcaacactgtcaagactaaaaggaactgcctgaaatttaagagtaagaacgc

SEQ ID NO: 12938 - RNA, 30 nt, Homo sapiens
  source 1..30: mol_type = unassigned RNA
aagcctcctcaccaggtcagtggcgccaag

SEQ ID NO: 12939 - DNA, 30 bp, Homo sapiens
  source 1..30: mol_type = unassigned DNA
aagcctcctcaccaggtcagtggcgccaag

SEQ ID NO: 12940 - DNA, 30 bp, Homo sapiens
  source 1..30: mol_type = unassigned DNA
cttggcgccactgacctggtgaggaggctt

SEQ ID NO: 12941 - RNA, 72 nt, Homo sapiens
  source 1..72: mol_type = unassigned RNA
cccataatgagtttttcatgtgcttatttgtcatctgtatctcttcttcatgtttttgcccattttggatta

SEQ ID NO: 12942 - DNA, 72 bp, Homo sapiens
  source 1..72: mol_type = unassigned DNA
cccataatgagtttttcatgtgcttatttgtcatctgtatctcttcttcatgtttttgcccattttggatta

SEQ ID NO: 12943 - DNA, 72 bp, Homo sapiens
  source 1..72: mol_type = unassigned DNA
taatccaaaatgggcaaaaacatgaagaagagatacagatgacaaataagcacatgaaaaactcattatggg

SEQ ID NO: 12944 - RNA, 29 nt, Homo sapiens
  source 1..29: mol_type = unassigned RNA
caccgccctgaacactatcaccgacgtaa

SEQ ID NO: 12945 - DNA, 29 bp, Homo sapiens
  source 1..29: mol_type = unassigned DNA
caccgccctgaacactatcaccgacgtaa

SEQ ID NO: 12946 - DNA, 29 bp, Homo sapiens
  source 1..29: mol_type = unassigned DNA
ttacgtcggtgatagtgttcagggcggtg

SEQ ID NO: 12947 - RNA, 183 nt, Homo sapiens
  source 1..183: mol_type = unassigned RNA
ctgcatttcaccacagaggtggcaactcattttttcgagaacgctgtcagctgcagtgagctcttctctttctttcgcctgttaaacttctactcgtaacctcactctggtgtgtccgtatcctagttttccattgctgttgagacaacaaatctcggatatttaccccagacaatgacgccg

SEQ ID NO: 12948 - DNA, 183 bp, Homo sapiens
  source 1..183: mol_type = unassigned DNA
ctgcatttcaccacagaggtggcaactcattttttcgagaacgctgtcagctgcagtgagctcttctctttctttcgcctgttaaacttctactcgtaacctcactctggtgtgtccgtatcctagttttccattgctgttgagacaacaaatctcggatatttaccccagacaatgacgccg

SEQ ID NO: 12949 - DNA, 183 bp, Homo sapiens
  source 1..183: mol_type = unassigned DNA
cggcgtcattgtctggggtaaatatccgagatttgttgtctcaacagcaatggaaaactaggatacggacacaccagagtgaggttacgagtagaagtttaacaggcgaaagaaagagaagagctcactgcagctgacagcgttctcgaaaaaatgagttgccacctctgtggtgaaatgcag

SEQ ID NO: 12950 - RNA, 30 nt, Homo sapiens
  source 1..30: mol_type = unassigned RNA
aaccttctgacacaaaacttgagccacttg

SEQ ID NO: 12951 - DNA, 30 bp, Homo sapiens
  source 1..30: mol_type = unassigned DNA
aaccttctgacacaaaacttgagccacttg

SEQ ID NO: 12952 - DNA, 30 bp, Homo sapiens
  source 1..30: mol_type = unassigned DNA
caagtggctcaagttttgtgtcagaaggtt

SEQ ID NO: 12953 - RNA, 68 nt, Homo sapiens
  source 1..68: mol_type = unassigned RNA
ctctgactctcagggccctgctctgccttctgtgctcagcagttgtttcggattgggagtcaggaggc

SEQ ID NO: 12954 - DNA, 68 bp, Homo sapiens
  source 1..68: mol_type = unassigned DNA
ctctgactctcagggccctgctctgccttctgtgctcagcagttgtttcggattgggagtcaggaggc

SEQ ID NO: 12955 - DNA, 68 bp, Homo sapiens
  source 1..68: mol_type = unassigned DNA
gcctcctgactcccaatccgaaacaactgctgagcacagaaggcagagcagggccctgagagtcagag

SEQ ID NO: 12956 - RNA, 100 nt, Homo sapiens
  source 1..100: mol_type = unassigned RNA
cagactactgtcagaggatgtaggaatggacatcccctttgaagagggcgtgctgagtcccagtgctgcagacatgaggcctggtgagagcagcatttgt

SEQ ID NO: 12957 - DNA, 100 bp, Homo sapiens
  source 1..100: mol_type = unassigned DNA
cagactactgtcagaggatgtaggaatggacatcccctttgaagagggcgtgctgagtcccagtgctgcagacatgaggcctggtgagagcagcatttgt

SEQ ID NO: 12958 - DNA, 100 bp, Homo sapiens
  source 1..100: mol_type = unassigned DNA
acaaatgctgctctcaccaggcctcatgtctgcagcactgggactcagcacgccctcttcaaaggggatgtccattcctacatcctctgacagtagtctg

SEQ ID NO: 12959 - RNA, 26 nt, Homo sapiens
  source 1..26: mol_type = unassigned RNA
gctgttcttgtgatagcggctaagtt

SEQ ID NO: 12960 - DNA, 26 bp, Homo sapiens
  source 1..26: mol_type = unassigned DNA
gctgttcttgtgatagcggctaagtt

SEQ ID NO: 12961 - DNA, 26 bp, Homo sapiens
  source 1..26: mol_type = unassigned DNA
aacttagccgctatcacaagaacagc

SEQ ID NO: 12962 - RNA, 30 nt, Homo sapiens
  source 1..30: mol_type = unassigned RNA
tatccattttgaacctggagaagaccattc

SEQ ID NO: 12963 - DNA, 30 bp, Homo sapiens
  source 1..30: mol_type = unassigned DNA
tatccattttgaacctggagaagaccattc

SEQ ID NO: 12964 - DNA, 30 bp, Homo sapiens
  source 1..30: mol_type = unassigned DNA
gaatggtcttctccaggttcaaaatggata

SEQ ID NO: 12965 - RNA, 29 nt, Homo sapiens
  source 1..29: mol_type = unassigned RNA
ttcattatactgtagatctggcacctctg

SEQ ID NO: 12966 - DNA, 29 bp, Homo sapiens
  source 1..29: mol_type = unassigned DNA
ttcattatactgtagatctggcacctctg

SEQ ID NO: 12967 - DNA, 29 bp, Homo sapiens
  source 1..29: mol_type = unassigned DNA
cagaggtgccagatctacagtataatgaa

SEQ ID NO: 12968 - RNA, 46 nt, Homo sapiens
  source 1..46: mol_type = unassigned RNA
tcacttcaaatgttgtctctgaccctttcctctctcttctgcttgt

SEQ ID NO: 12969 - DNA, 46 bp, Homo sapiens
  source 1..46: mol_type = unassigned DNA
tcacttcaaatgttgtctctgaccctttcctctctcttctgcttgt

SEQ ID NO: 12970 - DNA, 46 bp, Homo sapiens
  source 1..46: mol_type = unassigned DNA
acaagcagaagagagaggaaagggtcagagacaacatttgaagtga

SEQ ID NO: 12971 - RNA, 75 nt, Homo sapiens
  source 1..75: mol_type = unassigned RNA
aaaaatgaatcatctatccggtcctgggagagaggacctatagagagttctgcacctagagcagccccagccttg

SEQ ID NO: 12972 - DNA, 75 bp, Homo sapiens
  source 1..75: mol_type = unassigned DNA
aaaaatgaatcatctatccggtcctgggagagaggacctatagagagttctgcacctagagcagccccagccttg

SEQ ID NO: 12973 - DNA, 75 bp, Homo sapiens
  source 1..75: mol_type = unassigned DNA
caaggctggggctgctctaggtgcagaactctctataggtcctctctcccaggaccggatagatgattcattttt

SEQ ID NO: 12974 - RNA, 45 nt, Homo sapiens
  source 1..45: mol_type = unassigned RNA
actaaatagaaagcaccatttgctgtgtgtgtgacagtactgatt

SEQ ID NO: 12975 - DNA, 45 bp, Homo sapiens
  source 1..45: mol_type = unassigned DNA
actaaatagaaagcaccatttgctgtgtgtgtgacagtactgatt

SEQ ID NO: 12976 - DNA, 45 bp, Homo sapiens
  source 1..45: mol_type = unassigned DNA
aatcagtactgtcacacacacagcaaatggtgctttctatttagt

SEQ ID NO: 12977 - RNA, 22 nt, Homo sapiens
  source 1..22: mol_type = unassigned RNA
tcagctctgggtcttggaaaat

SEQ ID NO: 12978 - DNA, 22 bp, Homo sapiens
  source 1..22: mol_type = unassigned DNA
tcagctctgggtcttggaaaat

SEQ ID NO: 12979 - DNA, 22 bp, Homo sapiens
  source 1..22: mol_type = unassigned DNA
attttccaagacccagagctga

SEQ ID NO: 12980 - RNA, 40 nt, Homo sapiens
  source 1..40: mol_type = unassigned RNA
caacgtcagccctctgaagaacacacagtgcccatctggt

SEQ ID NO: 12981 - DNA, 40 bp, Homo sapiens
  source 1..40: mol_type = unassigned DNA
caacgtcagccctctgaagaacacacagtgcccatctggt

SEQ ID NO: 12982 - DNA, 40 bp, Homo sapiens
  source 1..40: mol_type = unassigned DNA
accagatgggcactgtgtgttcttcagagggctgacgttg

SEQ ID NO: 12983 - RNA, 32 nt, Homo sapiens
  source 1..32: mol_type = unassigned RNA
gccgttgcaggcttctccaactggacctcaaa

SEQ ID NO: 12984 - DNA, 32 bp, Homo sapiens
  source 1..32: mol_type = unassigned DNA
gccgttgcaggcttctccaactggacctcaaa

SEQ ID NO: 12985 - DNA, 32 bp, Homo sapiens
  source 1..32: mol_type = unassigned DNA
tttgaggtccagttggagaagcctgcaacggc

SEQ ID NO: 12986 - RNA, 168 nt, Homo sapiens
  source 1..168: mol_type = unassigned RNA
ggagattccgcccaatcgccctggagggcaaggtacaacttcctggttatcccaagtccttgctcctcctcgctggcttggcctcttctggctcagtcaaagccagggtggctaccagccacagtagtgtggtttctgccctggcccctggtcccctagcgtacacat

SEQ ID NO: 12987 - DNA, 168 bp, Homo sapiens
  source 1..168: mol_type = unassigned DNA
ggagattccgcccaatcgccctggagggcaaggtacaacttcctggttatcccaagtccttgctcctcctcgctggcttggcctcttctggctcagtcaaagccagggtggctaccagccacagtagtgtggtttctgccctggcccctggtcccctagcgtacacat

SEQ ID NO: 12988 - DNA, 168 bp, Homo sapiens
  source 1..168: mol_type = unassigned DNA
atgtgtacgctaggggaccaggggccagggcagaaaccacactactgtggctggtagccaccctggctttgactgagccagaagaggccaagccagcgaggaggagcaaggacttgggataaccaggaagttgtaccttgccctccagggcgattgggcggaatctcc

SEQ ID NO: 12989 - RNA, 49 nt, Homo sapiens
  source 1..49: mol_type = unassigned RNA
gagttcttcttcttctgcttgtcgggccccttgtctctcttccccactc

SEQ ID NO: 12990 - DNA, 49 bp, Homo sapiens
  source 1..49: mol_type = unassigned DNA
gagttcttcttcttctgcttgtcgggccccttgtctctcttccccactc

SEQ ID NO: 12991 - DNA, 49 bp, Homo sapiens
  source 1..49: mol_type = unassigned DNA
gagtggggaagagagacaaggggcccgacaagcagaagaagaagaactc

SEQ ID NO: 12992 - RNA, 37 nt, Homo sapiens
  source 1..37: mol_type = unassigned RNA
taaaccaggtccccgctgtccgtgagttttgccctgt

SEQ ID NO: 12993 - DNA, 37 bp, Homo sapiens
  source 1..37: mol_type = unassigned DNA
taaaccaggtccccgctgtccgtgagttttgccctgt

SEQ ID NO: 12994 - DNA, 37 bp, Homo sapiens
  source 1..37: mol_type = unassigned DNA
acagggcaaaactcacggacagcggggacctggttta

SEQ ID NO: 12995 - RNA, 57 nt, Homo sapiens
  source 1..57: mol_type = unassigned RNA
ttctttttctttggcttctgtgattccatattttcctctctcttctgcttgttccga

SEQ ID NO: 12996 - DNA, 57 bp, Homo sapiens
  source 1..57: mol_type = unassigned DNA
ttctttttctttggcttctgtgattccatattttcctctctcttctgcttgttccga

SEQ ID NO: 12997 - DNA, 57 bp, Homo sapiens
  source 1..57: mol_type = unassigned DNA
tcggaacaagcagaagagagaggaaaatatggaatcacagaagccaaagaaaaagaa

SEQ ID NO: 12998 - RNA, 23 nt, Homo sapiens
  source 1..23: mol_type = unassigned RNA
ctcaagattctcttctgcttgtg

SEQ ID NO: 12999 - DNA, 23 bp, Homo sapiens
  source 1..23: mol_type = unassigned DNA
ctcaagattctcttctgcttgtg

SEQ ID NO: 13000 - DNA, 23 bp, Homo sapiens
  source 1..23: mol_type = unassigned DNA
cacaagcagaagagaatcttgag

SEQ ID NO: 13001 - RNA, 28 nt, Homo sapiens
  source 1..28: mol_type = unassigned RNA
aaagatttccagttccctctgagcttac

SEQ ID NO: 13002 - DNA, 28 bp, Homo sapiens
  source 1..28: mol_type = unassigned DNA
aaagatttccagttccctctgagcttac

SEQ ID NO: 13003 - DNA, 28 bp, Homo sapiens
  source 1..28: mol_type = unassigned DNA
gtaagctcagagggaactggaaatcttt

SEQ ID NO: 13004 - RNA, 56 nt, Homo sapiens
  source 1..56: mol_type = unassigned RNA
ccagcactcccttggcttccccagctagtgtctcagtatggaactttcccccctaa

SEQ ID NO: 13005 - DNA, 56 bp, Homo sapiens
  source 1..56: mol_type = unassigned DNA
ccagcactcccttggcttccccagctagtgtctcagtatggaactttcccccctaa

SEQ ID NO: 13006 - DNA, 56 bp, Homo sapiens
  source 1..56: mol_type = unassigned DNA
ttaggggggaaagttccatactgagacactagctggggaagccaagggagtgctgg

SEQ ID NO: 13007 - RNA, 48 nt, Homo sapiens
  source 1..48: mol_type = unassigned RNA
cagcatttgaatcaggtctgtgaaacgcataaagaccaaaacactaat

SEQ ID NO: 13008 - DNA, 48 bp, Homo sapiens
  source 1..48: mol_type = unassigned DNA
cagcatttgaatcaggtctgtgaaacgcataaagaccaaaacactaat

SEQ ID NO: 13009 - DNA, 48 bp, Homo sapiens
  source 1..48: mol_type = unassigned DNA
attagtgttttggtctttatgcgtttcacagacctgattcaaatgctg

SEQ ID NO: 13010 - RNA, 40 nt, Homo sapiens
  source 1..40: mol_type = unassigned RNA
cacattagagtctctccctccatttcgcatcccagtagat

SEQ ID NO: 13011 - DNA, 40 bp, Homo sapiens
  source 1..40: mol_type = unassigned DNA
cacattagagtctctccctccatttcgcatcccagtagat

SEQ ID NO: 13012 - DNA, 40 bp, Homo sapiens
  source 1..40: mol_type = unassigned DNA
atctactgggatgcgaaatggagggagagactctaatgtg

SEQ ID NO: 13013 - RNA, 26 nt, Homo sapiens
  source 1..26: mol_type = unassigned RNA
gcaaagccaagaaccttcccaggtgg

SEQ ID NO: 13014 - DNA, 26 bp, Homo sapiens
  source 1..26: mol_type = unassigned DNA
gcaaagccaagaaccttcccaggtgg

SEQ ID NO: 13015 - DNA, 26 bp, Homo sapiens
  source 1..26: mol_type = unassigned DNA
ccacctgggaaggttcttggctttgc

SEQ ID NO: 13016 - RNA, 25 nt, Homo sapiens
  source 1..25: mol_type = unassigned RNA
ttgtagcttagcagacttttgaaag

SEQ ID NO: 13017 - DNA, 25 bp, Homo sapiens
  source 1..25: mol_type = unassigned DNA
ttgtagcttagcagacttttgaaag

SEQ ID NO: 13018 - DNA, 25 bp, Homo sapiens
  source 1..25: mol_type = unassigned DNA
ctttcaaaagtctgctaagctacaa

SEQ ID NO: 13019 - RNA, 102 nt, Homo sapiens
  source 1..102: mol_type = unassigned RNA
tccatttagcagcctcaccagaatcactggattctcgtggaggaggaagagcgctccaagggaagaggggaggggacagaagagaggggaaagggtgaccag

SEQ ID NO: 13020 - DNA, 102 bp, Homo sapiens
  source 1..102: mol_type = unassigned DNA
tccatttagcagcctcaccagaatcactggattctcgtggaggaggaagagcgctccaagggaagaggggaggggacagaagagaggggaaagggtgaccag

SEQ ID NO: 13021 - DNA, 102 bp, Homo sapiens
  source 1..102: mol_type = unassigned DNA
ctggtcaccctttcccctctcttctgtcccctcccctcttcccttggagcgctcttcctcctccacgagaatccagtgattctggtgaggctgctaaatgga

SEQ ID NO: 13022 - RNA, 27 nt, Homo sapiens
  source 1..27: mol_type = unassigned RNA
atttcctggaagagccctagagctttg

SEQ ID NO: 13023 - DNA, 27 bp, Homo sapiens
  source 1..27: mol_type = unassigned DNA
atttcctggaagagccctagagctttg

SEQ ID NO: 13024 - DNA, 27 bp, Homo sapiens
  source 1..27: mol_type = unassigned DNA
caaagctctagggctcttccaggaaat

SEQ ID NO: 13025 - RNA, 27 nt, Homo sapiens
  source 1..27: mol_type = unassigned RNA
aggtaattggccagttgcaaaatggaa

SEQ ID NO: 13026 - DNA, 27 bp, Homo sapiens
  source 1..27: mol_type = unassigned DNA
aggtaattggccagttgcaaaatggaa

SEQ ID NO: 13027 - DNA, 27 bp, Homo sapiens
  source 1..27: mol_type = unassigned DNA
ttccattttgcaactggccaattacct

SEQ ID NO: 13028 - RNA, 30 nt, Homo sapiens
  source 1..30: mol_type = unassigned RNA
caacactgggctgatcctgaatggcacagg

SEQ ID NO: 13029 - DNA, 30 bp, Homo sapiens
  source 1..30: mol_type = unassigned DNA
caacactgggctgatcctgaatggcacagg

SEQ ID NO: 13030 - DNA, 30 bp, Homo sapiens
  source 1..30: mol_type = unassigned DNA
cctgtgccattcaggatcagcccagtgttg

SEQ ID NO: 13031 - RNA, 60 nt, Homo sapiens
  source 1..60: mol_type = unassigned RNA
tctggatgattgatcaggaggctattcaagatctctggcagtggaggaagtctctttagg

SEQ ID NO: 13032 - DNA, 60 bp, Homo sapiens
  source 1..60: mol_type = unassigned DNA
tctggatgattgatcaggaggctattcaagatctctggcagtggaggaagtctctttagg

SEQ ID NO: 13033 - DNA, 60 bp, Homo sapiens
  source 1..60: mol_type = unassigned DNA
cctaaagagacttcctccactgccagagatcttgaatagcctcctgatcaatcatccaga

SEQ ID NO: 13034 - RNA, 33 nt, Homo sapiens
  source 1..33: mol_type = unassigned RNA
ttaaggcagtagcttgccgatgaccccagctga

SEQ ID NO: 13035 - DNA, 33 bp, Homo sapiens
  source 1..33: mol_type = unassigned DNA
ttaaggcagtagcttgccgatgaccccagctga

SEQ ID NO: 13036 - DNA, 33 bp, Homo sapiens
  source 1..33: mol_type = unassigned DNA
tcagctggggtcatcggcaagctactgccttaa

SEQ ID NO: 13037 - RNA, 52 nt, Homo sapiens
  source 1..52: mol_type = unassigned RNA
taaaaagtcagccctctgagtaggtatgggctctgggtctggggtaaggggc

SEQ ID NO: 13038 - DNA, 52 bp, Homo sapiens
  source 1..52: mol_type = unassigned DNA
taaaaagtcagccctctgagtaggtatgggctctgggtctggggtaaggggc

SEQ ID NO: 13039 - DNA, 52 bp, Homo sapiens
  source 1..52: mol_type = unassigned DNA
gccccttaccccagacccagagcccatacctactcagagggctgacttttta

SEQ ID NO: 13040 - RNA, 26 nt, Homo sapiens
  source 1..26: mol_type = unassigned RNA
gtgtgagagtatgttcgcatctgtgc

SEQ ID NO: 13041 - DNA, 26 bp, Homo sapiens
  source 1..26: mol_type = unassigned DNA
gtgtgagagtatgttcgcatctgtgc

SEQ ID NO: 13042 - DNA, 26 bp, Homo sapiens
  source 1..26: mol_type = unassigned DNA
gcacagatgcgaacatactctcacac

SEQ ID NO: 13043 - RNA, 28 nt, Homo sapiens
  source 1..28: mol_type = unassigned RNA
attcctctgtctaccgggaggcctggcc

SEQ ID NO: 13044 - DNA, 28 bp, Homo sapiens
  source 1..28: mol_type = unassigned DNA
attcctctgtctaccgggaggcctggcc

SEQ ID NO: 13045 - DNA, 28 bp, Homo sapiens
  source 1..28: mol_type = unassigned DNA
ggccaggcctcccggtagacagaggaat

SEQ ID NO: 13046 - RNA, 22 nt, Homo sapiens
  source 1..22: mol_type = unassigned RNA
atacgtacctcttctgcctgtg

SEQ ID NO: 13047 - DNA, 22 bp, Homo sapiens
  source 1..22: mol_type = unassigned DNA
atacgtacctcttctgcctgtg

SEQ ID NO: 13048 - DNA, 22 bp, Homo sapiens
  source 1..22: mol_type = unassigned DNA
cacaggcagaagaggtacgtat

SEQ ID NO: 13049 - RNA, 82 nt, Homo sapiens
  source 1..82: mol_type = unassigned RNA
gagatgtatttcttggacttgctgagaaaggctccatcccactgatggatgttggctgtgctggcagctccgcataatggaa

SEQ ID NO: 13050 - DNA, 82 bp, Homo sapiens
  source 1..82: mol_type = unassigned DNA
gagatgtatttcttggacttgctgagaaaggctccatcccactgatggatgttggctgtgctggcagctccgcataatggaa

SEQ ID NO: 13051 - DNA, 82 bp, Homo sapiens
  source 1..82: mol_type = unassigned DNA
ttccattatgcggagctgccagcacagccaacatccatcagtgggatggagcctttctcagcaagtccaagaaatacatctc

SEQ ID NO: 13052 - RNA, 112 nt, Homo sapiens
  source 1..112: mol_type = unassigned RNA
caattgtcttagatagtgagatgatatagaagtgtcataaattgaagtaaagacagcagattgttaattaccagcatatacctaaaaggtctgacctgttaagtgacaactt

SEQ ID NO: 13053 - DNA, 112 bp, Homo sapiens
  source 1..112: mol_type = unassigned DNA
caattgtcttagatagtgagatgatatagaagtgtcataaattgaagtaaagacagcagattgttaattaccagcatatacctaaaaggtctgacctgttaagtgacaactt

SEQ ID NO: 13054 - DNA, 112 bp, Homo sapiens
  source 1..112: mol_type = unassigned DNA
aagttgtcacttaacaggtcagaccttttaggtatatgctggtaattaacaatctgctgtctttacttcaatttatgacacttctatatcatctcactatctaagacaattg

SEQ ID NO: 13055 - RNA, 32 nt, Homo sapiens
  source 1..32: mol_type = unassigned RNA
ctcactctgcctctctcttgttccccagctgc

SEQ ID NO: 13056 - DNA, 32 bp, Homo sapiens
  source 1..32: mol_type = unassigned DNA
ctcactctgcctctctcttgttccccagctgc

SEQ ID NO: 13057 - DNA, 32 bp, Homo sapiens
  source 1..32: mol_type = unassigned DNA
gcagctggggaacaagagagaggcagagtgag

SEQ ID NO: 13058 - RNA, 62 nt, Homo sapiens
  source 1..62: mol_type = unassigned RNA
ctggacagagccatgctttccatgtgacagtgtatcatgtagaccaagcagtatgtcgacac

SEQ ID NO: 13059 - DNA, 62 bp, Homo sapiens
  source 1..62: mol_type = unassigned DNA
ctggacagagccatgctttccatgtgacagtgtatcatgtagaccaagcagtatgtcgacac

SEQ ID NO: 13060 - DNA, 62 bp, Homo sapiens
  source 1..62: mol_type = unassigned DNA
gtgtcgacatactgcttggtctacatgatacactgtcacatggaaagcatggctctgtccag

SEQ ID NO: 13061 - RNA, 27 nt, Homo sapiens
  source 1..27: mol_type = unassigned RNA
aagtgcagtatcctctgacagacatgt

SEQ ID NO: 13062 - DNA, 27 bp, Homo sapiens
  source 1..27: mol_type = unassigned DNA
aagtgcagtatcctctgacagacatgt

SEQ ID NO: 13063 - DNA, 27 bp, Homo sapiens
  source 1..27: mol_type = unassigned DNA
acatgtctgtcagaggatactgcactt

SEQ ID NO: 13064 - RNA, 30 nt, Homo sapiens
  source 1..30: mol_type = unassigned RNA
tcttgaagtttttggccagaataggaaata

SEQ ID NO: 13065 - DNA, 30 bp, Homo sapiens
  source 1..30: mol_type = unassigned DNA
tcttgaagtttttggccagaataggaaata

SEQ ID NO: 13066 - DNA, 30 bp, Homo sapiens
  source 1..30: mol_type = unassigned DNA
tatttcctattctggccaaaaacttcaaga

SEQ ID NO: 13067 - RNA, 76 nt, Homo sapiens
  source 1..76: mol_type = unassigned RNA
cagagtcttgctctgttgcctagtctggagagctctgcagcctctgcctctcgggttcaagtgattctcctgcctc

SEQ ID NO: 13068 - DNA, 76 bp, Homo sapiens
  source 1..76: mol_type = unassigned DNA
cagagtcttgctctgttgcctagtctggagagctctgcagcctctgcctctcgggttcaagtgattctcctgcctc

SEQ ID NO: 13069 - DNA, 76 bp, Homo sapiens
  source 1..76: mol_type = unassigned DNA
gaggcaggagaatcacttgaacccgagaggcagaggctgcagagctctccagactaggcaacagagcaagactctg

SEQ ID NO: 13070 - RNA, 30 nt, Homo sapiens
  source 1..30: mol_type = unassigned RNA
tatacatgatgaccttttattagactgagg

SEQ ID NO: 13071 - DNA, 30 bp, Homo sapiens
  source 1..30: mol_type = unassigned DNA
tatacatgatgaccttttattagactgagg

SEQ ID NO: 13072 - DNA, 30 bp, Homo sapiens
  source 1..30: mol_type = unassigned DNA
cctcagtctaataaaaggtcatcatgtata

SEQ ID NO: 13073 - RNA, 108 nt, Homo sapiens
  source 1..108: mol_type = unassigned RNA
gttaaggactccaacattattttaattgtcccagcttcaaatattacaggtatctttacttataccttcagatttaatggtcatgtccatctcgttgccagaattaag

SEQ ID NO: 13074 - DNA, 108 bp, Homo sapiens
  source 1..108: mol_type = unassigned DNA
gttaaggactccaacattattttaattgtcccagcttcaaatattacaggtatctttacttataccttcagatttaatggtcatgtccatctcgttgccagaattaag

SEQ ID NO: 13075 - DNA, 108 bp, Homo sapiens
  source 1..108: mol_type = unassigned DNA
cttaattctggcaacgagatggacatgaccattaaatctgaaggtataagtaaagatacctgtaatatttgaagctgggacaattaaaataatgttggagtccttaac

SEQ ID NO: 13076 - RNA, 24 nt, Homo sapiens
  source 1..24: mol_type = unassigned RNA
gattctctttggtcttttgcttgt

SEQ ID NO: 13077 - DNA, 24 bp, Homo sapiens
  source 1..24: mol_type = unassigned DNA
gattctctttggtcttttgcttgt

SEQ ID NO: 13078 - DNA, 24 bp, Homo sapiens
  source 1..24: mol_type = unassigned DNA
acaagcaaaagaccaaagagaatc

SEQ ID NO: 13079 - RNA, 34 nt, Homo sapiens
  source 1..34: mol_type = unassigned RNA
acatgcatgttttagtgctctggggcaatggaat

SEQ ID NO: 13080 - DNA, 34 bp, Homo sapiens
  source 1..34: mol_type = unassigned DNA
acatgcatgttttagtgctctggggcaatggaat

SEQ ID NO: 13081 - DNA, 34 bp, Homo sapiens
  source 1..34: mol_type = unassigned DNA
attccattgccccagagcactaaaacatgcatgt

SEQ ID NO: 13082 - RNA, 30 nt, Homo sapiens
  source 1..30: mol_type = unassigned RNA
ccatcagctctatgagaaatgcccagaaag

SEQ ID NO: 13083 - DNA, 30 bp, Homo sapiens
  source 1..30: mol_type = unassigned DNA
ccatcagctctatgagaaatgcccagaaag

SEQ ID NO: 13084 - DNA, 30 bp, Homo sapiens
  source 1..30: mol_type = unassigned DNA
ctttctgggcatttctcatagagctgatgg

SEQ ID NO: 13085 - RNA, 95 nt, Homo sapiens
  source 1..95: mol_type = unassigned RNA
acacaggaatgacccacactgtccatttcccatccagatctctctctctatctctgtgttgaactctggactcatatatccaactatctcccacc

SEQ ID NO: 13086 - DNA, 95 bp, Homo sapiens
  source 1..95: mol_type = unassigned DNA
acacaggaatgacccacactgtccatttcccatccagatctctctctctatctctgtgttgaactctggactcatatatccaactatctcccacc

SEQ ID NO: 13087 - DNA, 95 bp, Homo sapiens
  source 1..95: mol_type = unassigned DNA
ggtgggagatagttggatatatgagtccagagttcaacacagagatagagagagagatctggatgggaaatggacagtgtgggtcattcctgtgt

SEQ ID NO: 13088 - RNA, 29 nt, Homo sapiens
  source 1..29: mol_type = unassigned RNA
ctctcccgggtcaagggtctccaggtccc

SEQ ID NO: 13089 - DNA, 29 bp, Homo sapiens
  source 1..29: mol_type = unassigned DNA
ctctcccgggtcaagggtctccaggtccc

SEQ ID NO: 13090 - DNA, 29 bp, Homo sapiens
  source 1..29: mol_type = unassigned DNA
gggacctggagacccttgacccgggagag

SEQ ID NO: 13091 - RNA, 35 nt, Homo sapiens
  source 1..35: mol_type = unassigned RNA
gcagctgtgtgactttggacaaatgacttaatctc

SEQ ID NO: 13092 - DNA, 35 bp, Homo sapiens
  source 1..35: mol_type = unassigned DNA
gcagctgtgtgactttggacaaatgacttaatctc

SEQ ID NO: 13093 - DNA, 35 bp, Homo sapiens
  source 1..35: mol_type = unassigned DNA
gagattaagtcatttgtccaaagtcacacagctgc

SEQ ID NO: 13094 - RNA, 44 nt, Homo sapiens
  source 1..44: mol_type = unassigned RNA
gtcccttgtgctaaggcatgaagtcgctgtgggtgagttttcaa

SEQ ID NO: 13095 - DNA, 44 bp, Homo sapiens
  source 1..44: mol_type = unassigned DNA
gtcccttgtgctaaggcatgaagtcgctgtgggtgagttttcaa

SEQ ID NO: 13096 - DNA, 44 bp, Homo sapiens
  source 1..44: mol_type = unassigned DNA
ttgaaaactcacccacagcgacttcatgccttagcacaagggac

SEQ ID NO: 13097 - RNA, 28 nt, Homo sapiens
  source 1..28: mol_type = unassigned RNA
ccagaaagctgtgggccctgggatactc

SEQ ID NO: 13098 - DNA, 28 bp, Homo sapiens
  source 1..28: mol_type = unassigned DNA
ccagaaagctgtgggccctgggatactc

SEQ ID NO: 13099 - DNA, 28 bp, Homo sapiens
  source 1..28: mol_type = unassigned DNA
gagtatcccagggcccacagctttctgg

SEQ ID NO: 13100 - RNA, 30 nt, Homo sapiens
  source 1..30: mol_type = unassigned RNA
tctggtgcatcaagctttgaaccacgatct

SEQ ID NO: 13101 - DNA, 30 bp, Homo sapiens
  source 1..30: mol_type = unassigned DNA
tctggtgcatcaagctttgaaccacgatct

SEQ ID NO: 13102 - DNA, 30 bp, Homo sapiens
  source 1..30: mol_type = unassigned DNA
agatcgtggttcaaagcttgatgcaccaga

SEQ ID NO: 13103 - RNA, 175 nt, Homo sapiens
  source 1..175: mol_type = unassigned RNA
ttctggaagcacgtaaccttgaaatctaagctgctcacaagaaggatgtagttcagaagctcagcaagcccacatttcctcaggactggaaacaaccaactacaaatctgtttcatggttctaggcaacagcagcacaaaaacacatgaaacgtattctgaatagagcacatcct

SEQ ID NO: 13104 - DNA, 175 bp, Homo sapiens
  source 1..175: mol_type = unassigned DNA
ttctggaagcacgtaaccttgaaatctaagctgctcacaagaaggatgtagttcagaagctcagcaagcccacatttcctcaggactggaaacaaccaactacaaatctgtttcatggttctaggcaacagcagcacaaaaacacatgaaacgtattctgaatagagcacatcct

SEQ ID NO: 13105 - DNA, 175 bp, Homo sapiens
  source 1..175: mol_type = unassigned DNA
aggatgtgctctattcagaatacgtttcatgtgtttttgtgctgctgttgcctagaaccatgaaacagatttgtagttggttgtttccagtcctgaggaaatgtgggcttgctgagcttctgaactacatccttcttgtgagcagcttagatttcaaggttacgtgcttccagaa

SEQ ID NO: 13106 - RNA, 47 nt, Homo sapiens
  source 1..47: mol_type = unassigned RNA
tccattggaactcctgcatcccacagctcctgcttcttctgcttgtc

SEQ ID NO: 13107 - DNA, 47 bp, Homo sapiens
  source 1..47: mol_type = unassigned DNA
tccattggaactcctgcatcccacagctcctgcttcttctgcttgtc

SEQ ID NO: 13108 - DNA, 47 bp, Homo sapiens
  source 1..47: mol_type = unassigned DNA
gacaagcagaagaagcaggagctgtgggatgcaggagttccaatgga

SEQ ID NO: 13109 - RNA, 162 nt, Homo sapiens
  source 1..162: mol_type = unassigned RNA
aaaaacttccccttaaacacatagaattgcattggtatattccttcagaggcaggtttaatccaatcctctgaagtggaggtctgggtgtatttccagcatcaagttctactgttacctgaaatattttagatgattgaggcaagggttcttgttttttcag

SEQ ID NO: 13110 - DNA, 162 bp, Homo sapiens
  source 1..162: mol_type = unassigned DNA
aaaaacttccccttaaacacatagaattgcattggtatattccttcagaggcaggtttaatccaatcctctgaagtggaggtctgggtgtatttccagcatcaagttctactgttacctgaaatattttagatgattgaggcaagggttcttgttttttcag

SEQ ID NO: 13111 - DNA, 162 bp, Homo sapiens
  source 1..162: mol_type = unassigned DNA
ctgaaaaaacaagaacccttgcctcaatcatctaaaatatttcaggtaacagtagaacttgatgctggaaatacacccagacctccacttcagaggattggattaaacctgcctctgaaggaatataccaatgcaattctatgtgtttaaggggaagttttt

SEQ ID NO: 13112 - RNA, 65 nt, Homo sapiens
  source 1..65: mol_type = unassigned RNA
gcagtggagaagcgagtccatcacatgcctgggtagctgccgtgttggcctaatgcaccacagcc

SEQ ID NO: 13113 - DNA, 65 bp, Homo sapiens
  source 1..65: mol_type = unassigned DNA
gcagtggagaagcgagtccatcacatgcctgggtagctgccgtgttggcctaatgcaccacagcc

SEQ ID NO: 13114 - DNA, 65 bp, Homo sapiens
  source 1..65: mol_type = unassigned DNA
ggctgtggtgcattaggccaacacggcagctacccaggcatgtgatggactcgcttctccactgc

SEQ ID NO: 13115 - RNA, 29 nt, Homo sapiens
  source 1..29: mol_type = unassigned RNA
cagcctctgaggccctttgacctgcaggt

SEQ ID NO: 13116 - DNA, 29 bp, Homo sapiens
  source 1..29: mol_type = unassigned DNA
cagcctctgaggccctttgacctgcaggt

SEQ ID NO: 13117 - DNA, 29 bp, Homo sapiens
  source 1..29: mol_type = unassigned DNA
acctgcaggtcaaagggcctcagaggctg

SEQ ID NO: 13118 - RNA, 28 nt, Homo sapiens
  source 1..28: mol_type = unassigned RNA
attgccttggtagaacaaaagactgctc

SEQ ID NO: 13119 - DNA, 28 bp, Homo sapiens
  source 1..28: mol_type = unassigned DNA
attgccttggtagaacaaaagactgctc

SEQ ID NO: 13120 - DNA, 28 bp, Homo sapiens
  source 1..28: mol_type = unassigned DNA
gagcagtcttttgttctaccaaggcaat

SEQ ID NO: 13121 - RNA, 33 nt, Homo sapiens
  source 1..33: mol_type = unassigned RNA
gacgccagccaagacgtcggctccggaacgcat

SEQ ID NO: 13122 - DNA, 33 bp, Homo sapiens
  source 1..33: mol_type = unassigned DNA
gacgccagccaagacgtcggctccggaacgcat

SEQ ID NO: 13123 - DNA, 33 bp, Homo sapiens
  source 1..33: mol_type = unassigned DNA
atgcgttccggagccgacgtcttggctggcgtc

SEQ ID NO: 13124 - RNA, 72 nt, Homo sapiens
  source 1..72: mol_type = unassigned RNA
ttttactcctgaattctttattggccccagaggcctttcgaggcccttcatacttctgtttcccaatctcgt

SEQ ID NO: 13125 - DNA, 72 bp, Homo sapiens
  source 1..72: mol_type = unassigned DNA
ttttactcctgaattctttattggccccagaggcctttcgaggcccttcatacttctgtttcccaatctcgt

SEQ ID NO: 13126 - DNA, 72 bp, Homo sapiens
  source 1..72: mol_type = unassigned DNA
acgagattgggaaacagaagtatgaagggcctcgaaaggcctctggggccaataaagaattcaggagtaaaa

SEQ ID NO: 13127 - RNA, 148 nt, Homo sapiens
  source 1..148: mol_type = unassigned RNA
tgaagatttcatggacatttataagttcccaaaattaatacttttataatttcttatgcctgtctttactgcaatctctgaacataaattgtgagggtttcatggacatttatcacttctgtaataatactcttgtaatttcttatgc

SEQ ID NO: 13128 - DNA, 148 bp, Homo sapiens
  source 1..148: mol_type = unassigned DNA
tgaagatttcatggacatttataagttcccaaaattaatacttttataatttcttatgcctgtctttactgcaatctctgaacataaattgtgagggtttcatggacatttatcacttctgtaataatactcttgtaatttcttatgc

SEQ ID NO: 13129 - DNA, 148 bp, Homo sapiens
  source 1..148: mol_type = unassigned DNA
gcataagaaattacaagagtattattacagaagtgataaatgtccatgaaaccctcacaatttatgttcagagattgcagtaaagacaggcataagaaattataaaagtattaattttgggaacttataaatgtccatgaaatcttca

SEQ ID NO: 13130 - RNA, 71 nt, Homo sapiens
  source 1..71: mol_type = unassigned RNA
atgtcgatgttgattggttaaaacatcggtctcactctgttaacatagttttcaattttcacctagatttt

SEQ ID NO: 13131 - DNA, 71 bp, Homo sapiens
  source 1..71: mol_type = unassigned DNA
atgtcgatgttgattggttaaaacatcggtctcactctgttaacatagttttcaattttcacctagatttt

SEQ ID NO: 13132 - DNA, 71 bp, Homo sapiens
  source 1..71: mol_type = unassigned DNA
aaaatctaggtgaaaattgaaaactatgttaacagagtgagaccgatgttttaaccaatcaacatcgacat

SEQ ID NO: 13133 - RNA, 84 nt, Homo sapiens
  source 1..84: mol_type = unassigned RNA
ttcttttaaatgttttattcagtagttctgtgaacttcagactttgttgttcagcctaatcgtatgcttctgtaacttctacac

SEQ ID NO: 13134 - DNA, 84 bp, Homo sapiens
  source 1..84: mol_type = unassigned DNA
ttcttttaaatgttttattcagtagttctgtgaacttcagactttgttgttcagcctaatcgtatgcttctgtaacttctacac

SEQ ID NO: 13135 - DNA, 84 bp, Homo sapiens
  source 1..84: mol_type = unassigned DNA
gtgtagaagttacagaagcatacgattaggctgaacaacaaagtctgaagttcacagaactactgaataaaacatttaaaagaa

SEQ ID NO: 13136 - RNA, 61 nt, Homo sapiens
  source 1..61: mol_type = unassigned RNA
ctattgtttaaaacatcttaagagcctcgtatcttctgcttctgtagtggtttaaatcaat

SEQ ID NO: 13137 - DNA, 61 bp, Homo sapiens
  source 1..61: mol_type = unassigned DNA
ctattgtttaaaacatcttaagagcctcgtatcttctgcttctgtagtggtttaaatcaat

SEQ ID NO: 13138 - DNA, 61 bp, Homo sapiens
  source 1..61: mol_type = unassigned DNA
attgatttaaaccactacagaagcagaagatacgaggctcttaagatgttttaaacaatag

SEQ ID NO: 13139 - RNA, 77 nt, Homo sapiens
  source 1..77: mol_type = unassigned RNA
cagcccagcacttgttctagggctgggtcgggtggggagggagatgtcttcagaaactcaagaaggaaagggagctt

SEQ ID NO: 13140 - DNA, 77 bp, Homo sapiens
  source 1..77: mol_type = unassigned DNA
cagcccagcacttgttctagggctgggtcgggtggggagggagatgtcttcagaaactcaagaaggaaagggagctt

SEQ ID NO: 13141 - DNA, 77 bp, Homo sapiens
  source 1..77: mol_type = unassigned DNA
aagctccctttccttcttgagtttctgaagacatctccctccccacccgacccagccctagaacaagtgctgggctg

SEQ ID NO: 13142 - RNA, 34 nt, Homo sapiens
  source 1..34: mol_type = unassigned RNA
gatccaatattgaccagaagttaactgcatggac

SEQ ID NO: 13143 - DNA, 34 bp, Homo sapiens
  source 1..34: mol_type = unassigned DNA
gatccaatattgaccagaagttaactgcatggac

SEQ ID NO: 13144 - DNA, 34 bp, Homo sapiens
  source 1..34: mol_type = unassigned DNA
gtccatgcagttaacttctggtcaatattggatc

SEQ ID NO: 13145 - RNA, 23 nt, Homo sapiens
  source 1..23: mol_type = unassigned RNA
ggctgcagccttgccttatccct

SEQ ID NO: 13146 - DNA, 23 bp, Homo sapiens
  source 1..23: mol_type = unassigned DNA
ggctgcagccttgccttatccct

SEQ ID NO: 13147 - DNA, 23 bp, Homo sapiens
  source 1..23: mol_type = unassigned DNA
agggataaggcaaggctgcagcc

SEQ ID NO: 13148 - RNA, 170 nt, Homo sapiens
  source 1..170: mol_type = unassigned RNA
gtttcttcataattctttctgaaatgtctactggttggacctttgatctcctgaattgatcgtgatttcttctgttgtattttttgtctttgtcatttttttgtactctaggcagttttctcaattttagtttctattcaactttttgtttttatttattctctccagta

SEQ ID NO: 13149 - DNA, 170 bp, Homo sapiens
  source 1..170: mol_type = unassigned DNA
gtttcttcataattctttctgaaatgtctactggttggacctttgatctcctgaattgatcgtgatttcttctgttgtattttttgtctttgtcatttttttgtactctaggcagttttctcaattttagtttctattcaactttttgtttttatttattctctccagta

SEQ ID NO: 13150 - DNA, 170 bp, Homo sapiens
  source 1..170: mol_type = unassigned DNA
tactggagagaataaataaaaacaaaaagttgaatagaaactaaaattgagaaaactgcctagagtacaaaaaaatgacaaagacaaaaaatacaacagaagaaatcacgatcaattcaggagatcaaaggtccaaccagtagacatttcagaaagaattatgaagaaac

SEQ ID NO: 13151 - RNA, 49 nt, Homo sapiens
  source 1..49: mol_type = unassigned RNA
atataacttcctggctccttcactgaacatgcctagtccaacatttttt

SEQ ID NO: 13152 - DNA, 49 bp, Homo sapiens
  source 1..49: mol_type = unassigned DNA
atataacttcctggctccttcactgaacatgcctagtccaacatttttt

SEQ ID NO: 13153 - DNA, 49 bp, Homo sapiens
  source 1..49: mol_type = unassigned DNA
aaaaaatgttggactaggcatgttcagtgaaggagccaggaagttatat

SEQ ID NO: 13154 - RNA, 42 nt, Homo sapiens
  source 1..42: mol_type = unassigned RNA
tgcacagcttagcaaactgatgtaacttccatgaaaaactga

SEQ ID NO: 13155 - DNA, 42 bp, Homo sapiens
  source 1..42: mol_type = unassigned DNA
tgcacagcttagcaaactgatgtaacttccatgaaaaactga

SEQ ID NO: 13156 - DNA, 42 bp, Homo sapiens
  source 1..42: mol_type = unassigned DNA
tcagtttttcatggaagttacatcagtttgctaagctgtgca

SEQ ID NO: 13157 - RNA, 66 nt, Homo sapiens
  source 1..66: mol_type = unassigned RNA
tacccattgcagaccaaagaaagatagagcaagacaagaaaagtaagtggccctgactttagcact

SEQ ID NO: 13158 - DNA, 66 bp, Homo sapiens
  source 1..66: mol_type = unassigned DNA
tacccattgcagaccaaagaaagatagagcaagacaagaaaagtaagtggccctgactttagcact

SEQ ID NO: 13159 - DNA, 66 bp, Homo sapiens
  source 1..66: mol_type = unassigned DNA
agtgctaaagtcagggccacttacttttcttgtcttgctctatctttctttggtctgcaatgggta

SEQ ID NO: 13160 - RNA, 32 nt, Homo sapiens
  source 1..32: mol_type = unassigned RNA
ccatggacaggttctgttttcactttttcgta

SEQ ID NO: 13161 - DNA, 32 bp, Homo sapiens
  source 1..32: mol_type = unassigned DNA
ccatggacaggttctgttttcactttttcgta

SEQ ID NO: 13162 - DNA, 32 bp, Homo sapiens
  source 1..32: mol_type = unassigned DNA
tacgaaaaagtgaaaacagaacctgtccatgg

SEQ ID NO: 13163 - RNA, 41 nt, Homo sapiens
  source 1..41: mol_type = unassigned RNA
ccttctataactcaactctgtagcactcaaggtattatctc

SEQ ID NO: 13164 - DNA, 41 bp, Homo sapiens
  source 1..41: mol_type = unassigned DNA
ccttctataactcaactctgtagcactcaaggtattatctc

SEQ ID NO: 13165 - DNA, 41 bp, Homo sapiens
  source 1..41: mol_type = unassigned DNA
gagataataccttgagtgctacagagttgagttatagaagg

SEQ ID NO: 13166 - RNA, 68 nt, Homo sapiens
  source 1..68: mol_type = unassigned RNA
ctgttctgattatatttgctgtattaaggccaaatccaggtgtttctgagcactagtttgtgtgtttt

SEQ ID NO: 13167 - DNA, 68 bp, Homo sapiens
  source 1..68: mol_type = unassigned DNA
ctgttctgattatatttgctgtattaaggccaaatccaggtgtttctgagcactagtttgtgtgtttt

SEQ ID NO: 13168 - DNA, 68 bp, Homo sapiens
  source 1..68: mol_type = unassigned DNA
aaaacacacaaactagtgctcagaaacacctggatttggccttaatacagcaaatataatcagaacag

SEQ ID NO: 13169 - RNA, 127 nt, Homo sapiens
  source 1..127: mol_type = unassigned RNA
tttttctctactttgggagatgtttatttacattgtcagactattcacaaaacagattctaaaatttgtttgctcgtatgctgttcccttcaatgtgatatcagagattactatgaatgttagtttc

SEQ ID NO: 13170 - DNA, 127 bp, Homo sapiens
  source 1..127: mol_type = unassigned DNA
tttttctctactttgggagatgtttatttacattgtcagactattcacaaaacagattctaaaatttgtttgctcgtatgctgttcccttcaatgtgatatcagagattactatgaatgttagtttc

SEQ ID NO: 13171 - DNA, 127 bp, Homo sapiens
  source 1..127: mol_type = unassigned DNA
gaaactaacattcatagtaatctctgatatcacattgaagggaacagcatacgagcaaacaaattttagaatctgttttgtgaatagtctgacaatgtaaataaacatctcccaaagtagagaaaaa

SEQ ID NO: 13172 - RNA, 33 nt, Homo sapiens
  source 1..33: mol_type = unassigned RNA
cacactgaattaagctctgtgacacctaagaaa

SEQ ID NO: 13173 - DNA, 33 bp, Homo sapiens
  source 1..33: mol_type = unassigned DNA
cacactgaattaagctctgtgacacctaagaaa

SEQ ID NO: 13174 - DNA, 33 bp, Homo sapiens
  source 1..33: mol_type = unassigned DNA
tttcttaggtgtcacagagcttaattcagtgtg

SEQ ID NO: 13175 - RNA, 69 nt, Homo sapiens
  source 1..69: mol_type = unassigned RNA
cactggattcagccagaagggaaccatagcatgtttcttacctgtcacaggttgctgcaacactgctgc

SEQ ID NO: 13176 - DNA, 69 bp, Homo sapiens
  source 1..69: mol_type = unassigned DNA
cactggattcagccagaagggaaccatagcatgtttcttacctgtcacaggttgctgcaacactgctgc

SEQ ID NO: 13177 - DNA, 69 bp, Homo sapiens
  source 1..69: mol_type = unassigned DNA
gcagcagtgttgcagcaacctgtgacaggtaagaaacatgctatggttcccttctggctgaatccagtg

SEQ ID NO: 13178 - RNA, 116 nt, Homo sapiens
  source 1..116: mol_type = unassigned RNA
cttggtggcttcctccctttgtttacactgccatatcctatgtccaactccctatctcttctccattgagtctttgccctgctggctttcctagcagttgacacggaaaaagaggc

SEQ ID NO: 13179 - DNA, 116 bp, Homo sapiens
  source 1..116: mol_type = unassigned DNA
cttggtggcttcctccctttgtttacactgccatatcctatgtccaactccctatctcttctccattgagtctttgccctgctggctttcctagcagttgacacggaaaaagaggc

SEQ ID NO: 13180 - DNA, 116 bp, Homo sapiens
  source 1..116: mol_type = unassigned DNA
gcctctttttccgtgtcaactgctaggaaagccagcagggcaaagactcaatggagaagagatagggagttggacataggatatggcagtgtaaacaaagggaggaagccaccaag

SEQ ID NO: 13181 - RNA, 31 nt, Homo sapiens
  source 1..31: mol_type = unassigned RNA
ccattgtactgtctgggctgggggggacact

SEQ ID NO: 13182 - DNA, 31 bp, Homo sapiens
  source 1..31: mol_type = unassigned DNA
ccattgtactgtctgggctgggggggacact

SEQ ID NO: 13183 - DNA, 31 bp, Homo sapiens
  source 1..31: mol_type = unassigned DNA
agtgtcccccccagcccagacagtacaatgg

SEQ ID NO: 13184 - RNA, 29 nt, Homo sapiens
  source 1..29: mol_type = unassigned RNA
ctgtgcgtgtgagagaggaacctgtgaga

SEQ ID NO: 13185 - DNA, 29 bp, Homo sapiens
  source 1..29: mol_type = unassigned DNA
ctgtgcgtgtgagagaggaacctgtgaga

SEQ ID NO: 13186 - DNA, 29 bp, Homo sapiens
  source 1..29: mol_type = unassigned DNA
tctcacaggttcctctctcacacgcacag

SEQ ID NO: 13187 - RNA, 31 nt, Homo sapiens
  source 1..31: mol_type = unassigned RNA
cacactccttccacctgccagggctgccctc

SEQ ID NO: 13188 - DNA, 31 bp, Homo sapiens
  source 1..31: mol_type = unassigned DNA
cacactccttccacctgccagggctgccctc

SEQ ID NO: 13189 - DNA, 31 bp, Homo sapiens
  source 1..31: mol_type = unassigned DNA
gagggcagccctggcaggtggaaggagtgtg

SEQ ID NO: 13190 - RNA, 24 nt, Homo sapiens
  source 1..24: mol_type = unassigned RNA
gaaatgtagtatgctgatgcactg

SEQ ID NO: 13191 - DNA, 24 bp, Homo sapiens
  source 1..24: mol_type = unassigned DNA
gaaatgtagtatgctgatgcactg

SEQ ID NO: 13192 - DNA, 24 bp, Homo sapiens
  source 1..24: mol_type = unassigned DNA
cagtgcatcagcatactacatttc

SEQ ID NO: 13193 - RNA, 60 nt, Homo sapiens
  source 1..60: mol_type = unassigned RNA
aggtgtaaatgaaagtgcagagcatggtcactatgatgattgtatcttggagtgtggatt

SEQ ID NO: 13194 - DNA, 60 bp, Homo sapiens
  source 1..60: mol_type = unassigned DNA
aggtgtaaatgaaagtgcagagcatggtcactatgatgattgtatcttggagtgtggatt

SEQ ID NO: 13195 - DNA, 60 bp, Homo sapiens
  source 1..60: mol_type = unassigned DNA
aatccacactccaagatacaatcatcatagtgaccatgctctgcactttcatttacacct

SEQ ID NO: 13196 - RNA, 71 nt, Homo sapiens
  source 1..71: mol_type = unassigned RNA
ttctaatggtaattcttaccagatctctcgctgactgttggtcatcttgccagatcttgagtgatgtcttt

SEQ ID NO: 13197 - DNA, 71 bp, Homo sapiens
  source 1..71: mol_type = unassigned DNA
ttctaatggtaattcttaccagatctctcgctgactgttggtcatcttgccagatcttgagtgatgtcttt

SEQ ID NO: 13198 - DNA, 71 bp, Homo sapiens
  source 1..71: mol_type = unassigned DNA
aaagacatcactcaagatctggcaagatgaccaacagtcagcgagagatctggtaagaattaccattagaa

SEQ ID NO: 13199 - RNA, 30 nt, Homo sapiens
  source 1..30: mol_type = unassigned RNA
agggacactgagaactagggacttatacac

SEQ ID NO: 13200 - DNA, 30 bp, Homo sapiens
  source 1..30: mol_type = unassigned DNA
agggacactgagaactagggacttatacac

SEQ ID NO: 13201 - DNA, 30 bp, Homo sapiens
  source 1..30: mol_type = unassigned DNA
gtgtataagtccctagttctcagtgtccct

SEQ ID NO: 13202 - RNA, 137 nt, Homo sapiens
  source 1..137: mol_type = unassigned RNA
ttacatgaggtgacccatttccattcaagggttttagaagcacatcaaggacattctaaggatgattgacttacacaatgatctctgaacatgcctcctgccttctcctcactcttgagtatttgcttaggggagca

SEQ ID NO: 13203 - DNA, 137 bp, Homo sapiens
  source 1..137: mol_type = unassigned DNA
ttacatgaggtgacccatttccattcaagggttttagaagcacatcaaggacattctaaggatgattgacttacacaatgatctctgaacatgcctcctgccttctcctcactcttgagtatttgcttaggggagca

SEQ ID NO: 13204 - DNA, 137 bp, Homo sapiens
  source 1..137: mol_type = unassigned DNA
tgctcccctaagcaaatactcaagagtgaggagaaggcaggaggcatgttcagagatcattgtgtaagtcaatcatccttagaatgtccttgatgtgcttctaaaacccttgaatggaaatgggtcacctcatgtaa

SEQ ID NO: 13205 - RNA, 69 nt, Homo sapiens
  source 1..69: mol_type = unassigned RNA
atttccttacagagcataggagctgtataactcaacgtaataaatctcgacgagttcttggcaatgatg

SEQ ID NO: 13206 - DNA, 69 bp, Homo sapiens
  source 1..69: mol_type = unassigned DNA
atttccttacagagcataggagctgtataactcaacgtaataaatctcgacgagttcttggcaatgatg

SEQ ID NO: 13207 - DNA, 69 bp, Homo sapiens
  source 1..69: mol_type = unassigned DNA
catcattgccaagaactcgtcgagatttattacgttgagttatacagctcctatgctctgtaaggaaat

SEQ ID NO: 13208 - RNA, 22 nt, Homo sapiens
  source 1..22: mol_type = unassigned RNA
ttgccgcgtgccgagtggagtc

SEQ ID NO: 13209 - DNA, 22 bp, Homo sapiens
  source 1..22: mol_type = unassigned DNA
ttgccgcgtgccgagtggagtc

SEQ ID NO: 13210 - DNA, 22 bp, Homo sapiens
  source 1..22: mol_type = unassigned DNA
gactccactcggcacgcggcaa

SEQ ID NO: 13211 - RNA, 30 nt, Homo sapiens
  source 1..30: mol_type = unassigned RNA
agatgttgttagcatatcagacttacagga

SEQ ID NO: 13212 - DNA, 30 bp, Homo sapiens
  source 1..30: mol_type = unassigned DNA
agatgttgttagcatatcagacttacagga

SEQ ID NO: 13213 - DNA, 30 bp, Homo sapiens
  source 1..30: mol_type = unassigned DNA
tcctgtaagtctgatatgctaacaacatct

SEQ ID NO: 13214 - RNA, 32 nt, Homo sapiens
  source 1..32: mol_type = unassigned RNA
gccgctgacactggaacagagagatgtggctt

SEQ ID NO: 13215 - DNA, 32 bp, Homo sapiens
  source 1..32: mol_type = unassigned DNA
gccgctgacactggaacagagagatgtggctt

SEQ ID NO: 13216 - DNA, 32 bp, Homo sapiens
  source 1..32: mol_type = unassigned DNA
aagccacatctctctgttccagtgtcagcggc

SEQ ID NO: 13217 - RNA, 33 nt, Homo sapiens
  source 1..33: mol_type = unassigned RNA
cagccctcctggaaaggggcggtaccagcattg

SEQ ID NO: 13218 - DNA, 33 bp, Homo sapiens
  source 1..33: mol_type = unassigned DNA
cagccctcctggaaaggggcggtaccagcattg

SEQ ID NO: 13219 - DNA, 33 bp, Homo sapiens
  source 1..33: mol_type = unassigned DNA
caatgctggtaccgcccctttccaggagggctg

SEQ ID NO: 13220 - RNA, 23 nt, Homo sapiens
  source 1..23: mol_type = unassigned RNA
aaactatatctatgcaaaactgc

SEQ ID NO: 13221 - DNA, 23 bp, Homo sapiens
  source 1..23: mol_type = unassigned DNA
aaactatatctatgcaaaactgc

SEQ ID NO: 13222 - DNA, 23 bp, Homo sapiens
  source 1..23: mol_type = unassigned DNA
gcagttttgcatagatatagttt

SEQ ID NO: 13223 - RNA, 53 nt, Homo sapiens
  source 1..53: mol_type = unassigned RNA
aggctagtcatgaagataaatgctgatgtttgtgcatttggactaaagaaaac

SEQ ID NO: 13224 - DNA, 53 bp, Homo sapiens
  source 1..53: mol_type = unassigned DNA
aggctagtcatgaagataaatgctgatgtttgtgcatttggactaaagaaaac

SEQ ID NO: 13225 - DNA, 53 bp, Homo sapiens
  source 1..53: mol_type = unassigned DNA
gttttctttagtccaaatgcacaaacatcagcatttatcttcatgactagcct

SEQ ID NO: 13226 - RNA, 24 nt, Homo sapiens
  source 1..24: mol_type = unassigned RNA
ccaactccatgatgaaccctatcg

SEQ ID NO: 13227 - DNA, 24 bp, Homo sapiens
  source 1..24: mol_type = unassigned DNA
ccaactccatgatgaaccctatcg

SEQ ID NO: 13228 - DNA, 24 bp, Homo sapiens
  source 1..24: mol_type = unassigned DNA
cgatagggttcatcatggagttgg

SEQ ID NO: 13229 - RNA, 51 nt, Homo sapiens
  source 1..51: mol_type = unassigned RNA
cctgacaggttgaagcaagtagacgcccaggagccccgggagggggctgca

SEQ ID NO: 13230 - DNA, 51 bp, Homo sapiens
  source 1..51: mol_type = unassigned DNA
cctgacaggttgaagcaagtagacgcccaggagccccgggagggggctgca

SEQ ID NO: 13231 - DNA, 51 bp, Homo sapiens
  source 1..51: mol_type = unassigned DNA
tgcagccccctcccggggctcctgggcgtctacttgcttcaacctgtcagg

SEQ ID NO: 13232 - RNA, 28 nt, Homo sapiens
  source 1..28: mol_type = unassigned RNA
gagtcttctgatcaaaaaagctcacgtc

SEQ ID NO: 13233 - DNA, 28 bp, Homo sapiens
  source 1..28: mol_type = unassigned DNA
gagtcttctgatcaaaaaagctcacgtc

SEQ ID NO: 13234 - DNA, 28 bp, Homo sapiens
  source 1..28: mol_type = unassigned DNA
gacgtgagcttttttgatcagaagactc

SEQ ID NO: 13235 - RNA, 37 nt, Homo sapiens
  source 1..37: mol_type = unassigned RNA
aaaatgctaatagtgataggaacagtgaagtccaggc

SEQ ID NO: 13236 - DNA, 37 bp, Homo sapiens
  source 1..37: mol_type = unassigned DNA
aaaatgctaatagtgataggaacagtgaagtccaggc

SEQ ID NO: 13237 - DNA, 37 bp, Homo sapiens
  source 1..37: mol_type = unassigned DNA
gcctggacttcactgttcctatcactattagcatttt

SEQ ID NO: 13238 - RNA, 101 nt, Homo sapiens
  source 1..101: mol_type = unassigned RNA
ccctcccgcctggccaaatggataatgagtcttgttctcagtcaactcaaagtcggtgattcacgtgaacagaactgtcatttgatgtcgctggatgacac

SEQ ID NO: 13239 - DNA, 101 bp, Homo sapiens
  source 1..101: mol_type = unassigned DNA
ccctcccgcctggccaaatggataatgagtcttgttctcagtcaactcaaagtcggtgattcacgtgaacagaactgtcatttgatgtcgctggatgacac

SEQ ID NO: 13240 - DNA, 101 bp, Homo sapiens
  source 1..101: mol_type = unassigned DNA
gtgtcatccagcgacatcaaatgacagttctgttcacgtgaatcaccgactttgagttgactgagaacaagactcattatccatttggccaggcgggaggg

SEQ ID NO: 13241 - RNA, 28 nt, Homo sapiens
  source 1..28: mol_type = unassigned RNA
ccttctcatgtgtcgctcctgtgcacac

SEQ ID NO: 13242 - DNA, 28 bp, Homo sapiens
  source 1..28: mol_type = unassigned DNA
ccttctcatgtgtcgctcctgtgcacac

SEQ ID NO: 13243 - DNA, 28 bp, Homo sapiens
  source 1..28: mol_type = unassigned DNA
gtgtgcacaggagcgacacatgagaagg

SEQ ID NO: 13244 - RNA, 56 nt, Homo sapiens
  source 1..56: mol_type = unassigned RNA
ttctctccctaccccagattgcgttagctcatcagagaaggggatgtgtagctgct

SEQ ID NO: 13245 - DNA, 56 bp, Homo sapiens
  source 1..56: mol_type = unassigned DNA
ttctctccctaccccagattgcgttagctcatcagagaaggggatgtgtagctgct

SEQ ID NO: 13246 - DNA, 56 bp, Homo sapiens
  source 1..56: mol_type = unassigned DNA
agcagctacacatccccttctctgatgagctaacgcaatctggggtagggagagaa

SEQ ID NO: 13247 - RNA, 59 nt, Homo sapiens
  source 1..59: mol_type = unassigned RNA
atttagaaaggtgagaagggaaaatagaatctgcactggactgagacctgtactgaaaa

SEQ ID NO: 13248 - DNA, 59 bp, Homo sapiens
  source 1..59: mol_type = unassigned DNA
atttagaaaggtgagaagggaaaatagaatctgcactggactgagacctgtactgaaaa

SEQ ID NO: 13249 - DNA, 59 bp, Homo sapiens
  source 1..59: mol_type = unassigned DNA
ttttcagtacaggtctcagtccagtgcagattctattttcccttctcacctttctaaat

SEQ ID NO: 13250 - RNA, 22 nt, Homo sapiens
  source 1..22: mol_type = unassigned RNA
aatcagttcctcttctacttgt

SEQ ID NO: 13251 - DNA, 22 bp, Homo sapiens
  source 1..22: mol_type = unassigned DNA
aatcagttcctcttctacttgt

SEQ ID NO: 13252 - DNA, 22 bp, Homo sapiens
  source 1..22: mol_type = unassigned DNA
acaagtagaagaggaactgatt

SEQ ID NO: 13253 - RNA, 43 nt, Homo sapiens
  source 1..43: mol_type = unassigned RNA
gagttcttcttcttctgcttgtcgggccccttgtctctcttcc

SEQ ID NO: 13254 - DNA, 43 bp, Homo sapiens
  source 1..43: mol_type = unassigned DNA
gagttcttcttcttctgcttgtcgggccccttgtctctcttcc

SEQ ID NO: 13255 - DNA, 43 bp, Homo sapiens
  source 1..43: mol_type = unassigned DNA
ggaagagagacaaggggcccgacaagcagaagaagaagaactc

SEQ ID NO: 13256 - RNA, 117 nt, Homo sapiens
  source 1..117: mol_type = unassigned RNA
agtcctaagtaaatcagacgccgcctcctcaagctggactataaattcggctcatctgcctccagctgccccttttctctcggaagtcccctctctcactagagagagagctgtttt

SEQ ID NO: 13257 - DNA, 117 bp, Homo sapiens
  source 1..117: mol_type = unassigned DNA
agtcctaagtaaatcagacgccgcctcctcaagctggactataaattcggctcatctgcctccagctgccccttttctctcggaagtcccctctctcactagagagagagctgtttt

SEQ ID NO: 13258 - DNA, 117 bp, Homo sapiens
  source 1..117: mol_type = unassigned DNA
aaaacagctctctctctagtgagagaggggacttccgagagaaaaggggcagctggaggcagatgagccgaatttatagtccagcttgaggaggcggcgtctgatttacttaggact

SEQ ID NO: 13259 - RNA, 29 nt, Homo sapiens
  source 1..29: mol_type = unassigned RNA
ctgacactgtacataggacttgtgcccag

SEQ ID NO: 13260 - DNA, 29 bp, Homo sapiens
  source 1..29: mol_type = unassigned DNA
ctgacactgtacataggacttgtgcccag

SEQ ID NO: 13261 - DNA, 29 bp, Homo sapiens
  source 1..29: mol_type = unassigned DNA
ctgggcacaagtcctatgtacagtgtcag

SEQ ID NO: 13262 - RNA, 46 nt, Homo sapiens
  source 1..46: mol_type = unassigned RNA
tttgttgaattgatccctttaccattatgtaatggcctcgtttgtc

SEQ ID NO: 13263 - DNA, 46 bp, Homo sapiens
  source 1..46: mol_type = unassigned DNA
tttgttgaattgatccctttaccattatgtaatggcctcgtttgtc

SEQ ID NO: 13264 - DNA, 46 bp, Homo sapiens
  source 1..46: mol_type = unassigned DNA
gacaaacgaggccattacataatggtaaagggatcaattcaacaaa

SEQ ID NO: 13265 - RNA, 71 nt, Homo sapiens
  source 1..71: mol_type = unassigned RNA
cttatcacttccccaatcaatacccttgtgatttcgtatgcctgtctttactttaatgtcttaatcctgtc

SEQ ID NO: 13266 - DNA, 71 bp, Homo sapiens
  source 1..71: mol_type = unassigned DNA
cttatcacttccccaatcaatacccttgtgatttcgtatgcctgtctttactttaatgtcttaatcctgtc

SEQ ID NO: 13267 - DNA, 71 bp, Homo sapiens
  source 1..71: mol_type = unassigned DNA
gacaggattaagacattaaagtaaagacaggcatacgaaatcacaagggtattgattggggaagtgataag

SEQ ID NO: 13268 - RNA, 30 nt, Homo sapiens
  source 1..30: mol_type = unassigned RNA
tgggatttctgctcctggctgcaagattgc

SEQ ID NO: 13269 - DNA, 30 bp, Homo sapiens
  source 1..30: mol_type = unassigned DNA
tgggatttctgctcctggctgcaagattgc

SEQ ID NO: 13270 - DNA, 30 bp, Homo sapiens
  source 1..30: mol_type = unassigned DNA
gcaatcttgcagccaggagcagaaatccca

SEQ ID NO: 13271 - RNA, 32 nt, Homo sapiens
  source 1..32: mol_type = unassigned RNA
cccccgggctccctggaccacctggacctgat

SEQ ID NO: 13272 - DNA, 32 bp, Homo sapiens
  source 1..32: mol_type = unassigned DNA
cccccgggctccctggaccacctggacctgat

SEQ ID NO: 13273 - DNA, 32 bp, Homo sapiens
  source 1..32: mol_type = unassigned DNA
atcaggtccaggtggtccagggagcccggggg

SEQ ID NO: 13274 - RNA, 84 nt, Homo sapiens
  source 1..84: mol_type = unassigned RNA
ccaattcagtattatggtgactgtgggtttgttatagatggcttttattacattaaggtatgtccctcgtatgccagttctgct

SEQ ID NO: 13275 - DNA, 84 bp, Homo sapiens
  source 1..84: mol_type = unassigned DNA
ccaattcagtattatggtgactgtgggtttgttatagatggcttttattacattaaggtatgtccctcgtatgccagttctgct

SEQ ID NO: 13276 - DNA, 84 bp, Homo sapiens
  source 1..84: mol_type = unassigned DNA
agcagaactggcatacgagggacataccttaatgtaataaaagccatctataacaaacccacagtcaccataatactgaattgg

SEQ ID NO: 13277 - RNA, 29 nt, Homo sapiens
  source 1..29: mol_type = unassigned RNA
cacagacttcaagatgttctctgatgaga

SEQ ID NO: 13278 - DNA, 29 bp, Homo sapiens
  source 1..29: mol_type = unassigned DNA
cacagacttcaagatgttctctgatgaga

SEQ ID NO: 13279 - DNA, 29 bp, Homo sapiens
  source 1..29: mol_type = unassigned DNA
tctcatcagagaacatcttgaagtctgtg

SEQ ID NO: 13280 - RNA, 29 nt, Homo sapiens
  source 1..29: mol_type = unassigned RNA
cacctctctgcaaggcggcgcagcgctcc

SEQ ID NO: 13281 - DNA, 29 bp, Homo sapiens
  source 1..29: mol_type = unassigned DNA
cacctctctgcaaggcggcgcagcgctcc

SEQ ID NO: 13282 - DNA, 29 bp, Homo sapiens
  source 1..29: mol_type = unassigned DNA
ggagcgctgcgccgccttgcagagaggtg

SEQ ID NO: 13283 - RNA, 31 nt, Homo sapiens
  source 1..31: mol_type = unassigned RNA
tttttttttcacactggagactaagaaaaga

SEQ ID NO: 13284 - DNA, 31 bp, Homo sapiens
  source 1..31: mol_type = unassigned DNA
tttttttttcacactggagactaagaaaaga

SEQ ID NO: 13285 - DNA, 31 bp, Homo sapiens
  source 1..31: mol_type = unassigned DNA
tcttttcttagtctccagtgtgaaaaaaaaa

SEQ ID NO: 13286 - RNA, 30 nt, Homo sapiens
  source 1..30: mol_type = unassigned RNA
gatcacttctgaataagcagtttgccttta

SEQ ID NO: 13287 - DNA, 30 bp, Homo sapiens
  source 1..30: mol_type = unassigned DNA
gatcacttctgaataagcagtttgccttta

SEQ ID NO: 13288 - DNA, 30 bp, Homo sapiens
  source 1..30: mol_type = unassigned DNA
taaaggcaaactgcttattcagaagtgatc

SEQ ID NO: 13289 - RNA, 120 nt, Homo sapiens
  source 1..120: mol_type = unassigned RNA
agttatgggttcctgtagattaaaccagatgttctgtccgtagacaggaagtcagaggctttgtggaccagaggaggactgagaccatgttctgtattgagcagcctctacaattataag

SEQ ID NO: 13290 - DNA, 120 bp, Homo sapiens
  source 1..120: mol_type = unassigned DNA
agttatgggttcctgtagattaaaccagatgttctgtccgtagacaggaagtcagaggctttgtggaccagaggaggactgagaccatgttctgtattgagcagcctctacaattataag

SEQ ID NO: 13291 - DNA, 120 bp, Homo sapiens
  source 1..120: mol_type = unassigned DNA
cttataattgtagaggctgctcaatacagaacatggtctcagtcctcctctggtccacaaagcctctgacttcctgtctacggacagaacatctggtttaatctacaggaacccataact

SEQ ID NO: 13292 - RNA, 30 nt, Homo sapiens
  source 1..30: mol_type = unassigned RNA
ggaaactgtcatctgaaaaacaacgtctat

SEQ ID NO: 13293 - DNA, 30 bp, Homo sapiens
  source 1..30: mol_type = unassigned DNA
ggaaactgtcatctgaaaaacaacgtctat

SEQ ID NO: 13294 - DNA, 30 bp, Homo sapiens
  source 1..30: mol_type = unassigned DNA
atagacgttgtttttcagatgacagtttcc

SEQ ID NO: 13295 - RNA, 31 nt, Homo sapiens
  source 1..31: mol_type = unassigned RNA
tagtatgattaaagactttaaaacatgtctc

SEQ ID NO: 13296 - DNA, 31 bp, Homo sapiens
  source 1..31: mol_type = unassigned DNA
tagtatgattaaagactttaaaacatgtctc

SEQ ID NO: 13297 - DNA, 31 bp, Homo sapiens
  source 1..31: mol_type = unassigned DNA
gagacatgttttaaagtctttaatcatacta

SEQ ID NO: 13298 - RNA, 34 nt, Homo sapiens
  source 1..34: mol_type = unassigned RNA
gcacttggatctgttcagagctgaccccctagca

SEQ ID NO: 13299 - DNA, 34 bp, Homo sapiens
  source 1..34: mol_type = unassigned DNA
gcacttggatctgttcagagctgaccccctagca

SEQ ID NO: 13300 - DNA, 34 bp, Homo sapiens
  source 1..34: mol_type = unassigned DNA
tgctagggggtcagctctgaacagatccaagtgc

SEQ ID NO: 13301 - RNA, 102 nt, Homo sapiens
  source 1..102: mol_type = unassigned RNA
actctcttgttctcattttcatgaagctatgacaccctaattttcattgtgcatctctgtttacttggtctccctcatctcctttgctatctttgtttctcc

SEQ ID NO: 13302 - DNA, 102 bp, Homo sapiens
  source 1..102: mol_type = unassigned DNA
actctcttgttctcattttcatgaagctatgacaccctaattttcattgtgcatctctgtttacttggtctccctcatctcctttgctatctttgtttctcc

SEQ ID NO: 13303 - DNA, 102 bp, Homo sapiens
  source 1..102: mol_type = unassigned DNA
ggagaaacaaagatagcaaaggagatgagggagaccaagtaaacagagatgcacaatgaaaattagggtgtcatagcttcatgaaaatgagaacaagagagt

SEQ ID NO: 13304 - RNA, 50 nt, Homo sapiens
  source 1..50: mol_type = unassigned RNA
ttccttcactgtcttagaaccaagcaagattcacctgtgttttgtgttca

SEQ ID NO: 13305 - DNA, 50 bp, Homo sapiens
  source 1..50: mol_type = unassigned DNA
ttccttcactgtcttagaaccaagcaagattcacctgtgttttgtgttca

SEQ ID NO: 13306 - DNA, 50 bp, Homo sapiens
  source 1..50: mol_type = unassigned DNA
tgaacacaaaacacaggtgaatcttgcttggttctaagacagtgaaggaa

SEQ ID NO: 13307 - RNA, 71 nt, Homo sapiens
  source 1..71: mol_type = unassigned RNA
cgccttgttcttaaagaaaaaccagtgtgcactcagtggttctttgtttgaccatatctcctgatgtgttg

SEQ ID NO: 13308 - DNA, 71 bp, Homo sapiens
  source 1..71: mol_type = unassigned DNA
cgccttgttcttaaagaaaaaccagtgtgcactcagtggttctttgtttgaccatatctcctgatgtgttg

SEQ ID NO: 13309 - DNA, 71 bp, Homo sapiens
  source 1..71: mol_type = unassigned DNA
caacacatcaggagatatggtcaaacaaagaaccactgagtgcacactggtttttctttaagaacaaggcg

SEQ ID NO: 13310 - RNA, 89 nt, Homo sapiens
  source 1..89: mol_type = unassigned RNA
gctgggaagtggaggagccaagatttgaacattactttgaatttaaaattcaaatttaagctcttaatctctatcctcttctgctggca

SEQ ID NO: 13311 - DNA, 89 bp, Homo sapiens
  source 1..89: mol_type = unassigned DNA
gctgggaagtggaggagccaagatttgaacattactttgaatttaaaattcaaatttaagctcttaatctctatcctcttctgctggca

SEQ ID NO: 13312 - DNA, 89 bp, Homo sapiens
  source 1..89: mol_type = unassigned DNA
tgccagcagaagaggatagagattaagagcttaaatttgaattttaaattcaaagtaatgttcaaatcttggctcctccacttcccagc

SEQ ID NO: 13313 - RNA, 29 nt, Homo sapiens
  source 1..29: mol_type = unassigned RNA
atcatgttctagttgcttgaccctgccac

SEQ ID NO: 13314 - DNA, 29 bp, Homo sapiens
  source 1..29: mol_type = unassigned DNA
atcatgttctagttgcttgaccctgccac

SEQ ID NO: 13315 - DNA, 29 bp, Homo sapiens
  source 1..29: mol_type = unassigned DNA
gtggcagggtcaagcaactagaacatgat

SEQ ID NO: 13316 - RNA, 44 nt, Homo sapiens
  source 1..44: mol_type = unassigned RNA
ctcaataggcagtgagttccgggccccacagcctaatggagtag

SEQ ID NO: 13317 - DNA, 44 bp, Homo sapiens
  source 1..44: mol_type = unassigned DNA
ctcaataggcagtgagttccgggccccacagcctaatggagtag

SEQ ID NO: 13318 - DNA, 44 bp, Homo sapiens
  source 1..44: mol_type = unassigned DNA
ctactccattaggctgtggggcccggaactcactgcctattgag

SEQ ID NO: 13319 - RNA, 28 nt, Homo sapiens
  source 1..28: mol_type = unassigned RNA
tataggctgacagtcttggccagacttg

SEQ ID NO: 13320 - DNA, 28 bp, Homo sapiens
  source 1..28: mol_type = unassigned DNA
tataggctgacagtcttggccagacttg

SEQ ID NO: 13321 - DNA, 28 bp, Homo sapiens
  source 1..28: mol_type = unassigned DNA
caagtctggccaagactgtcagcctata

SEQ ID NO: 13322 - RNA, 46 nt, Homo sapiens
  source 1..46: mol_type = unassigned RNA
atccatggtggcgactgtgctgtgacagctgcagatgatgtgagtc

SEQ ID NO: 13323 - DNA, 46 bp, Homo sapiens
  source 1..46: mol_type = unassigned DNA
atccatggtggcgactgtgctgtgacagctgcagatgatgtgagtc

SEQ ID NO: 13324 - DNA, 46 bp, Homo sapiens
  source 1..46: mol_type = unassigned DNA
gactcacatcatctgcagctgtcacagcacagtcgccaccatggat

SEQ ID NO: 13325 - RNA, 27 nt, Homo sapiens
  source 1..27: mol_type = unassigned RNA
tcttcctggagaaggggagggtgcggc

SEQ ID NO: 13326 - DNA, 27 bp, Homo sapiens
  source 1..27: mol_type = unassigned DNA
tcttcctggagaaggggagggtgcggc

SEQ ID NO: 13327 - DNA, 27 bp, Homo sapiens
  source 1..27: mol_type = unassigned DNA
gccgcaccctccccttctccaggaaga

SEQ ID NO: 13328 - RNA, 37 nt, Homo sapiens
  source 1..37: mol_type = unassigned RNA
taccttatcatactgaaaagtgtttcactttcccaac

SEQ ID NO: 13329 - DNA, 37 bp, Homo sapiens
  source 1..37: mol_type = unassigned DNA
taccttatcatactgaaaagtgtttcactttcccaac

SEQ ID NO: 13330 - DNA, 37 bp, Homo sapiens
  source 1..37: mol_type = unassigned DNA
gttgggaaagtgaaacacttttcagtatgataaggta

SEQ ID NO: 13331 - RNA, 111 nt, Homo sapiens
  source 1..111: mol_type = unassigned RNA
aaggaagcccatcccccagaattgagctgctgcataatattgacccgaacttcgtggactcttcaccgtgtgagtaccagtgcattgctactagattaaatctaattggcc

SEQ ID NO: 13332 - DNA, 111 bp, Homo sapiens
  source 1..111: mol_type = unassigned DNA
aaggaagcccatcccccagaattgagctgctgcataatattgacccgaacttcgtggactcttcaccgtgtgagtaccagtgcattgctactagattaaatctaattggcc

SEQ ID NO: 13333 - DNA, 111 bp, Homo sapiens
  source 1..111: mol_type = unassigned DNA
ggccaattagatttaatctagtagcaatgcactggtactcacacggtgaagagtccacgaagttcgggtcaatattatgcagcagctcaattctgggggatgggcttcctt

SEQ ID NO: 13334 - RNA, 32 nt, Homo sapiens
  source 1..32: mol_type = unassigned RNA
ctctaggatgagtttagaactgtagcagtgca

SEQ ID NO: 13335 - DNA, 32 bp, Homo sapiens
  source 1..32: mol_type = unassigned DNA
ctctaggatgagtttagaactgtagcagtgca

SEQ ID NO: 13336 - DNA, 32 bp, Homo sapiens
  source 1..32: mol_type = unassigned DNA
tgcactgctacagttctaaactcatcctagag

SEQ ID NO: 13337 - RNA, 24 nt, Homo sapiens
  source 1..24: mol_type = unassigned RNA
taatctctagtattctgcttgtaa

SEQ ID NO: 13338 - DNA, 24 bp, Homo sapiens
  source 1..24: mol_type = unassigned DNA
taatctctagtattctgcttgtaa

SEQ ID NO: 13339 - DNA, 24 bp, Homo sapiens
  source 1..24: mol_type = unassigned DNA
ttacaagcagaatactagagatta

SEQ ID NO: 13340 - RNA, 166 nt, Homo sapiens
  source 1..166: mol_type = unassigned RNA
gtattttcctttttaaactgcaccttggcaaaaatttttagcttggttggagctcctcacagtcccttgattcttctgctttttcttcaactaacatccactctttattcagtgaaggcctgtagtctgtggcatgctaatatctcaattctcttgccctcttcaa

SEQ ID NO: 13341 - DNA, 166 bp, Homo sapiens
  source 1..166: mol_type = unassigned DNA
gtattttcctttttaaactgcaccttggcaaaaatttttagcttggttggagctcctcacagtcccttgattcttctgctttttcttcaactaacatccactctttattcagtgaaggcctgtagtctgtggcatgctaatatctcaattctcttgccctcttcaa

SEQ ID NO: 13342 - DNA, 166 bp, Homo sapiens
  source 1..166: mol_type = unassigned DNA
ttgaagagggcaagagaattgagatattagcatgccacagactacaggccttcactgaataaagagtggatgttagttgaagaaaaagcagaagaatcaagggactgtgaggagctccaaccaagctaaaaatttttgccaaggtgcagtttaaaaaggaaaatac

SEQ ID NO: 13343 - RNA, 84 nt, Homo sapiens
  source 1..84: mol_type = unassigned RNA
ctccaaggagctctctgatcattccctggtgtctctctcgtttgctgtctgcccctctcccctgggctatgagcgccacaggag

SEQ ID NO: 13344 - DNA, 84 bp, Homo sapiens
  source 1..84: mol_type = unassigned DNA
ctccaaggagctctctgatcattccctggtgtctctctcgtttgctgtctgcccctctcccctgggctatgagcgccacaggag

SEQ ID NO: 13345 - DNA, 84 bp, Homo sapiens
  source 1..84: mol_type = unassigned DNA
ctcctgtggcgctcatagcccaggggagaggggcagacagcaaacgagagagacaccagggaatgatcagagagctccttggag

SEQ ID NO: 13346 - RNA, 37 nt, Homo sapiens
  source 1..37: mol_type = unassigned RNA
atttactggcatttggaacaatgtaatcaggaacagc

SEQ ID NO: 13347 - DNA, 37 bp, Homo sapiens
  source 1..37: mol_type = unassigned DNA
atttactggcatttggaacaatgtaatcaggaacagc

SEQ ID NO: 13348 - DNA, 37 bp, Homo sapiens
  source 1..37: mol_type = unassigned DNA
gctgttcctgattacattgttccaaatgccagtaaat

SEQ ID NO: 13349 - RNA, 58 nt, Homo sapiens
  source 1..58: mol_type = unassigned RNA
aatcaccactgtgcagggctctgtaacccagcttcagcctggaccctgggggcagact

SEQ ID NO: 13350 - DNA, 58 bp, Homo sapiens
  source 1..58: mol_type = unassigned DNA
aatcaccactgtgcagggctctgtaacccagcttcagcctggaccctgggggcagact

SEQ ID NO: 13351 - DNA, 58 bp, Homo sapiens
  source 1..58: mol_type = unassigned DNA
agtctgcccccagggtccaggctgaagctgggttacagagccctgcacagtggtgatt

SEQ ID NO: 13352 - RNA, 32 nt, Homo sapiens
  source 1..32: mol_type = unassigned RNA
cgccagttgatggggacctagggaagcaagat

SEQ ID NO: 13353 - DNA, 32 bp, Homo sapiens
  source 1..32: mol_type = unassigned DNA
cgccagttgatggggacctagggaagcaagat

SEQ ID NO: 13354 - DNA, 32 bp, Homo sapiens
  source 1..32: mol_type = unassigned DNA
atcttgcttccctaggtccccatcaactggcg

SEQ ID NO: 13355 - RNA, 152 nt, Homo sapiens
  source 1..152: mol_type = unassigned RNA
tttagttgtattacctcctctcttgtatatcagatatatctacatatatgtcagactgtttctgggctgtctgtcctctttaattagttcgtgtatctgtttctgcatcagtagcatactgtcttaactactgtagctttataaagtctatt

SEQ ID NO: 13356 - DNA, 152 bp, Homo sapiens
  source 1..152: mol_type = unassigned DNA
tttagttgtattacctcctctcttgtatatcagatatatctacatatatgtcagactgtttctgggctgtctgtcctctttaattagttcgtgtatctgtttctgcatcagtagcatactgtcttaactactgtagctttataaagtctatt

SEQ ID NO: 13357 - DNA, 152 bp, Homo sapiens
  source 1..152: mol_type = unassigned DNA
aatagactttataaagctacagtagttaagacagtatgctactgatgcagaaacagatacacgaactaattaaagaggacagacagcccagaaacagtctgacatatatgtagatatatctgatatacaagagaggaggtaatacaactaaa

SEQ ID NO: 13358 - RNA, 29 nt, Homo sapiens
  source 1..29: mol_type = unassigned RNA
atcacaaatagtgttgatcagatcttaca

SEQ ID NO: 13359 - DNA, 29 bp, Homo sapiens
  source 1..29: mol_type = unassigned DNA
atcacaaatagtgttgatcagatcttaca

SEQ ID NO: 13360 - DNA, 29 bp, Homo sapiens
  source 1..29: mol_type = unassigned DNA
tgtaagatctgatcaacactatttgtgat

SEQ ID NO: 13361 - RNA, 30 nt, Homo sapiens
  source 1..30: mol_type = unassigned RNA
actcgaactgattagctctgcaggcctgtg

SEQ ID NO: 13362 - DNA, 30 bp, Homo sapiens
  source 1..30: mol_type = unassigned DNA
actcgaactgattagctctgcaggcctgtg

SEQ ID NO: 13363 - DNA, 30 bp, Homo sapiens
  source 1..30: mol_type = unassigned DNA
cacaggcctgcagagctaatcagttcgagt

SEQ ID NO: 13364 - RNA, 31 nt, Homo sapiens
  source 1..31: mol_type = unassigned RNA
gaagtttcatactgaattataatcactttct

SEQ ID NO: 13365 - DNA, 31 bp, Homo sapiens
  source 1..31: mol_type = unassigned DNA
gaagtttcatactgaattataatcactttct

SEQ ID NO: 13366 - DNA, 31 bp, Homo sapiens
  source 1..31: mol_type = unassigned DNA
agaaagtgattataattcagtatgaaacttc

SEQ ID NO: 13367 - RNA, 31 nt, Homo sapiens
  source 1..31: mol_type = unassigned RNA
ctgttcatgttggaataaggatctgctcttc

SEQ ID NO: 13368 - DNA, 31 bp, Homo sapiens
  source 1..31: mol_type = unassigned DNA
ctgttcatgttggaataaggatctgctcttc

SEQ ID NO: 13369 - DNA, 31 bp, Homo sapiens
  source 1..31: mol_type = unassigned DNA
gaagagcagatccttattccaacatgaacag

SEQ ID NO: 13370 - RNA, 42 nt, Homo sapiens
  source 1..42: mol_type = unassigned RNA
ttttcagctacttggtgaactctggcattgttcccatctcga

SEQ ID NO: 13371 - DNA, 42 bp, Homo sapiens
  source 1..42: mol_type = unassigned DNA
ttttcagctacttggtgaactctggcattgttcccatctcga

SEQ ID NO: 13372 - DNA, 42 bp, Homo sapiens
  source 1..42: mol_type = unassigned DNA
tcgagatgggaacaatgccagagttcaccaagtagctgaaaa

SEQ ID NO: 13373 - RNA, 33 nt, Homo sapiens
  source 1..33: mol_type = unassigned RNA
gagataaggagggctctgtagaaactcacctgg

SEQ ID NO: 13374 - DNA, 33 bp, Homo sapiens
  source 1..33: mol_type = unassigned DNA
gagataaggagggctctgtagaaactcacctgg

SEQ ID NO: 13375 - DNA, 33 bp, Homo sapiens
  source 1..33: mol_type = unassigned DNA
ccaggtgagtttctacagagccctccttatctc

SEQ ID NO: 13376 - RNA, 28 nt, Homo sapiens
  source 1..28: mol_type = unassigned RNA
accactgtttgctgaatgccacaaggtc

SEQ ID NO: 13377 - DNA, 28 bp, Homo sapiens
  source 1..28: mol_type = unassigned DNA
accactgtttgctgaatgccacaaggtc

SEQ ID NO: 13378 - DNA, 28 bp, Homo sapiens
  source 1..28: mol_type = unassigned DNA
gaccttgtggcattcagcaaacagtggt

SEQ ID NO: 13379 - RNA, 28 nt, Homo sapiens
  source 1..28: mol_type = unassigned RNA
atttcctggaggccacagtcgggcacaa

SEQ ID NO: 13380 - DNA, 28 bp, Homo sapiens
  source 1..28: mol_type = unassigned DNA
atttcctggaggccacagtcgggcacaa

SEQ ID NO: 13381 - DNA, 28 bp, Homo sapiens
  source 1..28: mol_type = unassigned DNA
ttgtgcccgactgtggcctccaggaaat

SEQ ID NO: 13382 - RNA, 172 nt, Homo sapiens
  source 1..172: mol_type = unassigned RNA
tcccgcagcagctgtgctttctcatcagagctttttgatgcttggttctgtggactcgtcctctaagtttctaagtttctcctggtttccttgttctgtcagcccagtgagtttctgcatttgccacctctgttacactccagagtccacctttactctcttagccattaac

SEQ ID NO: 13383 - DNA, 172 bp, Homo sapiens
  source 1..172: mol_type = unassigned DNA
tcccgcagcagctgtgctttctcatcagagctttttgatgcttggttctgtggactcgtcctctaagtttctaagtttctcctggtttccttgttctgtcagcccagtgagtttctgcatttgccacctctgttacactccagagtccacctttactctcttagccattaac

SEQ ID NO: 13384 - DNA, 172 bp, Homo sapiens
  source 1..172: mol_type = unassigned DNA
gttaatggctaagagagtaaaggtggactctggagtgtaacagaggtggcaaatgcagaaactcactgggctgacagaacaaggaaaccaggagaaacttagaaacttagaggacgagtccacagaaccaagcatcaaaaagctctgatgagaaagcacagctgctgcggga

SEQ ID NO: 13385 - RNA, 30 nt, Homo sapiens
  source 1..30: mol_type = unassigned RNA
gctgccagttgaccctgaactgagcaatca

SEQ ID NO: 13386 - DNA, 30 bp, Homo sapiens
  source 1..30: mol_type = unassigned DNA
gctgccagttgaccctgaactgagcaatca

SEQ ID NO: 13387 - DNA, 30 bp, Homo sapiens
  source 1..30: mol_type = unassigned DNA
tgattgctcagttcagggtcaactggcagc

SEQ ID NO: 13388 - RNA, 40 nt, Homo sapiens
  source 1..40: mol_type = unassigned RNA
gatcctggtcaagtttaagacattcccgaacttcactgtt

SEQ ID NO: 13389 - DNA, 40 bp, Homo sapiens
  source 1..40: mol_type = unassigned DNA
gatcctggtcaagtttaagacattcccgaacttcactgtt

SEQ ID NO: 13390 - DNA, 40 bp, Homo sapiens
  source 1..40: mol_type = unassigned DNA
aacagtgaagttcgggaatgtcttaaacttgaccaggatc

SEQ ID NO: 13391 - RNA, 46 nt, Homo sapiens
  source 1..46: mol_type = unassigned RNA
acctcctcctcggccagctcaggttgcagcttctctggggaactgc

SEQ ID NO: 13392 - DNA, 46 bp, Homo sapiens
  source 1..46: mol_type = unassigned DNA
acctcctcctcggccagctcaggttgcagcttctctggggaactgc

SEQ ID NO: 13393 - DNA, 46 bp, Homo sapiens
  source 1..46: mol_type = unassigned DNA
gcagttccccagagaagctgcaacctgagctggccgaggaggaggt

SEQ ID NO: 13394 - RNA, 30 nt, Homo sapiens
  source 1..30: mol_type = unassigned RNA
tttgtacaagatccgcagacgtgtaaatgt

SEQ ID NO: 13395 - DNA, 30 bp, Homo sapiens
  source 1..30: mol_type = unassigned DNA
tttgtacaagatccgcagacgtgtaaatgt

SEQ ID NO: 13396 - DNA, 30 bp, Homo sapiens
  source 1..30: mol_type = unassigned DNA
acatttacacgtctgcggatcttgtacaaa

SEQ ID NO: 13397 - RNA, 40 nt, Homo sapiens
  source 1..40: mol_type = unassigned RNA
cttcactgtcttagaaccaagcaagattcaccagtgtttt

SEQ ID NO: 13398 - DNA, 40 bp, Homo sapiens
  source 1..40: mol_type = unassigned DNA
cttcactgtcttagaaccaagcaagattcaccagtgtttt

SEQ ID NO: 13399 - DNA, 40 bp, Homo sapiens
  source 1..40: mol_type = unassigned DNA
aaaacactggtgaatcttgcttggttctaagacagtgaag

SEQ ID NO: 13400 - RNA, 27 nt, Homo sapiens
  source 1..27: mol_type = unassigned RNA
ttcctctgagtgggagctggaccctgt

SEQ ID NO: 13401 - DNA, 27 bp, Homo sapiens
  source 1..27: mol_type = unassigned DNA
ttcctctgagtgggagctggaccctgt

SEQ ID NO: 13402 - DNA, 27 bp, Homo sapiens
  source 1..27: mol_type = unassigned DNA
acagggtccagctcccactcagaggaa

SEQ ID NO: 13403 - RNA, 31 nt, Homo sapiens
  source 1..31: mol_type = unassigned RNA
aacccaggagaactgctggccagattaatta

SEQ ID NO: 13404 - DNA, 31 bp, Homo sapiens
  source 1..31: mol_type = unassigned DNA
aacccaggagaactgctggccagattaatta

SEQ ID NO: 13405 - DNA, 31 bp, Homo sapiens
  source 1..31: mol_type = unassigned DNA
taattaatctggccagcagttctcctgggtt

SEQ ID NO: 13406 - RNA, 123 nt, Homo sapiens
  source 1..123: mol_type = unassigned RNA
ttactttattctaccagcacttttgataacaccctcttgtttcttatagatgagtgatgtgtctgcaggaggagccactgtttttcctgaagttggagctagtgtttggcccaaaaaagtaag

SEQ ID NO: 13407 - DNA, 123 bp, Homo sapiens
  source 1..123: mol_type = unassigned DNA
ttactttattctaccagcacttttgataacaccctcttgtttcttatagatgagtgatgtgtctgcaggaggagccactgtttttcctgaagttggagctagtgtttggcccaaaaaagtaag

SEQ ID NO: 13408 - DNA, 123 bp, Homo sapiens
  source 1..123: mol_type = unassigned DNA
cttacttttttgggccaaacactagctccaacttcaggaaaaacagtggctcctcctgcagacacatcactcatctataagaaacaagagggtgttatcaaaagtgctggtagaataaagtaa

SEQ ID NO: 13409 - RNA, 71 nt, Homo sapiens
  source 1..71: mol_type = unassigned RNA
tctttcattcagatcagctgatgtagtagtttcactcgtatgcaggacctgaaagactacctcacggggaa

SEQ ID NO: 13410 - DNA, 71 bp, Homo sapiens
  source 1..71: mol_type = unassigned DNA
tctttcattcagatcagctgatgtagtagtttcactcgtatgcaggacctgaaagactacctcacggggaa

SEQ ID NO: 13411 - DNA, 71 bp, Homo sapiens
  source 1..71: mol_type = unassigned DNA
ttccccgtgaggtagtctttcaggtcctgcatacgagtgaaactactacatcagctgatctgaatgaaaga

SEQ ID NO: 13412 - RNA, 34 nt, Homo sapiens
  source 1..34: mol_type = unassigned RNA
gtaatcctgctgatccagttgtacttaagtgtgt

SEQ ID NO: 13413 - DNA, 34 bp, Homo sapiens
  source 1..34: mol_type = unassigned DNA
gtaatcctgctgatccagttgtacttaagtgtgt

SEQ ID NO: 13414 - DNA, 34 bp, Homo sapiens
  source 1..34: mol_type = unassigned DNA
acacacttaagtacaactggatcagcaggattac

SEQ ID NO: 13415 - RNA, 53 nt, Homo sapiens
  source 1..53: mol_type = unassigned RNA
tgatgttcctgtggtgagacagcggaagaattctgcattggtcttggaattca

SEQ ID NO: 13416 - DNA, 53 bp, Homo sapiens
  source 1..53: mol_type = unassigned DNA
tgatgttcctgtggtgagacagcggaagaattctgcattggtcttggaattca

SEQ ID NO: 13417 - DNA, 53 bp, Homo sapiens
  source 1..53: mol_type = unassigned DNA
tgaattccaagaccaatgcagaattcttccgctgtctcaccacaggaacatca

SEQ ID NO: 13418 - RNA, 31 nt, Homo sapiens
  source 1..31: mol_type = unassigned RNA
ctattccgagccattgaccaagaggagaagg

SEQ ID NO: 13419 - DNA, 31 bp, Homo sapiens
  source 1..31: mol_type = unassigned DNA
ctattccgagccattgaccaagaggagaagg

SEQ ID NO: 13420 - DNA, 31 bp, Homo sapiens
  source 1..31: mol_type = unassigned DNA
ccttctcctcttggtcaatggctcggaatag

SEQ ID NO: 13421 - RNA, 31 nt, Homo sapiens
  source 1..31: mol_type = unassigned RNA
gttttctcttagaacattgtattacagatgc

SEQ ID NO: 13422 - DNA, 31 bp, Homo sapiens
  source 1..31: mol_type = unassigned DNA
gttttctcttagaacattgtattacagatgc

SEQ ID NO: 13423 - DNA, 31 bp, Homo sapiens
  source 1..31: mol_type = unassigned DNA
gcatctgtaatacaatgttctaagagaaaac

SEQ ID NO: 13424 - RNA, 30 nt, Homo sapiens
  source 1..30: mol_type = unassigned RNA
atatctatgctagaaggaggacccgtatta

SEQ ID NO: 13425 - DNA, 30 bp, Homo sapiens
  source 1..30: mol_type = unassigned DNA
atatctatgctagaaggaggacccgtatta

SEQ ID NO: 13426 - DNA, 30 bp, Homo sapiens
  source 1..30: mol_type = unassigned DNA
taatacgggtcctccttctagcatagatat

SEQ ID NO: 13427 - RNA, 95 nt, Homo sapiens
  source 1..95: mol_type = unassigned RNA
aaataactgacctgacagagctgtaaatcacactagaagaattttcataatgcagtcacatggtgattgtgtgtgattgcattatgaaaattatt

SEQ ID NO: 13428 - DNA, 95 bp, Homo sapiens
  source 1..95: mol_type = unassigned DNA
aaataactgacctgacagagctgtaaatcacactagaagaattttcataatgcagtcacatggtgattgtgtgtgattgcattatgaaaattatt

SEQ ID NO: 13429 - DNA, 95 bp, Homo sapiens
  source 1..95: mol_type = unassigned DNA
aataattttcataatgcaatcacacacaatcaccatgtgactgcattatgaaaattcttctagtgtgatttacagctctgtcaggtcagttattt

SEQ ID NO: 13430 - RNA, 32 nt, Homo sapiens
  source 1..32: mol_type = unassigned RNA
acgccagccaagacgtcggctccggaacgcat

SEQ ID NO: 13431 - DNA, 32 bp, Homo sapiens
  source 1..32: mol_type = unassigned DNA
acgccagccaagacgtcggctccggaacgcat

SEQ ID NO: 13432 - DNA, 32 bp, Homo sapiens
  source 1..32: mol_type = unassigned DNA
atgcgttccggagccgacgtcttggctggcgt

SEQ ID NO: 13433 - RNA, 23 nt, Homo sapiens
  source 1..23: mol_type = unassigned RNA
ctgcactgagccgtgcatattct

SEQ ID NO: 13434 - DNA, 23 bp, Homo sapiens
  source 1..23: mol_type = unassigned DNA
ctgcactgagccgtgcatattct

SEQ ID NO: 13435 - DNA, 23 bp, Homo sapiens
  source 1..23: mol_type = unassigned DNA
agaatatgcacggctcagtgcag

SEQ ID NO: 13436 - RNA, 24 nt, Homo sapiens
  source 1..24: mol_type = unassigned RNA
ctgtgagtgtaacagcggccaatt

SEQ ID NO: 13437 - DNA, 24 bp, Homo sapiens
  source 1..24: mol_type = unassigned DNA
ctgtgagtgtaacagcggccaatt

SEQ ID NO: 13438 - DNA, 24 bp, Homo sapiens
  source 1..24: mol_type = unassigned DNA
aattggccgctgttacactcacag

SEQ ID NO: 13439 - RNA, 52 nt, Homo sapiens
  source 1..52: mol_type = unassigned RNA
gtttcaccatgttggccaggctggtctcgaactcccctcaggtgatccaccc

SEQ ID NO: 13440 - DNA, 52 bp, Homo sapiens
  source 1..52: mol_type = unassigned DNA
gtttcaccatgttggccaggctggtctcgaactcccctcaggtgatccaccc

SEQ ID NO: 13441 - DNA, 52 bp, Homo sapiens
  source 1..52: mol_type = unassigned DNA
gggtggatcacctgaggggagttcgagaccagcctggccaacatggtgaaac

SEQ ID NO: 13442 - RNA, 77 nt, Homo sapiens
  source 1..77: mol_type = unassigned RNA
gtctcctaccagaacctgaagtgggtcatccttgactcagactatcactcgtttgcctcttctgaacattctcccag

SEQ ID NO: 13443 - DNA, 77 bp, Homo sapiens
  source 1..77: mol_type = unassigned DNA
gtctcctaccagaacctgaagtgggtcatccttgactcagactatcactcgtttgcctcttctgaacattctcccag

SEQ ID NO: 13444 - DNA, 77 bp, Homo sapiens
  source 1..77: mol_type = unassigned DNA
ctgggagaatgttcagaagaggcaaacgagtgatagtctgagtcaaggatgacccacttcaggttctggtaggagac

SEQ ID NO: 13445 - RNA, 157 nt, Homo sapiens
  source 1..157: mol_type = unassigned RNA
attaccaactatgatatctgagccttggtttgcttttccagagtggggaagcaaatcagcttttatgaaagatggattttagctctttgaaacaagatgcttagaataagatgactttgcaatatttttgggactcgaaacctaacagataagaaaa

SEQ ID NO: 13446 - DNA, 157 bp, Homo sapiens
  source 1..157: mol_type = unassigned DNA
attaccaactatgatatctgagccttggtttgcttttccagagtggggaagcaaatcagcttttatgaaagatggattttagctctttgaaacaagatgcttagaataagatgactttgcaatatttttgggactcgaaacctaacagataagaaaa

SEQ ID NO: 13447 - DNA, 157 bp, Homo sapiens
  source 1..157: mol_type = unassigned DNA
ttttcttatctgttaggtttcgagtcccaaaaatattgcaaagtcatcttattctaagcatcttgtttcaaagagctaaaatccatctttcataaaagctgatttgcttccccactctggaaaagcaaaccaaggctcagatatcatagttggtaat

SEQ ID NO: 13448 - RNA, 67 nt, Homo sapiens
  source 1..67: mol_type = unassigned RNA
cccctgtgtgccctaagttctgccctctgaaagagaaagacatgttttctgccatttattttcttgc

SEQ ID NO: 13449 - DNA, 67 bp, Homo sapiens
  source 1..67: mol_type = unassigned DNA
cccctgtgtgccctaagttctgccctctgaaagagaaagacatgttttctgccatttattttcttgc

SEQ ID NO: 13450 - DNA, 67 bp, Homo sapiens
  source 1..67: mol_type = unassigned DNA
gcaagaaaataaatggcagaaaacatgtctttctctttcagagggcagaacttagggcacacagggg

SEQ ID NO: 13451 - RNA, 67 nt, Homo sapiens
  source 1..67: mol_type = unassigned RNA
cctaaacgttgattggtggcttgtcggatcatgaattaactagttatctgatggccttctgcttgga

SEQ ID NO: 13452 - DNA, 67 bp, Homo sapiens
  source 1..67: mol_type = unassigned DNA
cctaaacgttgattggtggcttgtcggatcatgaattaactagttatctgatggccttctgcttgga

SEQ ID NO: 13453 - DNA, 67 bp, Homo sapiens
  source 1..67: mol_type = unassigned DNA
tccaagcagaaggccatcagataactagttaattcatgatccgacaagccaccaatcaacgtttagg

SEQ ID NO: 13454 - RNA, 112 nt, Homo sapiens
  source 1..112: mol_type = unassigned RNA
cacccctcccccagcctggctgccaccttgcagtttgatctcagactgctgtgctagcaatcagcgagactccgtggggtaggaccctctgagccaggtgcgggatataatc

SEQ ID NO: 13455 - DNA, 112 bp, Homo sapiens
  source 1..112: mol_type = unassigned DNA
cacccctcccccagcctggctgccaccttgcagtttgatctcagactgctgtgctagcaatcagcgagactccgtggggtaggaccctctgagccaggtgcgggatataatc

SEQ ID NO: 13456 - DNA, 112 bp, Homo sapiens
  source 1..112: mol_type = unassigned DNA
gattatatcccgcacctggctcagagggtcctaccccacggagtctcgctgattgctagcacagcagtctgagatcaaactgcaaggtggcagccaggctgggggaggggtg

SEQ ID NO: 13457 - RNA, 35 nt, Homo sapiens
  source 1..35: mol_type = unassigned RNA
gagcagtgattgtcagttgatatctctgagtaaca

SEQ ID NO: 13458 - DNA, 35 bp, Homo sapiens
  source 1..35: mol_type = unassigned DNA
gagcagtgattgtcagttgatatctctgagtaaca

SEQ ID NO: 13459 - DNA, 35 bp, Homo sapiens
  source 1..35: mol_type = unassigned DNA
tgttactcagagatatcaactgacaatcactgctc

SEQ ID NO: 13460 - RNA, 29 nt, Homo sapiens
  source 1..29: mol_type = unassigned RNA
ggcttccctgaactaaggacagagacttt

SEQ ID NO: 13461 - DNA, 29 bp, Homo sapiens
  source 1..29: mol_type = unassigned DNA
ggcttccctgaactaaggacagagacttt

SEQ ID NO: 13462 - DNA, 29 bp, Homo sapiens
  source 1..29: mol_type = unassigned DNA
aaagtctctgtccttagttcagggaagcc

SEQ ID NO: 13463 - RNA, 32 nt, Homo sapiens
  source 1..32: mol_type = unassigned RNA
aactccttgctaactctgacatccctgccctc

SEQ ID NO: 13464 - DNA, 32 bp, Homo sapiens
  source 1..32: mol_type = unassigned DNA
aactccttgctaactctgacatccctgccctc

SEQ ID NO: 13465 - DNA, 32 bp, Homo sapiens
  source 1..32: mol_type = unassigned DNA
gagggcagggatgtcagagttagcaaggagtt

SEQ ID NO: 13466 - RNA, 30 nt, Homo sapiens
  source 1..30: mol_type = unassigned RNA
gttttctcctcagaagtcgggtagatagca

SEQ ID NO: 13467 - DNA, 30 bp, Homo sapiens
  source 1..30: mol_type = unassigned DNA
gttttctcctcagaagtcgggtagatagca

SEQ ID NO: 13468 - DNA, 30 bp, Homo sapiens
  source 1..30: mol_type = unassigned DNA
tgctatctacccgacttctgaggagaaaac

SEQ ID NO: 13469 - RNA, 57 nt, Homo sapiens
  source 1..57: mol_type = unassigned RNA
caactcccttagggcaaggactctgagccctcatccgtgaataggactctctgtgtt

SEQ ID NO: 13470 - DNA, 57 bp, Homo sapiens
  source 1..57: mol_type = unassigned DNA
caactcccttagggcaaggactctgagccctcatccgtgaataggactctctgtgtt

SEQ ID NO: 13471 - DNA, 57 bp, Homo sapiens
  source 1..57: mol_type = unassigned DNA
aacacagagagtcctattcacggatgagggctcagagtccttgccctaagggagttg

SEQ ID NO: 13472 - RNA, 29 nt, Homo sapiens
  source 1..29: mol_type = unassigned RNA
ttggagagctgcctcttgaactgtgatct

SEQ ID NO: 13473 - DNA, 29 bp, Homo sapiens
  source 1..29: mol_type = unassigned DNA
ttggagagctgcctcttgaactgtgatct

SEQ ID NO: 13474 - DNA, 29 bp, Homo sapiens
  source 1..29: mol_type = unassigned DNA
agatcacagttcaagaggcagctctccaa

SEQ ID NO: 13475 - RNA, 33 nt, Homo sapiens
  source 1..33: mol_type = unassigned RNA
cctacgtagcctagctcatcagactgttataaa

SEQ ID NO: 13476 - DNA, 33 bp, Homo sapiens
  source 1..33: mol_type = unassigned DNA
cctacgtagcctagctcatcagactgttataaa

SEQ ID NO: 13477 - DNA, 33 bp, Homo sapiens
  source 1..33: mol_type = unassigned DNA
tttataacagtctgatgagctaggctacgtagg

SEQ ID NO: 13478 - RNA, 32 nt, Homo sapiens
  source 1..32: mol_type = unassigned RNA
aaccagcaggttgagtttcgggcgaggtaata

SEQ ID NO: 13479 - DNA, 32 bp, Homo sapiens
  source 1..32: mol_type = unassigned DNA
aaccagcaggttgagtttcgggcgaggtaata

SEQ ID NO: 13480 - DNA, 32 bp, Homo sapiens
  source 1..32: mol_type = unassigned DNA
tattacctcgcccgaaactcaacctgctggtt

SEQ ID NO: 13481 - RNA, 30 nt, Homo sapiens
  source 1..30: mol_type = unassigned RNA
cctccactgaacaggacaactctggtataa

SEQ ID NO: 13482 - DNA, 30 bp, Homo sapiens
  source 1..30: mol_type = unassigned DNA
cctccactgaacaggacaactctggtataa

SEQ ID NO: 13483 - DNA, 30 bp, Homo sapiens
  source 1..30: mol_type = unassigned DNA
ttataccagagttgtcctgttcagtggagg

SEQ ID NO: 13484 - RNA, 132 nt, Homo sapiens
  source 1..132: mol_type = unassigned RNA
aaaattacacaggggaatgtaggcacgatctgtttaagaaatactggactaaatggtctctaatctgtgattgtagattaaagaataatctacaatctacaccgtgttggccaggcacggtggctcacacct

SEQ ID NO: 13485 - DNA, 132 bp, Homo sapiens
  source 1..132: mol_type = unassigned DNA
aaaattacacaggggaatgtaggcacgatctgtttaagaaatactggactaaatggtctctaatctgtgattgtagattaaagaataatctacaatctacaccgtgttggccaggcacggtggctcacacct

SEQ ID NO: 13486 - DNA, 132 bp, Homo sapiens
  source 1..132: mol_type = unassigned DNA
aggtgtgagccaccgtgcctggccaacacggtgtagattgtagattattctttaatctacaatcacagattagagaccatttagtccagtatttcttaaacagatcgtgcctacattcccctgtgtaatttt

SEQ ID NO: 13487 - RNA, 26 nt, Homo sapiens
  source 1..26: mol_type = unassigned RNA
gggcagtgcttacagtgcggggagca

SEQ ID NO: 13488 - DNA, 26 bp, Homo sapiens
  source 1..26: mol_type = unassigned DNA
gggcagtgcttacagtgcggggagca

SEQ ID NO: 13489 - DNA, 26 bp, Homo sapiens
  source 1..26: mol_type = unassigned DNA
tgctccccgcactgtaagcactgccc

SEQ ID NO: 13490 - RNA, 29 nt, Homo sapiens
  source 1..29: mol_type = unassigned RNA
gtgtttagatgctaaacactgcctcatct

SEQ ID NO: 13491 - DNA, 29 bp, Homo sapiens
  source 1..29: mol_type = unassigned DNA
gtgtttagatgctaaacactgcctcatct

SEQ ID NO: 13492 - DNA, 29 bp, Homo sapiens
  source 1..29: mol_type = unassigned DNA
agatgaggcagtgtttagcatctaaacac

SEQ ID NO: 13493 - RNA, 38 nt, Homo sapiens
  source 1..38: mol_type = unassigned RNA
gaggcctgccgcgtgccctatggaagcagaaagatgat

SEQ ID NO: 13494 - DNA, 38 bp, Homo sapiens
  source 1..38: mol_type = unassigned DNA
gaggcctgccgcgtgccctatggaagcagaaagatgat

SEQ ID NO: 13495 - DNA, 38 bp, Homo sapiens
  source 1..38: mol_type = unassigned DNA
atcatctttctgcttccatagggcacgcggcaggcctc

SEQ ID NO: 13496 - RNA, 29 nt, Homo sapiens
  source 1..29: mol_type = unassigned RNA
gttcctgctcagaacctgccccgactccc

SEQ ID NO: 13497 - DNA, 29 bp, Homo sapiens
  source 1..29: mol_type = unassigned DNA
gttcctgctcagaacctgccccgactccc

SEQ ID NO: 13498 - DNA, 29 bp, Homo sapiens
  source 1..29: mol_type = unassigned DNA
gggagtcggggcaggttctgagcaggaac

SEQ ID NO: 13499 - RNA, 30 nt, Homo sapiens
  source 1..30: mol_type = unassigned RNA
tataagcgaagctgcctttgaccacagttt

SEQ ID NO: 13500 - DNA, 30 bp, Homo sapiens
  source 1..30: mol_type = unassigned DNA
tataagcgaagctgcctttgaccacagttt

SEQ ID NO: 13501 - DNA, 30 bp, Homo sapiens
  source 1..30: mol_type = unassigned DNA
aaactgtggtcaaaggcagcttcgcttata

SEQ ID NO: 13502 - RNA, 139 nt, Homo sapiens
  source 1..139: mol_type = unassigned RNA
ttagccagtcccagacagacctctgtcccccaagaacctgttcgtgtgacagggctgcctttgtggcactagtcctgacgtcccacatgagtggcctactcctgttaaccaccacaccatgtccctgctacaccccgag

SEQ ID NO: 13503 - DNA, 139 bp, Homo sapiens
  source 1..139: mol_type = unassigned DNA
ttagccagtcccagacagacctctgtcccccaagaacctgttcgtgtgacagggctgcctttgtggcactagtcctgacgtcccacatgagtggcctactcctgttaaccaccacaccatgtccctgctacaccccgag

SEQ ID NO: 13504 - DNA, 139 bp, Homo sapiens
  source 1..139: mol_type = unassigned DNA
ctcggggtgtagcagggacatggtgtggtggttaacaggagtaggccactcatgtgggacgtcaggactagtgccacaaaggcagccctgtcacacgaacaggttcttgggggacagaggtctgtctgggactggctaa

SEQ ID NO: 13505 - RNA, 38 nt, Homo sapiens
  source 1..38: mol_type = unassigned RNA
gtcctctcttgcttagttggcaccatctaattgagctt

SEQ ID NO: 13506 - DNA, 38 bp, Homo sapiens
  source 1..38: mol_type = unassigned DNA
gtcctctcttgcttagttggcaccatctaattgagctt

SEQ ID NO: 13507 - DNA, 38 bp, Homo sapiens
  source 1..38: mol_type = unassigned DNA
aagctcaattagatggtgccaactaagcaagagaggac

SEQ ID NO: 13508 - RNA, 31 nt, Homo sapiens
  source 1..31: mol_type = unassigned RNA
ctcggagacagtgaccagacgcagtaggtgt

SEQ ID NO: 13509 - DNA, 31 bp, Homo sapiens
  source 1..31: mol_type = unassigned DNA
ctcggagacagtgaccagacgcagtaggtgt

SEQ ID NO: 13510 - DNA, 31 bp, Homo sapiens
  source 1..31: mol_type = unassigned DNA
acacctactgcgtctggtcactgtctccgag

SEQ ID NO: 13511 - RNA, 31 nt, Homo sapiens
  source 1..31: mol_type = unassigned RNA
gggagctatgagtcctctgaaatgaacagca

SEQ ID NO: 13512 - DNA, 31 bp, Homo sapiens
  source 1..31: mol_type = unassigned DNA
gggagctatgagtcctctgaaatgaacagca

SEQ ID NO: 13513 - DNA, 31 bp, Homo sapiens
  source 1..31: mol_type = unassigned DNA
tgctgttcatttcagaggactcatagctccc

SEQ ID NO: 13514 - RNA, 35 nt, Homo sapiens
  source 1..35: mol_type = unassigned RNA
ctcctattctgtaggttgcctgttcactcttacga

SEQ ID NO: 13515 - DNA, 35 bp, Homo sapiens
  source 1..35: mol_type = unassigned DNA
ctcctattctgtaggttgcctgttcactcttacga

SEQ ID NO: 13516 - DNA, 35 bp, Homo sapiens
  source 1..35: mol_type = unassigned DNA
tcgtaagagtgaacaggcaacctacagaataggag

SEQ ID NO: 13517 - RNA, 193 nt, Homo sapiens
  source 1..193: mol_type = unassigned RNA
gcagcctggcatgaaagagcaggcctgcaggccaagccagatcacgtccgcacgcgggatgcttggcccacatgctcctgtacacttgtaactgttaaaccagaggacaagaagcaacagatgtcctcagatcaccaaaccagcaaatgcgcagagccatggtgggcgtctggccccagtgcttgggtggccc

SEQ ID NO: 13518 - DNA, 193 bp, Homo sapiens
  source 1..193: mol_type = unassigned DNA
gcagcctggcatgaaagagcaggcctgcaggccaagccagatcacgtccgcacgcgggatgcttggcccacatgctcctgtacacttgtaactgttaaaccagaggacaagaagcaacagatgtcctcagatcaccaaaccagcaaatgcgcagagccatggtgggcgtctggccccagtgcttgggtggccc

SEQ ID NO: 13519 - DNA, 193 bp, Homo sapiens
  source 1..193: mol_type = unassigned DNA
gggccacccaagcactggggccagacgcccaccatggctctgcgcatttgctggtttggtgatctgaggacatctgttgcttcttgtcctctggtttaacagttacaagtgtacaggagcatgtgggccaagcatcccgcgtgcggacgtgatctggcttggcctgcaggcctgctctttcatgccaggctgc

SEQ ID NO: 13520 - RNA, 66 nt, Homo sapiens
  source 1..66: mol_type = unassigned RNA
cctaccttctttcttataagactgttactactacatctcaggcaaattctcattttcataatgcat

SEQ ID NO: 13521 - DNA, 66 bp, Homo sapiens
  source 1..66: mol_type = unassigned DNA
cctaccttctttcttataagactgttactactacatctcaggcaaattctcattttcataatgcat

SEQ ID NO: 13522 - DNA, 66 bp, Homo sapiens
  source 1..66: mol_type = unassigned DNA
atgcattatgaaaatgagaatttgcctgagatgtagtagtaacagtcttataagaaagaaggtagg

SEQ ID NO: 13523 - RNA, 28 nt, Homo sapiens
  source 1..28: mol_type = unassigned RNA
tacccttcctgtgtaatactgaggctta

SEQ ID NO: 13524 - DNA, 28 bp, Homo sapiens
  source 1..28: mol_type = unassigned DNA
tacccttcctgtgtaatactgaggctta

SEQ ID NO: 13525 - DNA, 28 bp, Homo sapiens
  source 1..28: mol_type = unassigned DNA
taagcctcagtattacacaggaagggta

SEQ ID NO: 13526 - RNA, 53 nt, Homo sapiens
  source 1..53: mol_type = unassigned RNA
gcatgcatcagtagttcatttcgtttagggctgaataataatccatcgtatgt

SEQ ID NO: 13527 - DNA, 53 bp, Homo sapiens
  source 1..53: mol_type = unassigned DNA
gcatgcatcagtagttcatttcgtttagggctgaataataatccatcgtatgt

SEQ ID NO: 13528 - DNA, 53 bp, Homo sapiens
  source 1..53: mol_type = unassigned DNA
acatacgatggattattattcagccctaaacgaaatgaactactgatgcatgc

SEQ ID NO: 13529 - RNA, 33 nt, Homo sapiens
  source 1..33: mol_type = unassigned RNA
agtcttggctgaacgtttaccattgactcctgt

SEQ ID NO: 13530 - DNA, 33 bp, Homo sapiens
  source 1..33: mol_type = unassigned DNA
agtcttggctgaacgtttaccattgactcctgt

SEQ ID NO: 13531 - DNA, 33 bp, Homo sapiens
  source 1..33: mol_type = unassigned DNA
acaggagtcaatggtaaacgttcagccaagact

SEQ ID NO: 13532 - RNA, 27 nt, Homo sapiens
  source 1..27: mol_type = unassigned RNA
gcaggcgcgcggactggagaggcgcgc

SEQ ID NO: 13533 - DNA, 27 bp, Homo sapiens
  source 1..27: mol_type = unassigned DNA
gcaggcgcgcggactggagaggcgcgc

SEQ ID NO: 13534 - DNA, 27 bp, Homo sapiens
  source 1..27: mol_type = unassigned DNA
gcgcgcctctccagtccgcgcgcctgc

SEQ ID NO: 13535 - RNA, 22 nt, Homo sapiens
  source 1..22: mol_type = unassigned RNA
aagccaagaacctttccaggtt

SEQ ID NO: 13536 - DNA, 22 bp, Homo sapiens
  source 1..22: mol_type = unassigned DNA
aagccaagaacctttccaggtt

SEQ ID NO: 13537 - DNA, 22 bp, Homo sapiens
  source 1..22: mol_type = unassigned DNA
aacctggaaaggttcttggctt

SEQ ID NO: 13538 - RNA, 30 nt, Homo sapiens
  source 1..30: mol_type = unassigned RNA
atatacatcttaagactgtattagttctca

SEQ ID NO: 13539 - DNA, 30 bp, Homo sapiens
  source 1..30: mol_type = unassigned DNA
atatacatcttaagactgtattagttctca

SEQ ID NO: 13540 - DNA, 30 bp, Homo sapiens
  source 1..30: mol_type = unassigned DNA
tgagaactaatacagtcttaagatgtatat

SEQ ID NO: 13541 - RNA, 121 nt, Homo sapiens
  source 1..121: mol_type = unassigned RNA
atttagagacattttctatgttggctagaaatgatgaaagggcaaagtaactctgataagaagtcagtttctttggctcttcttcctgttttcagatgaccagaatcaaaggcagttttag

SEQ ID NO: 13542 - DNA, 121 bp, Homo sapiens
  source 1..121: mol_type = unassigned DNA
atttagagacattttctatgttggctagaaatgatgaaagggcaaagtaactctgataagaagtcagtttctttggctcttcttcctgttttcagatgaccagaatcaaaggcagttttag

SEQ ID NO: 13543 - DNA, 121 bp, Homo sapiens
  source 1..121: mol_type = unassigned DNA
ctaaaactgcctttgattctggtcatctgaaaacaggaagaagagccaaagaaactgacttcttatcagagttactttgccctttcatcatttctagccaacatagaaaatgtctctaaat

SEQ ID NO: 13544 - RNA, 97 nt, Homo sapiens
  source 1..97: mol_type = unassigned RNA
cagacctggcatcgaccaagcttctggagcttgtgccaccagagtcccacgactctggaggtctggggtggggctgtggtgtgacagtggctgcagg

SEQ ID NO: 13545 - DNA, 97 bp, Homo sapiens
  source 1..97: mol_type = unassigned DNA
cagacctggcatcgaccaagcttctggagcttgtgccaccagagtcccacgactctggaggtctggggtggggctgtggtgtgacagtggctgcagg

SEQ ID NO: 13546 - DNA, 97 bp, Homo sapiens
  source 1..97: mol_type = unassigned DNA
cctgcagccactgtcacaccacagccccaccccagacctccagagtcgtgggactctggtggcacaagctccagaagcttggtcgatgccaggtctg

SEQ ID NO: 13547 - RNA, 36 nt, Homo sapiens
  source 1..36: mol_type = unassigned RNA
gttcttcagatttggactgagccatgctagtggcat

SEQ ID NO: 13548 - DNA, 36 bp, Homo sapiens
  source 1..36: mol_type = unassigned DNA
gttcttcagatttggactgagccatgctagtggcat

SEQ ID NO: 13549 - DNA, 36 bp, Homo sapiens
  source 1..36: mol_type = unassigned DNA
atgccactagcatggctcagtccaaatctgaagaac

SEQ ID NO: 13550 - RNA, 42 nt, Homo sapiens
  source 1..42: mol_type = unassigned RNA
cagccaatgcagtccatggccagtagaacatttctccacgct

SEQ ID NO: 13551 - DNA, 42 bp, Homo sapiens
  source 1..42: mol_type = unassigned DNA
cagccaatgcagtccatggccagtagaacatttctccacgct

SEQ ID NO: 13552 - DNA, 42 bp, Homo sapiens
  source 1..42: mol_type = unassigned DNA
agcgtggagaaatgttctactggccatggactgcattggctg

SEQ ID NO: 13553 - RNA, 183 nt, Homo sapiens
  source 1..183: mol_type = unassigned RNA
ggaatttcctgggggccgccctctgtgactctccctgcatcttccacagggacccagcaacctgccgtgcccacagcagcctctgcacaacacccaaaagtttgtactagcttagatgttcacgtttctcttctcccacaccctgctcatcaggtagggaactttcccagtgaaaacggaact

SEQ ID NO: 13554 - DNA, 183 bp, Homo sapiens
  source 1..183: mol_type = unassigned DNA
ggaatttcctgggggccgccctctgtgactctccctgcatcttccacagggacccagcaacctgccgtgcccacagcagcctctgcacaacacccaaaagtttgtactagcttagatgttcacgtttctcttctcccacaccctgctcatcaggtagggaactttcccagtgaaaacggaact

SEQ ID NO: 13555 - DNA, 183 bp, Homo sapiens
  source 1..183: mol_type = unassigned DNA
agttccgttttcactgggaaagttccctacctgatgagcagggtgtgggagaagagaaacgtgaacatctaagctagtacaaacttttgggtgttgtgcagaggctgctgtgggcacggcaggttgctgggtccctgtggaagatgcagggagagtcacagagggcggcccccaggaaattcc

SEQ ID NO: 13556 - RNA, 43 nt, Homo sapiens
  source 1..43: mol_type = unassigned RNA
atatgtgacctcgtggcacaatggtagtacatctgactccaga

SEQ ID NO: 13557 - DNA, 43 bp, Homo sapiens
  source 1..43: mol_type = unassigned DNA
atatgtgacctcgtggcacaatggtagtacatctgactccaga

SEQ ID NO: 13558 - DNA, 43 bp, Homo sapiens
  source 1..43: mol_type = unassigned DNA
tctggagtcagatgtactaccattgtgccacgaggtcacatat

SEQ ID NO: 13559 - RNA, 72 nt, Homo sapiens
  source 1..72: mol_type = unassigned RNA
gaaatatttagtgacatctctgtctatctgtgtctatctctgtctttctgtgtctctctgtctctttctctt

SEQ ID NO: 13560 - DNA, 72 bp, Homo sapiens
  source 1..72: mol_type = unassigned DNA
gaaatatttagtgacatctctgtctatctgtgtctatctctgtctttctgtgtctctctgtctctttctctt

SEQ ID NO: 13561 - DNA, 72 bp, Homo sapiens
  source 1..72: mol_type = unassigned DNA
aagagaaagagacagagagacacagaaagacagagatagacacagatagacagagatgtcactaaatatttc

SEQ ID NO: 13562 - RNA, 36 nt, Homo sapiens
  source 1..36: mol_type = unassigned RNA
gctcctttcatgtaacccctcctgctctcgttatcc

SEQ ID NO: 13563 - DNA, 36 bp, Homo sapiens
  source 1..36: mol_type = unassigned DNA
gctcctttcatgtaacccctcctgctctcgttatcc

SEQ ID NO: 13564 - DNA, 36 bp, Homo sapiens
  source 1..36: mol_type = unassigned DNA
ggataacgagagcaggaggggttacatgaaaggagc

SEQ ID NO: 13565 - RNA, 26 nt, Homo sapiens
  source 1..26: mol_type = unassigned RNA
agaggctcctttcctcttacctttcc

SEQ ID NO: 13566 - DNA, 26 bp, Homo sapiens
  source 1..26: mol_type = unassigned DNA
agaggctcctttcctcttacctttcc

SEQ ID NO: 13567 - DNA, 26 bp, Homo sapiens
  source 1..26: mol_type = unassigned DNA
ggaaaggtaagaggaaaggagcctct

SEQ ID NO: 13568 - RNA, 57 nt, Homo sapiens
  source 1..57: mol_type = unassigned RNA
gtaatctggaacctcgtggctggcgtgtgatgtgatgaactcccctgctgatgcgtg

SEQ ID NO: 13569 - DNA, 57 bp, Homo sapiens
  source 1..57: mol_type = unassigned DNA
gtaatctggaacctcgtggctggcgtgtgatgtgatgaactcccctgctgatgcgtg

SEQ ID NO: 13570 - DNA, 57 bp, Homo sapiens
  source 1..57: mol_type = unassigned DNA
cacgcatcagcaggggagttcatcacatcacacgccagccacgaggttccagattac

SEQ ID NO: 13571 - RNA, 114 nt, Homo sapiens
  source 1..114: mol_type = unassigned RNA
agagaaacctttgtgaccactctgatatgaaagtgagaactcaccactggtcactctttgtcaatctaacttactgcttcacaatactcaaaagtcgaattaatcactgtttat

SEQ ID NO: 13572 - DNA, 114 bp, Homo sapiens
  source 1..114: mol_type = unassigned DNA
agagaaacctttgtgaccactctgatatgaaagtgagaactcaccactggtcactctttgtcaatctaacttactgcttcacaatactcaaaagtcgaattaatcactgtttat

SEQ ID NO: 13573 - DNA, 114 bp, Homo sapiens
  source 1..114: mol_type = unassigned DNA
ataaacagtgattaattcgacttttgagtattgtgaagcagtaagttagattgacaaagagtgaccagtggtgagttctcactttcatatcagagtggtcacaaaggtttctct

SEQ ID NO: 13574 - RNA, 31 nt, Homo sapiens
  source 1..31: mol_type = unassigned RNA
aggattttgttttgggaacctgaataaaaga

SEQ ID NO: 13575 - DNA, 31 bp, Homo sapiens
  source 1..31: mol_type = unassigned DNA
aggattttgttttgggaacctgaataaaaga

SEQ ID NO: 13576 - DNA, 31 bp, Homo sapiens
  source 1..31: mol_type = unassigned DNA
tcttttattcaggttcccaaaacaaaatcct

SEQ ID NO: 13577 - RNA, 49 nt, Homo sapiens
  source 1..49: mol_type = unassigned RNA
ttgttgattgttcttctgcttgtgttgatgacattttactgattttccg

SEQ ID NO: 13578 - DNA, 49 bp, Homo sapiens
  source 1..49: mol_type = unassigned DNA
ttgttgattgttcttctgcttgtgttgatgacattttactgattttccg

SEQ ID NO: 13579 - DNA, 49 bp, Homo sapiens
  source 1..49: mol_type = unassigned DNA
cggaaaatcagtaaaatgtcatcaacacaagcagaagaacaatcaacaa

SEQ ID NO: 13580 - RNA, 69 nt, Homo sapiens
  source 1..69: mol_type = unassigned RNA
ctcctcctccttcccttcaccagtccctggctgtgagaacctgctgacttctctagtcagtcagcaact

SEQ ID NO: 13581 - DNA, 69 bp, Homo sapiens
  source 1..69: mol_type = unassigned DNA
ctcctcctccttcccttcaccagtccctggctgtgagaacctgctgacttctctagtcagtcagcaact

SEQ ID NO: 13582 - DNA, 69 bp, Homo sapiens
  source 1..69: mol_type = unassigned DNA
agttgctgactgactagagaagtcagcaggttctcacagccagggactggtgaagggaaggaggaggag

SEQ ID NO: 13583 - RNA, 30 nt, Homo sapiens
  source 1..30: mol_type = unassigned RNA
gggaagcccactggcaggactctcgctttg

SEQ ID NO: 13584 - DNA, 30 bp, Homo sapiens
  source 1..30: mol_type = unassigned DNA
gggaagcccactggcaggactctcgctttg

SEQ ID NO: 13585 - DNA, 30 bp, Homo sapiens
  source 1..30: mol_type = unassigned DNA
caaagcgagagtcctgccagtgggcttccc

SEQ ID NO: 13586 - RNA, 31 nt, Homo sapiens
  source 1..31: mol_type = unassigned RNA
ccagttttactgtgagctcaactaccggctg

SEQ ID NO: 13587 - DNA, 31 bp, Homo sapiens
  source 1..31: mol_type = unassigned DNA
ccagttttactgtgagctcaactaccggctg

SEQ ID NO: 13588 - DNA, 31 bp, Homo sapiens
  source 1..31: mol_type = unassigned DNA
cagccggtagttgagctcacagtaaaactgg

SEQ ID NO: 13589 - RNA, 39 nt, Homo sapiens
  source 1..39: mol_type = unassigned RNA
aacaatattatcttcatttggacttagccatgctaaatg

SEQ ID NO: 13590 - DNA, 39 bp, Homo sapiens
  source 1..39: mol_type = unassigned DNA
aacaatattatcttcatttggacttagccatgctaaatg

SEQ ID NO: 13591 - DNA, 39 bp, Homo sapiens
  source 1..39: mol_type = unassigned DNA
catttagcatggctaagtccaaatgaagataatattgtt

SEQ ID NO: 13592 - RNA, 29 nt, Homo sapiens
  source 1..29: mol_type = unassigned RNA
ctaccctaaagagaactgaaaaacctata

SEQ ID NO: 13593 - DNA, 29 bp, Homo sapiens
  source 1..29: mol_type = unassigned DNA
ctaccctaaagagaactgaaaaacctata

SEQ ID NO: 13594 - DNA, 29 bp, Homo sapiens
  source 1..29: mol_type = unassigned DNA
tataggtttttcagttctctttagggtag

SEQ ID NO: 13595 - RNA, 88 nt, Homo sapiens
  source 1..88: mol_type = unassigned RNA
ctccctcccaccagccctctttctggccaagttctagtcccacctgctttgtgcctactggtagttcgttttctggtctttagtgtcc

SEQ ID NO: 13596 - DNA, 88 bp, Homo sapiens
  source 1..88: mol_type = unassigned DNA
ctccctcccaccagccctctttctggccaagttctagtcccacctgctttgtgcctactggtagttcgttttctggtctttagtgtcc

SEQ ID NO: 13597 - DNA, 88 bp, Homo sapiens
  source 1..88: mol_type = unassigned DNA
ggacactaaagaccagaaaacgaactaccagtaggcacaaagcaggtgggactagaacttggccagaaagagggctggtgggagggag

SEQ ID NO: 13598 - RNA, 30 nt, Homo sapiens
  source 1..30: mol_type = unassigned RNA
cacggccagtgcaggaatccaggtagtgga

SEQ ID NO: 13599 - DNA, 30 bp, Homo sapiens
  source 1..30: mol_type = unassigned DNA
cacggccagtgcaggaatccaggtagtgga

SEQ ID NO: 13600 - DNA, 30 bp, Homo sapiens
  source 1..30: mol_type = unassigned DNA
tccactacctggattcctgcactggccgtg

SEQ ID NO: 13601 - RNA, 195 nt, Homo sapiens
  source 1..195: mol_type = unassigned RNA
cctatgtggcccacctttctaattttttttcctctcttttgacctccccagaccgagtgacggttctctacaggagcaaagccattcgctatacctggccttgtccatttcctatggccgactccagcccttgggttcatattaccctaggtgatggcagcaccttccagaccaaattgttggtagttgaagatt

SEQ ID NO: 13602 - DNA, 195 bp, Homo sapiens
  source 1..195: mol_type = unassigned DNA
cctatgtggcccacctttctaattttttttcctctcttttgacctccccagaccgagtgacggttctctacaggagcaaagccattcgctatacctggccttgtccatttcctatggccgactccagcccttgggttcatattaccctaggtgatggcagcaccttccagaccaaattgttggtagttgaagatt

SEQ ID NO: 13603 - DNA, 195 bp, Homo sapiens
  source 1..195: mol_type = unassigned DNA
aatcttcaactaccaacaatttggtctggaaggtgctgccatcacctagggtaatatgaacccaagggctggagtcggccataggaaatggacaaggccaggtatagcgaatggctttgctcctgtagagaaccgtcactcggtctggggaggtcaaaagagaggaaaaaaaattagaaaggtgggccacatagg

SEQ ID NO: 13604 - RNA, 153 nt, Homo sapiens
  source 1..153: mol_type = unassigned RNA
aaaaaaaagtgagccatcttttgttcatttaaaatggtgttttgaatttcgtatgcagaaaacgttttgttacattgcagattttaatgtatttaataaatgcaacatgcagattaagtgcagtgtatactgagtatttaaattaaaatgtac

SEQ ID NO: 13605 - DNA, 153 bp, Homo sapiens
  source 1..153: mol_type = unassigned DNA
aaaaaaaagtgagccatcttttgttcatttaaaatggtgttttgaatttcgtatgcagaaaacgttttgttacattgcagattttaatgtatttaataaatgcaacatgcagattaagtgcagtgtatactgagtatttaaattaaaatgtac

SEQ ID NO: 13606 - DNA, 153 bp, Homo sapiens
  source 1..153: mol_type = unassigned DNA
gtacattttaatttaaatactcagtatacactgcacttaatctgcatgttgcatttattaaatacattaaaatctgcaatgtaacaaaacgttttctgcatacgaaattcaaaacaccattttaaatgaacaaaagatggctcactttttttt

SEQ ID NO: 13607 - RNA, 31 nt, Homo sapiens
  source 1..31: mol_type = unassigned RNA
ttcagacttggactgagctatgctactggct

SEQ ID NO: 13608 - DNA, 31 bp, Homo sapiens
  source 1..31: mol_type = unassigned DNA
ttcagacttggactgagctatgctactggct

SEQ ID NO: 13609 - DNA, 31 bp, Homo sapiens
  source 1..31: mol_type = unassigned DNA
agccagtagcatagctcagtccaagtctgaa

SEQ ID NO: 13610 - RNA, 22 nt, Homo sapiens
  source 1..22: mol_type = unassigned RNA
caaccccagtccatgggaaagt

SEQ ID NO: 13611 - DNA, 22 bp, Homo sapiens
  source 1..22: mol_type = unassigned DNA
caaccccagtccatgggaaagt

SEQ ID NO: 13612 - DNA, 22 bp, Homo sapiens
  source 1..22: mol_type = unassigned DNA
actttcccatggactggggttg

SEQ ID NO: 13613 - RNA, 25 nt, Homo sapiens
  source 1..25: mol_type = unassigned RNA
ttgcaaccatcctgagccactgggt

SEQ ID NO: 13614 - DNA, 25 bp, Homo sapiens
  source 1..25: mol_type = unassigned DNA
ttgcaaccatcctgagccactgggt

SEQ ID NO: 13615 - DNA, 25 bp, Homo sapiens
  source 1..25: mol_type = unassigned DNA
acccagtggctcaggatggttgcaa

SEQ ID NO: 13616 - RNA, 33 nt, Homo sapiens
  source 1..33: mol_type = unassigned RNA
gcagcgcccttctgggctccccgagcgtccaca

SEQ ID NO: 13617 - DNA, 33 bp, Homo sapiens
  source 1..33: mol_type = unassigned DNA
gcagcgcccttctgggctccccgagcgtccaca

SEQ ID NO: 13618 - DNA, 33 bp, Homo sapiens
  source 1..33: mol_type = unassigned DNA
tgtggacgctcggggagcccagaagggcgctgc

SEQ ID NO: 13619 - RNA, 52 nt, Homo sapiens
  source 1..52: mol_type = unassigned RNA
atttaagtggctaagttcagtcaatagtgagcagcaggtccagagtttagac

SEQ ID NO: 13620 - DNA, 52 bp, Homo sapiens
  source 1..52: mol_type = unassigned DNA
atttaagtggctaagttcagtcaatagtgagcagcaggtccagagtttagac

SEQ ID NO: 13621 - DNA, 52 bp, Homo sapiens
  source 1..52: mol_type = unassigned DNA
gtctaaactctggacctgctgctcactattgactgaacttagccacttaaat

SEQ ID NO: 13622 - RNA, 24 nt, Homo sapiens
  source 1..24: mol_type = unassigned RNA
gcctgcgctctgagtcctggcagc

SEQ ID NO: 13623 - DNA, 24 bp, Homo sapiens
  source 1..24: mol_type = unassigned DNA
gcctgcgctctgagtcctggcagc

SEQ ID NO: 13624 - DNA, 24 bp, Homo sapiens
  source 1..24: mol_type = unassigned DNA
gctgccaggactcagagcgcaggc

SEQ ID NO: 13625 - RNA, 33 nt, Homo sapiens
  source 1..33: mol_type = unassigned RNA
actggactgagcccagctatttacctgaagcta

SEQ ID NO: 13626 - DNA, 33 bp, Homo sapiens
  source 1..33: mol_type = unassigned DNA
actggactgagcccagctatttacctgaagcta

SEQ ID NO: 13627 - DNA, 33 bp, Homo sapiens
  source 1..33: mol_type = unassigned DNA
tagcttcaggtaaatagctgggctcagtccagt

SEQ ID NO: 13628 - RNA, 84 nt, Homo sapiens
  source 1..84: mol_type = unassigned RNA
aggaacagaattcagatcctctgacacctcatccagatctatctcaatgcaccaccctgcctgatttccttggttcctcccaat

SEQ ID NO: 13629 - DNA, 84 bp, Homo sapiens
  source 1..84: mol_type = unassigned DNA
aggaacagaattcagatcctctgacacctcatccagatctatctcaatgcaccaccctgcctgatttccttggttcctcccaat

SEQ ID NO: 13630 - DNA, 84 bp, Homo sapiens
  source 1..84: mol_type = unassigned DNA
attgggaggaaccaaggaaatcaggcagggtggtgcattgagatagatctggatgaggtgtcagaggatctgaattctgttcct

SEQ ID NO: 13631 - RNA, 53 nt, Homo sapiens
  source 1..53: mol_type = unassigned RNA
tggggtgtgtgtgcctgtgtgtgtgagagaggctgagtgtgtgtctgttggga

SEQ ID NO: 13632 - DNA, 53 bp, Homo sapiens
  source 1..53: mol_type = unassigned DNA
tggggtgtgtgtgcctgtgtgtgtgagagaggctgagtgtgtgtctgttggga

SEQ ID NO: 13633 - DNA, 53 bp, Homo sapiens
  source 1..53: mol_type = unassigned DNA
tcccaacagacacacactcagcctctctcacacacacaggcacacacacccca

SEQ ID NO: 13634 - RNA, 58 nt, Homo sapiens
  source 1..58: mol_type = unassigned RNA
gctgacttccaactgctgaaccttgatttgttctggtttttactctctccacccaccc

SEQ ID NO: 13635 - DNA, 58 bp, Homo sapiens
  source 1..58: mol_type = unassigned DNA
gctgacttccaactgctgaaccttgatttgttctggtttttactctctccacccaccc

SEQ ID NO: 13636 - DNA, 58 bp, Homo sapiens
  source 1..58: mol_type = unassigned DNA
gggtgggtggagagagtaaaaaccagaacaaatcaaggttcagcagttggaagtcagc

SEQ ID NO: 13637 - RNA, 101 nt, Homo sapiens
  source 1..101: mol_type = unassigned RNA
taacacccagtgatccttcggtgcttttcagaaatcaaagtttgaaaccatcctacaagttatgtgtgctgtagtactgttaagccttaatttccgtctgg

SEQ ID NO: 13638 - DNA, 101 bp, Homo sapiens
  source 1..101: mol_type = unassigned DNA
taacacccagtgatccttcggtgcttttcagaaatcaaagtttgaaaccatcctacaagttatgtgtgctgtagtactgttaagccttaatttccgtctgg

SEQ ID NO: 13639 - DNA, 101 bp, Homo sapiens
  source 1..101: mol_type = unassigned DNA
ccagacggaaattaaggcttaacagtactacagcacacataacttgtaggatggtttcaaactttgatttctgaaaagcaccgaaggatcactgggtgtta

SEQ ID NO: 13640 - RNA, 31 nt, Homo sapiens
  source 1..31: mol_type = unassigned RNA
ctcccagggattgcaggcctgggcgccgggg

SEQ ID NO: 13641 - DNA, 31 bp, Homo sapiens
  source 1..31: mol_type = unassigned DNA
ctcccagggattgcaggcctgggcgccgggg

SEQ ID NO: 13642 - DNA, 31 bp, Homo sapiens
  source 1..31: mol_type = unassigned DNA
ccccggcgcccaggcctgcaatccctgggag

SEQ ID NO: 13643 - RNA, 151 nt, Homo sapiens
  source 1..151: mol_type = unassigned RNA
actataatcaccctaagcctgagagaggtgaactgttcaagggtactttggctccagtgggtgacagtacctggcccagctttggaattgaaacatttctgatggtctgtactctgctagaacacaggatgcttctgctctccctgctctg

SEQ ID NO: 13644 - DNA, 151 bp, Homo sapiens
  source 1..151: mol_type = unassigned DNA
actataatcaccctaagcctgagagaggtgaactgttcaagggtactttggctccagtgggtgacagtacctggcccagctttggaattgaaacatttctgatggtctgtactctgctagaacacaggatgcttctgctctccctgctctg

SEQ ID NO: 13645 - DNA, 151 bp, Homo sapiens
  source 1..151: mol_type = unassigned DNA
cagagcagggagagcagaagcatcctgtgttctagcagagtacagaccatcagaaatgtttcaattccaaagctgggccaggtactgtcacccactggagccaaagtacccttgaacagttcacctctctcaggcttagggtgattatagt

SEQ ID NO: 13646 - RNA, 76 nt, Homo sapiens
  source 1..76: mol_type = unassigned RNA
taggccgaaccctgtgggttctcttttaaatttttagatgtcttggttcctgccctcaagatccttctttgaatgt

SEQ ID NO: 13647 - DNA, 76 bp, Homo sapiens
  source 1..76: mol_type = unassigned DNA
taggccgaaccctgtgggttctcttttaaatttttagatgtcttggttcctgccctcaagatccttctttgaatgt

SEQ ID NO: 13648 - DNA, 76 bp, Homo sapiens
  source 1..76: mol_type = unassigned DNA
acattcaaagaaggatcttgagggcaggaaccaagacatctaaaaatttaaaagagaacccacagggttcggccta

SEQ ID NO: 13649 - RNA, 49 nt, Homo sapiens
  source 1..49: mol_type = unassigned RNA
atgtcagtgggaagtttatcaaactgttgttaaaatttggaatttggta

SEQ ID NO: 13650 - DNA, 49 bp, Homo sapiens
  source 1..49: mol_type = unassigned DNA
atgtcagtgggaagtttatcaaactgttgttaaaatttggaatttggta

SEQ ID NO: 13651 - DNA, 49 bp, Homo sapiens
  source 1..49: mol_type = unassigned DNA
taccaaattccaaattttaacaacagtttgataaacttcccactgacat

SEQ ID NO: 13652 - RNA, 30 nt, Homo sapiens
  source 1..30: mol_type = unassigned RNA
caatgccaatcaagtttacaaccagcagca

SEQ ID NO: 13653 - DNA, 30 bp, Homo sapiens
  source 1..30: mol_type = unassigned DNA
caatgccaatcaagtttacaaccagcagca

SEQ ID NO: 13654 - DNA, 30 bp, Homo sapiens
  source 1..30: mol_type = unassigned DNA
tgctgctggttgtaaacttgattggcattg

SEQ ID NO: 13655 - RNA, 34 nt, Homo sapiens
  source 1..34: mol_type = unassigned RNA
gtttcagttgccagagtctgccctccgagacctc

SEQ ID NO: 13656 - DNA, 34 bp, Homo sapiens
  source 1..34: mol_type = unassigned DNA
gtttcagttgccagagtctgccctccgagacctc

SEQ ID NO: 13657 - DNA, 34 bp, Homo sapiens
  source 1..34: mol_type = unassigned DNA
gaggtctcggagggcagactctggcaactgaaac

SEQ ID NO: 13658 - RNA, 29 nt, Homo sapiens
  source 1..29: mol_type = unassigned RNA
actcacagaaaccgagttgactaagccta

SEQ ID NO: 13659 - DNA, 29 bp, Homo sapiens
  source 1..29: mol_type = unassigned DNA
actcacagaaaccgagttgactaagccta

SEQ ID NO: 13660 - DNA, 29 bp, Homo sapiens
  source 1..29: mol_type = unassigned DNA
taggcttagtcaactcggtttctgtgagt

SEQ ID NO: 13661 - RNA, 25 nt, Homo sapiens
  source 1..25: mol_type = unassigned RNA
tgagtgcctgctatgtgccagtcac

SEQ ID NO: 13662 - DNA, 25 bp, Homo sapiens
  source 1..25: mol_type = unassigned DNA
tgagtgcctgctatgtgccagtcac

SEQ ID NO: 13663 - DNA, 25 bp, Homo sapiens
  source 1..25: mol_type = unassigned DNA
gtgactggcacatagcaggcactca

SEQ ID NO: 13664 - RNA, 43 nt, Homo sapiens
  source 1..43: mol_type = unassigned RNA
tacagttggatctgatgagagcaccttgatctttgaccaaatt

SEQ ID NO: 13665 - DNA, 43 bp, Homo sapiens
  source 1..43: mol_type = unassigned DNA
tacagttggatctgatgagagcaccttgatctttgaccaaatt

SEQ ID NO: 13666 - DNA, 43 bp, Homo sapiens
  source 1..43: mol_type = unassigned DNA
aatttggtcaaagatcaaggtgctctcatcagatccaactgta

SEQ ID NO: 13667 - RNA, 47 nt, Homo sapiens
  source 1..47: mol_type = unassigned RNA
cctgtggactccctgatagtgaggagttctgtccatctctgtgcttt

SEQ ID NO: 13668 - DNA, 47 bp, Homo sapiens
  source 1..47: mol_type = unassigned DNA
cctgtggactccctgatagtgaggagttctgtccatctctgtgcttt

SEQ ID NO: 13669 - DNA, 47 bp, Homo sapiens
  source 1..47: mol_type = unassigned DNA
aaagcacagagatggacagaactcctcactatcagggagtccacagg

SEQ ID NO: 13670 - RNA, 22 nt, Homo sapiens
  source 1..22: mol_type = unassigned RNA
aatctctagtcttctgctagtg

SEQ ID NO: 13671 - DNA, 22 bp, Homo sapiens
  source 1..22: mol_type = unassigned DNA
aatctctagtcttctgctagtg

SEQ ID NO: 13672 - DNA, 22 bp, Homo sapiens
  source 1..22: mol_type = unassigned DNA
cactagcagaagactagagatt

SEQ ID NO: 13673 - RNA, 90 nt, Homo sapiens
  source 1..90: mol_type = unassigned RNA
ttcagaactaaaaatatgtggctttgatatgactggatcaagaactccaggcctcctgctaaacacttccctgagctccttgaatgcttt

SEQ ID NO: 13674 - DNA, 90 bp, Homo sapiens
  source 1..90: mol_type = unassigned DNA
ttcagaactaaaaatatgtggctttgatatgactggatcaagaactccaggcctcctgctaaacacttccctgagctccttgaatgcttt

SEQ ID NO: 13675 - DNA, 90 bp, Homo sapiens
  source 1..90: mol_type = unassigned DNA
aaagcattcaaggagctcagggaagtgtttagcaggaggcctggagttcttgatccagtcatatcaaagccacatatttttagttctgaa

SEQ ID NO: 13676 - RNA, 44 nt, Homo sapiens
  source 1..44: mol_type = unassigned RNA
tcatgtcttgaagcctctcactgggactactctgagaacatctc

SEQ ID NO: 13677 - DNA, 44 bp, Homo sapiens
  source 1..44: mol_type = unassigned DNA
tcatgtcttgaagcctctcactgggactactctgagaacatctc

SEQ ID NO: 13678 - DNA, 44 bp, Homo sapiens
  source 1..44: mol_type = unassigned DNA
gagatgttctcagagtagtcccagtgagaggcttcaagacatga

SEQ ID NO: 13679 - RNA, 21 nt, Homo sapiens
  source 1..21: mol_type = unassigned RNA
tggcagtgtcttatggaaaga

SEQ ID NO: 13680 - DNA, 21 bp, Homo sapiens
  source 1..21: mol_type = unassigned DNA
tggcagtgtcttatggaaaga

SEQ ID NO: 13681 - DNA, 21 bp, Homo sapiens
  source 1..21: mol_type = unassigned DNA
tctttccataagacactgcca

SEQ ID NO: 13682 - RNA, 168 nt, Homo sapiens
  source 1..168: mol_type = unassigned RNA
ctccacagacaatgcgccccttgaatgccagattccaggatggactgctcccactaccctccccaccactggtcacccctgtcctatcagccgtcagtcttggcccttcacttactgtgtacaacacttggcaaggtaactaatttctataagtccaggctttctcac

SEQ ID NO: 13683 - DNA, 168 bp, Homo sapiens
  source 1..168: mol_type = unassigned DNA
ctccacagacaatgcgccccttgaatgccagattccaggatggactgctcccactaccctccccaccactggtcacccctgtcctatcagccgtcagtcttggcccttcacttactgtgtacaacacttggcaaggtaactaatttctataagtccaggctttctcac

SEQ ID NO: 13684 - DNA, 168 bp, Homo sapiens
  source 1..168: mol_type = unassigned DNA
gtgagaaagcctggacttatagaaattagttaccttgccaagtgttgtacacagtaagtgaagggccaagactgacggctgataggacaggggtgaccagtggtggggagggtagtgggagcagtccatcctggaatctggcattcaaggggcgcattgtctgtggag

SEQ ID NO: 13685 - RNA, 87 nt, Homo sapiens
  source 1..87: mol_type = unassigned RNA
aacatcaagtacctcggaggcagaacatgcgaggggcagggaacgccaagaggaggcacttacctgccattgagaaagtgcggctgc

SEQ ID NO: 13686 - DNA, 87 bp, Homo sapiens
  source 1..87: mol_type = unassigned DNA
aacatcaagtacctcggaggcagaacatgcgaggggcagggaacgccaagaggaggcacttacctgccattgagaaagtgcggctgc

SEQ ID NO: 13687 - DNA, 87 bp, Homo sapiens
  source 1..87: mol_type = unassigned DNA
gcagccgcactttctcaatggcaggtaagtgcctcctcttggcgttccctgcccctcgcatgttctgcctccgaggtacttgatgtt

SEQ ID NO: 13688 - RNA, 52 nt, Homo sapiens
  source 1..52: mol_type = unassigned RNA
tttgtagatcctttgttcctttcttcctcttgttgtttacctagctttattt

SEQ ID NO: 13689 - DNA, 52 bp, Homo sapiens
  source 1..52: mol_type = unassigned DNA
tttgtagatcctttgttcctttcttcctcttgttgtttacctagctttattt

SEQ ID NO: 13690 - DNA, 52 bp, Homo sapiens
  source 1..52: mol_type = unassigned DNA
aaataaagctaggtaaacaacaagaggaagaaaggaacaaaggatctacaaa

SEQ ID NO: 13691 - RNA, 30 nt, Homo sapiens
  source 1..30: mol_type = unassigned RNA
cctcctgttctcctgaaggtggggcacagc

SEQ ID NO: 13692 - DNA, 30 bp, Homo sapiens
  source 1..30: mol_type = unassigned DNA
cctcctgttctcctgaaggtggggcacagc

SEQ ID NO: 13693 - DNA, 30 bp, Homo sapiens
  source 1..30: mol_type = unassigned DNA
gctgtgccccaccttcaggagaacaggagg

SEQ ID NO: 13694 - RNA, 128 nt, Homo sapiens
  source 1..128: mol_type = unassigned RNA
ctgcagtgtggggcttcgggtcttgctgtttcctgaacaatgcctgactcttgtatgccatccttctggaggtgttaatgttggtttccttctaactgtttccagtgttggagacctgcagattaaat

SEQ ID NO: 13695 - DNA, 128 bp, Homo sapiens
  source 1..128: mol_type = unassigned DNA
ctgcagtgtggggcttcgggtcttgctgtttcctgaacaatgcctgactcttgtatgccatccttctggaggtgttaatgttggtttccttctaactgtttccagtgttggagacctgcagattaaat

SEQ ID NO: 13696 - DNA, 128 bp, Homo sapiens
  source 1..128: mol_type = unassigned DNA
atttaatctgcaggtctccaacactggaaacagttagaaggaaaccaacattaacacctccagaaggatggcatacaagagtcaggcattgttcaggaaacagcaagacccgaagccccacactgcag

SEQ ID NO: 13697 - RNA, 124 nt, Homo sapiens
  source 1..124: mol_type = unassigned RNA
gtataagtaggttaagcagtcaccgtgatgtacaatagatttctgaacttactcctcctatctaactgaaattttgtatccttggactagcatctccccattcctcctattcctcagtgtctgg

SEQ ID NO: 13698 - DNA, 124 bp, Homo sapiens
  source 1..124: mol_type = unassigned DNA
gtataagtaggttaagcagtcaccgtgatgtacaatagatttctgaacttactcctcctatctaactgaaattttgtatccttggactagcatctccccattcctcctattcctcagtgtctgg

SEQ ID NO: 13699 - DNA, 124 bp, Homo sapiens
  source 1..124: mol_type = unassigned DNA
ccagacactgaggaataggaggaatggggagatgctagtccaaggatacaaaatttcagttagataggaggagtaagttcagaaatctattgtacatcacggtgactgcttaacctacttatac

SEQ ID NO: 13700 - RNA, 25 nt, Homo sapiens
  source 1..25: mol_type = unassigned RNA
ctgctggggccctgggcagactatt

SEQ ID NO: 13701 - DNA, 25 bp, Homo sapiens
  source 1..25: mol_type = unassigned DNA
ctgctggggccctgggcagactatt

SEQ ID NO: 13702 - DNA, 25 bp, Homo sapiens
  source 1..25: mol_type = unassigned DNA
aatagtctgcccagggccccagcag

SEQ ID NO: 13703 - RNA, 29 nt, Homo sapiens
  source 1..29: mol_type = unassigned RNA
aatgtctggagtgaatgagaatgtgtttg

SEQ ID NO: 13704 - DNA, 29 bp, Homo sapiens
  source 1..29: mol_type = unassigned DNA
aatgtctggagtgaatgagaatgtgtttg

SEQ ID NO: 13705 - DNA, 29 bp, Homo sapiens
  source 1..29: mol_type = unassigned DNA
caaacacattctcattcactccagacatt

SEQ ID NO: 13706 - RNA, 29 nt, Homo sapiens
  source 1..29: mol_type = unassigned RNA
ccgtgacaaactccgccccatcatcatct

SEQ ID NO: 13707 - DNA, 29 bp, Homo sapiens
  source 1..29: mol_type = unassigned DNA
ccgtgacaaactccgccccatcatcatct

SEQ ID NO: 13708 - DNA, 29 bp, Homo sapiens
  source 1..29: mol_type = unassigned DNA
agatgatgatggggcggagtttgtcacgg

SEQ ID NO: 13709 - RNA, 27 nt, Homo sapiens
  source 1..27: mol_type = unassigned RNA
ttgctctgtcgcttcgttggcaaattc

SEQ ID NO: 13710 - DNA, 27 bp, Homo sapiens
  source 1..27: mol_type = unassigned DNA
ttgctctgtcgcttcgttggcaaattc

SEQ ID NO: 13711 - DNA, 27 bp, Homo sapiens
  source 1..27: mol_type = unassigned DNA
gaatttgccaacgaagcgacagagcaa

SEQ ID NO: 13712 - RNA, 145 nt, Homo sapiens
  source 1..145: mol_type = unassigned RNA
tatatatttttttccatttgtagactgattattattttcttgttaccggattttgagaagattaaaaaggatgatagtaacgatagatgtagttaaactctgagcgcttaccgtgtgccaggctcttcgctaaactcttagcatg

SEQ ID NO: 13713 - DNA, 145 bp, Homo sapiens
  source 1..145: mol_type = unassigned DNA
tatatatttttttccatttgtagactgattattattttcttgttaccggattttgagaagattaaaaaggatgatagtaacgatagatgtagttaaactctgagcgcttaccgtgtgccaggctcttcgctaaactcttagcatg

SEQ ID NO: 13714 - DNA, 145 bp, Homo sapiens
  source 1..145: mol_type = unassigned DNA
catgctaagagtttagcgaagagcctggcacacggtaagcgctcagagtttaactacatctatcgttactatcatcctttttaatcttctcaaaatccggtaacaagaaaataataatcagtctacaaatggaaaaaaatatata

SEQ ID NO: 13715 - RNA, 39 nt, Homo sapiens
  source 1..39: mol_type = unassigned RNA
atctcttagcaaaggtgaatgccagatgtaaatggcgcc

SEQ ID NO: 13716 - DNA, 39 bp, Homo sapiens
  source 1..39: mol_type = unassigned DNA
atctcttagcaaaggtgaatgccagatgtaaatggcgcc

SEQ ID NO: 13717 - DNA, 39 bp, Homo sapiens
  source 1..39: mol_type = unassigned DNA
ggcgccatttacatctggcattcacctttgctaagagat

SEQ ID NO: 13718 - RNA, 148 nt, Homo sapiens
  source 1..148: mol_type = unassigned RNA
ctcacaagatctggtcgtttgaaactgtgtagcacttccccttttgctctcgctctctcctgctgacagtgagaagatgggcttgcttccccttcaccctttgccaggattgtaagtttcctgaggcttctgtacagcctgcagaact

SEQ ID NO: 13719 - DNA, 148 bp, Homo sapiens
  source 1..148: mol_type = unassigned DNA
ctcacaagatctggtcgtttgaaactgtgtagcacttccccttttgctctcgctctctcctgctgacagtgagaagatgggcttgcttccccttcaccctttgccaggattgtaagtttcctgaggcttctgtacagcctgcagaact

SEQ ID NO: 13720 - DNA, 148 bp, Homo sapiens
  source 1..148: mol_type = unassigned DNA
agttctgcaggctgtacagaagcctcaggaaacttacaatcctggcaaagggtgaaggggaagcaagcccatcttctcactgtcagcaggagagagcgagagcaaaaggggaagtgctacacagtttcaaacgaccagatcttgtgag

SEQ ID NO: 13721 - RNA, 84 nt, Homo sapiens
  source 1..84: mol_type = unassigned RNA
tagaaactttcttgactgtagaaactcaagataatcttttcatttatgacattatctctttgtcttctgcttgaatctcttgaa

SEQ ID NO: 13722 - DNA, 84 bp, Homo sapiens
  source 1..84: mol_type = unassigned DNA
tagaaactttcttgactgtagaaactcaagataatcttttcatttatgacattatctctttgtcttctgcttgaatctcttgaa

SEQ ID NO: 13723 - DNA, 84 bp, Homo sapiens
  source 1..84: mol_type = unassigned DNA
ttcaagagattcaagcagaagacaaagagataatgtcataaatgaaaagattatcttgagtttctacagtcaagaaagtttcta

SEQ ID NO: 13724 - RNA, 54 nt, Homo sapiens
  source 1..54: mol_type = unassigned RNA
ctgggttctctactgcaaacctgtttttttatgacctgtatctcacgccgacct

SEQ ID NO: 13725 - DNA, 54 bp, Homo sapiens
  source 1..54: mol_type = unassigned DNA
ctgggttctctactgcaaacctgtttttttatgacctgtatctcacgccgacct

SEQ ID NO: 13726 - DNA, 54 bp, Homo sapiens
  source 1..54: mol_type = unassigned DNA
aggtcggcgtgagatacaggtcataaaaaaacaggtttgcagtagagaacccag

SEQ ID NO: 13727 - RNA, 28 nt, Homo sapiens
  source 1..28: mol_type = unassigned RNA
ctcttatagatcgttactgtggcgtgaa

SEQ ID NO: 13728 - DNA, 28 bp, Homo sapiens
  source 1..28: mol_type = unassigned DNA
ctcttatagatcgttactgtggcgtgaa

SEQ ID NO: 13729 - DNA, 28 bp, Homo sapiens
  source 1..28: mol_type = unassigned DNA
ttcacgccacagtaacgatctataagag

SEQ ID NO: 13730 - RNA, 105 nt, Homo sapiens
  source 1..105: mol_type = unassigned RNA
ctcattctgagttcaaagcaactcctgttaaggaagcccattcagaagctgactggatattctggcaggccaaggatggagactctcctgaaagtgctttcaggc

SEQ ID NO: 13731 - DNA, 105 bp, Homo sapiens
  source 1..105: mol_type = unassigned DNA
ctcattctgagttcaaagcaactcctgttaaggaagcccattcagaagctgactggatattctggcaggccaaggatggagactctcctgaaagtgctttcaggc

SEQ ID NO: 13732 - DNA, 105 bp, Homo sapiens
  source 1..105: mol_type = unassigned DNA
gcctgaaagcactttcaggagagtctccatccttggcctgccagaatatccagtcagcttctgaatgggcttccttaacaggagttgctttgaactcagaatgag

SEQ ID NO: 13733 - RNA, 58 nt, Homo sapiens
  source 1..58: mol_type = unassigned RNA
ttttttaatactccctgcattgtctctgttatctctgaattccttttcttccttttct

SEQ ID NO: 13734 - DNA, 58 bp, Homo sapiens
  source 1..58: mol_type = unassigned DNA
ttttttaatactccctgcattgtctctgttatctctgaattccttttcttccttttct

SEQ ID NO: 13735 - DNA, 58 bp, Homo sapiens
  source 1..58: mol_type = unassigned DNA
agaaaaggaagaaaaggaattcagagataacagagacaatgcagggagtattaaaaaa

SEQ ID NO: 13736 - RNA, 30 nt, Homo sapiens
  source 1..30: mol_type = unassigned RNA
ccagacttggactgagccatgctagtggct

SEQ ID NO: 13737 - DNA, 30 bp, Homo sapiens
  source 1..30: mol_type = unassigned DNA
ccagacttggactgagccatgctagtggct

SEQ ID NO: 13738 - DNA, 30 bp, Homo sapiens
  source 1..30: mol_type = unassigned DNA
agccactagcatggctcagtccaagtctgg

SEQ ID NO: 13739 - RNA, 29 nt, Homo sapiens
  source 1..29: mol_type = unassigned RNA
cagataattaactagctattacagatctc

SEQ ID NO: 13740 - DNA, 29 bp, Homo sapiens
  source 1..29: mol_type = unassigned DNA
cagataattaactagctattacagatctc

SEQ ID NO: 13741 - DNA, 29 bp, Homo sapiens
  source 1..29: mol_type = unassigned DNA
gagatctgtaatagctagttaattatctg

SEQ ID NO: 13742 - RNA, 29 nt, Homo sapiens
  source 1..29: mol_type = unassigned RNA
tttctcctgcttgtgggagggcctttttc

SEQ ID NO: 13743 - DNA, 29 bp, Homo sapiens
  source 1..29: mol_type = unassigned DNA
tttctcctgcttgtgggagggcctttttc

SEQ ID NO: 13744 - DNA, 29 bp, Homo sapiens
  source 1..29: mol_type = unassigned DNA
gaaaaaggccctcccacaagcaggagaaa

SEQ ID NO: 13745 - RNA, 32 nt, Homo sapiens
  source 1..32: mol_type = unassigned RNA
cattctcttggaatactgcagtagaagggtaa

SEQ ID NO: 13746 - DNA, 32 bp, Homo sapiens
  source 1..32: mol_type = unassigned DNA
cattctcttggaatactgcagtagaagggtaa

SEQ ID NO: 13747 - DNA, 32 bp, Homo sapiens
  source 1..32: mol_type = unassigned DNA
ttacccttctactgcagtattccaagagaatg

SEQ ID NO: 13748 - RNA, 87 nt, Homo sapiens
  source 1..87: mol_type = unassigned RNA
tagacttcagcgcagggcacctctgctttcggtttctgtctggctctacgtgccgtgggggattgagaggcatctctggccaggcca

SEQ ID NO: 13749 - DNA, 87 bp, Homo sapiens
  source 1..87: mol_type = unassigned DNA
tagacttcagcgcagggcacctctgctttcggtttctgtctggctctacgtgccgtgggggattgagaggcatctctggccaggcca

SEQ ID NO: 13750 - DNA, 87 bp, Homo sapiens
  source 1..87: mol_type = unassigned DNA
tggcctggccagagatgcctctcaatcccccacggcacgtagagccagacagaaaccgaaagcagaggtgccctgcgctgaagtcta

SEQ ID NO: 13751 - RNA, 32 nt, Homo sapiens
  source 1..32: mol_type = unassigned RNA
atcccctctgttcaccaagaggaagtgacatg

SEQ ID NO: 13752 - DNA, 32 bp, Homo sapiens
  source 1..32: mol_type = unassigned DNA
atcccctctgttcaccaagaggaagtgacatg

SEQ ID NO: 13753 - DNA, 32 bp, Homo sapiens
  source 1..32: mol_type = unassigned DNA
catgtcacttcctcttggtgaacagaggggat

SEQ ID NO: 13754 - RNA, 29 nt, Homo sapiens
  source 1..29: mol_type = unassigned RNA
cagagccgccgcgggagcttccagcgtcc

SEQ ID NO: 13755 - DNA, 29 bp, Homo sapiens
  source 1..29: mol_type = unassigned DNA
cagagccgccgcgggagcttccagcgtcc

SEQ ID NO: 13756 - DNA, 29 bp, Homo sapiens
  source 1..29: mol_type = unassigned DNA
ggacgctggaagctcccgcggcggctctg

SEQ ID NO: 13757 - RNA, 25 nt, Homo sapiens
  source 1..25: mol_type = unassigned RNA
tattgggtaatccaggatagtctgc

SEQ ID NO: 13758 - DNA, 25 bp, Homo sapiens
  source 1..25: mol_type = unassigned DNA
tattgggtaatccaggatagtctgc

SEQ ID NO: 13759 - DNA, 25 bp, Homo sapiens
  source 1..25: mol_type = unassigned DNA
gcagactatcctggattacccaata

SEQ ID NO: 13760 - RNA, 30 nt, Homo sapiens
  source 1..30: mol_type = unassigned RNA
ttgtcccaagaccaagtcgtaatagcaact

SEQ ID NO: 13761 - DNA, 30 bp, Homo sapiens
  source 1..30: mol_type = unassigned DNA
ttgtcccaagaccaagtcgtaatagcaact

SEQ ID NO: 13762 - DNA, 30 bp, Homo sapiens
  source 1..30: mol_type = unassigned DNA
agttgctattacgacttggtcttgggacaa

SEQ ID NO: 13763 - RNA, 39 nt, Homo sapiens
  source 1..39: mol_type = unassigned RNA
aaatcaaaagaatattatcatactttatctttcgtatgc

SEQ ID NO: 13764 - DNA, 39 bp, Homo sapiens
  source 1..39: mol_type = unassigned DNA
aaatcaaaagaatattatcatactttatctttcgtatgc

SEQ ID NO: 13765 - DNA, 39 bp, Homo sapiens
  source 1..39: mol_type = unassigned DNA
gcatacgaaagataaagtatgataatattcttttgattt

SEQ ID NO: 13766 - RNA, 119 nt, Homo sapiens
  source 1..119: mol_type = unassigned RNA
attatgtaaatgaactctcccgttgaccagcgccatgttgtctgctccttactgtacgcctggcggataaagagaaaagaagatggagccgccatcttgaacatgattggcacaattgc

SEQ ID NO: 13767 - DNA, 119 bp, Homo sapiens
  source 1..119: mol_type = unassigned DNA
attatgtaaatgaactctcccgttgaccagcgccatgttgtctgctccttactgtacgcctggcggataaagagaaaagaagatggagccgccatcttgaacatgattggcacaattgc

SEQ ID NO: 13768 - DNA, 119 bp, Homo sapiens
  source 1..119: mol_type = unassigned DNA
gcaattgtgccaatcatgttcaagatggcggctccatcttcttttctctttatccgccaggcgtacagtaaggagcagacaacatggcgctggtcaacgggagagttcatttacataat

SEQ ID NO: 13769 - RNA, 23 nt, Homo sapiens
  source 1..23: mol_type = unassigned RNA
cctttgatactcagctggagcca

SEQ ID NO: 13770 - DNA, 23 bp, Homo sapiens
  source 1..23: mol_type = unassigned DNA
cctttgatactcagctggagcca

SEQ ID NO: 13771 - DNA, 23 bp, Homo sapiens
  source 1..23: mol_type = unassigned DNA
tggctccagctgagtatcaaagg

SEQ ID NO: 13772 - RNA, 40 nt, Homo sapiens
  source 1..40: mol_type = unassigned RNA
gaggtgttcactgctgcactgcttgtgacagcggaaaaac

SEQ ID NO: 13773 - DNA, 40 bp, Homo sapiens
  source 1..40: mol_type = unassigned DNA
gaggtgttcactgctgcactgcttgtgacagcggaaaaac

SEQ ID NO: 13774 - DNA, 40 bp, Homo sapiens
  source 1..40: mol_type = unassigned DNA
gtttttccgctgtcacaagcagtgcagcagtgaacacctc

SEQ ID NO: 13775 - RNA, 55 nt, Homo sapiens
  source 1..55: mol_type = unassigned RNA
cctccattttggttgcttcctcacgcccctgtttctgaacactcctcccatcttt

SEQ ID NO: 13776 - DNA, 55 bp, Homo sapiens
  source 1..55: mol_type = unassigned DNA
cctccattttggttgcttcctcacgcccctgtttctgaacactcctcccatcttt

SEQ ID NO: 13777 - DNA, 55 bp, Homo sapiens
  source 1..55: mol_type = unassigned DNA
aaagatgggaggagtgttcagaaacaggggcgtgaggaagcaaccaaaatggagg

SEQ ID NO: 13778 - RNA, 30 nt, Homo sapiens
  source 1..30: mol_type = unassigned RNA
agaaattattgcatctgtggaacatatatc

SEQ ID NO: 13779 - DNA, 30 bp, Homo sapiens
  source 1..30: mol_type = unassigned DNA
agaaattattgcatctgtggaacatatatc

SEQ ID NO: 13780 - DNA, 30 bp, Homo sapiens
  source 1..30: mol_type = unassigned DNA
gatatatgttccacagatgcaataatttct

SEQ ID NO: 13781 - RNA, 30 nt, Homo sapiens
  source 1..30: mol_type = unassigned RNA
cgaacccagagccttctcccatagtatctc

SEQ ID NO: 13782 - DNA, 30 bp, Homo sapiens
  source 1..30: mol_type = unassigned DNA
cgaacccagagccttctcccatagtatctc

SEQ ID NO: 13783 - DNA, 30 bp, Homo sapiens
  source 1..30: mol_type = unassigned DNA
gagatactatgggagaaggctctgggttcg

SEQ ID NO: 13784 - RNA, 31 nt, Homo sapiens
  source 1..31: mol_type = unassigned RNA
tcacttgttttagttctgatccagggagatc

SEQ ID NO: 13785 - DNA, 31 bp, Homo sapiens
  source 1..31: mol_type = unassigned DNA
tcacttgttttagttctgatccagggagatc

SEQ ID NO: 13786 - DNA, 31 bp, Homo sapiens
  source 1..31: mol_type = unassigned DNA
gatctccctggatcagaactaaaacaagtga

SEQ ID NO: 13787 - RNA, 142 nt, Homo sapiens
  source 1..142: mol_type = unassigned RNA
atgagtcagtttacaatatgccatattagcgatctcatgatgattcagaccacagtctgggttaaagatgtcttgacctctgaggctagcataacatatatgagaatacaacttgcctatttccagaaaatctgtatatttt

SEQ ID NO: 13788 - DNA, 142 bp, Homo sapiens
  source 1..142: mol_type = unassigned DNA
atgagtcagtttacaatatgccatattagcgatctcatgatgattcagaccacagtctgggttaaagatgtcttgacctctgaggctagcataacatatatgagaatacaacttgcctatttccagaaaatctgtatatttt

SEQ ID NO: 13789 - DNA, 142 bp, Homo sapiens
  source 1..142: mol_type = unassigned DNA
aaaatatacagattttctggaaataggcaagttgtattctcatatatgttatgctagcctcagaggtcaagacatctttaacccagactgtggtctgaatcatcatgagatcgctaatatggcatattgtaaactgactcat

SEQ ID NO: 13790 - RNA, 72 nt, Homo sapiens
  source 1..72: mol_type = unassigned RNA
cacttcttaccacaccttagagcccaagagatcatgtttgtgaggccctccatggcaagcagcaagaatgga

SEQ ID NO: 13791 - DNA, 72 bp, Homo sapiens
  source 1..72: mol_type = unassigned DNA
cacttcttaccacaccttagagcccaagagatcatgtttgtgaggccctccatggcaagcagcaagaatgga

SEQ ID NO: 13792 - DNA, 72 bp, Homo sapiens
  source 1..72: mol_type = unassigned DNA
tccattcttgctgcttgccatggagggcctcacaaacatgatctcttgggctctaaggtgtggtaagaagtg

SEQ ID NO: 13793 - RNA, 32 nt, Homo sapiens
  source 1..32: mol_type = unassigned RNA
ggctccgaaatagaaacggagttgcccatttc

SEQ ID NO: 13794 - DNA, 32 bp, Homo sapiens
  source 1..32: mol_type = unassigned DNA
ggctccgaaatagaaacggagttgcccatttc

SEQ ID NO: 13795 - DNA, 32 bp, Homo sapiens
  source 1..32: mol_type = unassigned DNA
gaaatgggcaactccgtttctatttcggagcc

SEQ ID NO: 13796 - RNA, 85 nt, Homo sapiens
  source 1..85: mol_type = unassigned RNA
cggctgcctggtaggtgactggatgcattgatagtgctcactgggatttcgctgacgtggccccaaccctgcctccctacccacc

SEQ ID NO: 13797 - DNA, 85 bp, Homo sapiens
  source 1..85: mol_type = unassigned DNA
cggctgcctggtaggtgactggatgcattgatagtgctcactgggatttcgctgacgtggccccaaccctgcctccctacccacc

SEQ ID NO: 13798 - DNA, 85 bp, Homo sapiens
  source 1..85: mol_type = unassigned DNA
ggtgggtagggaggcagggttggggccacgtcagcgaaatcccagtgagcactatcaatgcatccagtcacctaccaggcagccg

SEQ ID NO: 13799 - RNA, 24 nt, Homo sapiens
  source 1..24: mol_type = unassigned RNA
aatgccgatatactctagatgaag

SEQ ID NO: 13800 - DNA, 24 bp, Homo sapiens
  source 1..24: mol_type = unassigned DNA
aatgccgatatactctagatgaag

SEQ ID NO: 13801 - DNA, 24 bp, Homo sapiens
  source 1..24: mol_type = unassigned DNA
cttcatctagagtatatcggcatt

SEQ ID NO: 13802 - RNA, 31 nt, Homo sapiens
  source 1..31: mol_type = unassigned RNA
gcgggccctagggccacagggaccagcatgg

SEQ ID NO: 13803 - DNA, 31 bp, Homo sapiens
  source 1..31: mol_type = unassigned DNA
gcgggccctagggccacagggaccagcatgg

SEQ ID NO: 13804 - DNA, 31 bp, Homo sapiens
  source 1..31: mol_type = unassigned DNA
ccatgctggtccctgtggccctagggcccgc

SEQ ID NO: 13805 - RNA, 143 nt, Homo sapiens
  source 1..143: mol_type = unassigned RNA
attcctggtggctccaccccatccccccagtgcatgtgggcctctggtctgctgcaggcatgtccaggcaagacaagtccaggttcccttatctgcacttaacatctggtgtaaacacttgtggagctggttggagattctcc

SEQ ID NO: 13806 - DNA, 143 bp, Homo sapiens
  source 1..143: mol_type = unassigned DNA
attcctggtggctccaccccatccccccagtgcatgtgggcctctggtctgctgcaggcatgtccaggcaagacaagtccaggttcccttatctgcacttaacatctggtgtaaacacttgtggagctggttggagattctcc

SEQ ID NO: 13807 - DNA, 143 bp, Homo sapiens
  source 1..143: mol_type = unassigned DNA
ggagaatctccaaccagctccacaagtgtttacaccagatgttaagtgcagataagggaacctggacttgtcttgcctggacatgcctgcagcagaccagaggcccacatgcactggggggatggggtggagccaccaggaat

SEQ ID NO: 13808 - RNA, 133 nt, Homo sapiens
  source 1..133: mol_type = unassigned RNA
ctggggtcctaagaagccggctttggcagaaggacaggaatgctgggccctttcccagctcccggctcagctcatagcagcctccagggtagctgggttgagttgggctgggtcaggctgagctgcatcccag

SEQ ID NO: 13809 - DNA, 133 bp, Homo sapiens
  source 1..133: mol_type = unassigned DNA
ctggggtcctaagaagccggctttggcagaaggacaggaatgctgggccctttcccagctcccggctcagctcatagcagcctccagggtagctgggttgagttgggctgggtcaggctgagctgcatcccag

SEQ ID NO: 13810 - DNA, 133 bp, Homo sapiens
  source 1..133: mol_type = unassigned DNA
ctgggatgcagctcagcctgacccagcccaactcaacccagctaccctggaggctgctatgagctgagccgggagctgggaaagggcccagcattcctgtccttctgccaaagccggcttcttaggaccccag

SEQ ID NO: 13811 - RNA, 90 nt, Homo sapiens
  source 1..90: mol_type = unassigned RNA
atattcattcttcactctgaagttaatgtacacaagaggccaactaaggatttgcatcctatttactttaaaatgcccaggtgcaatttt

SEQ ID NO: 13812 - DNA, 90 bp, Homo sapiens
  source 1..90: mol_type = unassigned DNA
atattcattcttcactctgaagttaatgtacacaagaggccaactaaggatttgcatcctatttactttaaaatgcccaggtgcaatttt

SEQ ID NO: 13813 - DNA, 90 bp, Homo sapiens
  source 1..90: mol_type = unassigned DNA
aaaattgcacctgggcattttaaagtaaataggatgcaaatccttagttggcctcttgtgtacattaacttcagagtgaagaatgaatat

SEQ ID NO: 13814 - RNA, 115 nt, Homo sapiens
  source 1..115: mol_type = unassigned RNA
attgaaatggagtctcccgtgacttgacggagctctttcagagccagtacaaaatgttctttgaccagcttgcaggagacacaggacaggctctccaaacaaacagcgatttgaa

SEQ ID NO: 13815 - DNA, 115 bp, Homo sapiens
  source 1..115: mol_type = unassigned DNA
attgaaatggagtctcccgtgacttgacggagctctttcagagccagtacaaaatgttctttgaccagcttgcaggagacacaggacaggctctccaaacaaacagcgatttgaa

SEQ ID NO: 13816 - DNA, 115 bp, Homo sapiens
  source 1..115: mol_type = unassigned DNA
ttcaaatcgctgtttgtttggagagcctgtcctgtgtctcctgcaagctggtcaaagaacattttgtactggctctgaaagagctccgtcaagtcacgggagactccatttcaat

SEQ ID NO: 13817 - RNA, 38 nt, Homo sapiens
  source 1..38: mol_type = unassigned RNA
ggaacaagtgaaccatgaaaccagacttccaggaacac

SEQ ID NO: 13818 - DNA, 38 bp, Homo sapiens
  source 1..38: mol_type = unassigned DNA
ggaacaagtgaaccatgaaaccagacttccaggaacac

SEQ ID NO: 13819 - DNA, 38 bp, Homo sapiens
  source 1..38: mol_type = unassigned DNA
gtgttcctggaagtctggtttcatggttcacttgttcc

SEQ ID NO: 13820 - RNA, 29 nt, Homo sapiens
  source 1..29: mol_type = unassigned RNA
tatttcttttgtgataagttatagcatct

SEQ ID NO: 13821 - DNA, 29 bp, Homo sapiens
  source 1..29: mol_type = unassigned DNA
tatttcttttgtgataagttatagcatct

SEQ ID NO: 13822 - DNA, 29 bp, Homo sapiens
  source 1..29: mol_type = unassigned DNA
agatgctataacttatcacaaaagaaata

SEQ ID NO: 13823 - RNA, 70 nt, Homo sapiens
  source 1..70: mol_type = unassigned RNA
cctttgataggatactcatccagatcatcaggatattctgaaagcaatcgtagcattcaaaactctcatg

SEQ ID NO: 13824 - DNA, 70 bp, Homo sapiens
  source 1..70: mol_type = unassigned DNA
cctttgataggatactcatccagatcatcaggatattctgaaagcaatcgtagcattcaaaactctcatg

SEQ ID NO: 13825 - DNA, 70 bp, Homo sapiens
  source 1..70: mol_type = unassigned DNA
catgagagttttgaatgctacgattgctttcagaatatcctgatgatctggatgagtatcctatcaaagg

SEQ ID NO: 13826 - RNA, 132 nt, Homo sapiens
  source 1..132: mol_type = unassigned RNA
gtcgcagtttcaaagaacccattgacgatgttaagtgaggacttactgaacaatagtctcggttttaccttgggggatatgtttcaagacatcccctgtagatgcctgaaaccacagcaagtacaaaacctg

SEQ ID NO: 13827 - DNA, 132 bp, Homo sapiens
  source 1..132: mol_type = unassigned DNA
gtcgcagtttcaaagaacccattgacgatgttaagtgaggacttactgaacaatagtctcggttttaccttgggggatatgtttcaagacatcccctgtagatgcctgaaaccacagcaagtacaaaacctg

SEQ ID NO: 13828 - DNA, 132 bp, Homo sapiens
  source 1..132: mol_type = unassigned DNA
caggttttgtacttgctgtggtttcaggcatctacaggggatgtcttgaaacatatcccccaaggtaaaaccgagactattgttcagtaagtcctcacttaacatcgtcaatgggttctttgaaactgcgac

SEQ ID NO: 13829 - RNA, 86 nt, Homo sapiens
  source 1..86: mol_type = unassigned RNA
ggctttgtggtgcaatggatagcacattgacctctagctgagcctggtgtggacattcaaagacaaaagaagaagggagtgtaatt

SEQ ID NO: 13830 - DNA, 86 bp, Homo sapiens
  source 1..86: mol_type = unassigned DNA
ggctttgtggtgcaatggatagcacattgacctctagctgagcctggtgtggacattcaaagacaaaagaagaagggagtgtaatt

SEQ ID NO: 13831 - DNA, 86 bp, Homo sapiens
  source 1..86: mol_type = unassigned DNA
aattacactcccttcttcttttgtctttgaatgtccacaccaggctcagctagaggtcaatgtgctatccattgcaccacaaagcc

SEQ ID NO: 13832 - RNA, 61 nt, Homo sapiens
  source 1..61: mol_type = unassigned RNA
cccaacaaatgtacatctgctactgaactcaaaacgtatatctctaacttgcctgcttgat

SEQ ID NO: 13833 - DNA, 61 bp, Homo sapiens
  source 1..61: mol_type = unassigned DNA
cccaacaaatgtacatctgctactgaactcaaaacgtatatctctaacttgcctgcttgat

SEQ ID NO: 13834 - DNA, 61 bp, Homo sapiens
  source 1..61: mol_type = unassigned DNA
atcaagcaggcaagttagagatatacgttttgagttcagtagcagatgtacatttgttggg

SEQ ID NO: 13835 - RNA, 30 nt, Homo sapiens
  source 1..30: mol_type = unassigned RNA
gtgcagcctcgagctggagtggccagctgg

SEQ ID NO: 13836 - DNA, 30 bp, Homo sapiens
  source 1..30: mol_type = unassigned DNA
gtgcagcctcgagctggagtggccagctgg

SEQ ID NO: 13837 - DNA, 30 bp, Homo sapiens
  source 1..30: mol_type = unassigned DNA
ccagctggccactccagctcgaggctgcac

SEQ ID NO: 13838 - RNA, 29 nt, Homo sapiens
  source 1..29: mol_type = unassigned RNA
tgctctctgtactgctgttggacagtcag

SEQ ID NO: 13839 - DNA, 29 bp, Homo sapiens
  source 1..29: mol_type = unassigned DNA
tgctctctgtactgctgttggacagtcag

SEQ ID NO: 13840 - DNA, 29 bp, Homo sapiens
  source 1..29: mol_type = unassigned DNA
ctgactgtccaacagcagtacagagagca

SEQ ID NO: 13841 - RNA, 36 nt, Homo sapiens
  source 1..36: mol_type = unassigned RNA
ttttaattctggttcttctgcttgttcgttgtgtga

SEQ ID NO: 13842 - DNA, 36 bp, Homo sapiens
  source 1..36: mol_type = unassigned DNA
ttttaattctggttcttctgcttgttcgttgtgtga

SEQ ID NO: 13843 - DNA, 36 bp, Homo sapiens
  source 1..36: mol_type = unassigned DNA
tcacacaacgaacaagcagaagaaccagaattaaaa

SEQ ID NO: 13844 - RNA, 125 nt, Homo sapiens
  source 1..125: mol_type = unassigned RNA
gaggtgatacagaaagggtggtagagtatgctgacgcagtgagcacacagaagacttttttcatgtgacagagccagagtctgagatctgcagttgcagaatatttaggtaagaagtaaatgtca

SEQ ID NO: 13845 - DNA, 125 bp, Homo sapiens
  source 1..125: mol_type = unassigned DNA
gaggtgatacagaaagggtggtagagtatgctgacgcagtgagcacacagaagacttttttcatgtgacagagccagagtctgagatctgcagttgcagaatatttaggtaagaagtaaatgtca

SEQ ID NO: 13846 - DNA, 125 bp, Homo sapiens
  source 1..125: mol_type = unassigned DNA
tgacatttacttcttacctaaatattctgcaactgcagatctcagactctggctctgtcacatgaaaaaagtcttctgtgtgctcactgcgtcagcatactctaccaccctttctgtatcacctc

SEQ ID NO: 13847 - RNA, 29 nt, Homo sapiens
  source 1..29: mol_type = unassigned RNA
catctactgattttctggctagagcttat

SEQ ID NO: 13848 - DNA, 29 bp, Homo sapiens
  source 1..29: mol_type = unassigned DNA
catctactgattttctggctagagcttat

SEQ ID NO: 13849 - DNA, 29 bp, Homo sapiens
  source 1..29: mol_type = unassigned DNA
ataagctctagccagaaaatcagtagatg

SEQ ID NO: 13850 - RNA, 37 nt, Homo sapiens
  source 1..37: mol_type = unassigned RNA
ggaaggaactggcgcttggagtctggacatctaaaag

SEQ ID NO: 13851 - DNA, 37 bp, Homo sapiens
  source 1..37: mol_type = unassigned DNA
ggaaggaactggcgcttggagtctggacatctaaaag

SEQ ID NO: 13852 - DNA, 37 bp, Homo sapiens
  source 1..37: mol_type = unassigned DNA
cttttagatgtccagactccaagcgccagttccttcc

SEQ ID NO: 13853 - RNA, 175 nt, Homo sapiens
  source 1..175: mol_type = unassigned RNA
ttattgcctgtctttgggataagtgccattttaacagaggtgagatgatttctcgttgtagttttgattgtcatttccgtgatcatgttgagcaccttttatgtgcctgtttgccatttgtatgtcgtcttttgagaagtgtgtcttcagatcttctgcacattttaaaattaga

SEQ ID NO: 13854 - DNA, 175 bp, Homo sapiens
  source 1..175: mol_type = unassigned DNA
ttattgcctgtctttgggataagtgccattttaacagaggtgagatgatttctcgttgtagttttgattgtcatttccgtgatcatgttgagcaccttttatgtgcctgtttgccatttgtatgtcgtcttttgagaagtgtgtcttcagatcttctgcacattttaaaattaga

SEQ ID NO: 13855 - DNA, 175 bp, Homo sapiens
  source 1..175: mol_type = unassigned DNA
tctaattttaaaatgtgcagaagatctgaagacacacttctcaaaagacgacatacaaatggcaaacaggcacataaaaggtgctcaacatgatcacggaaatgacaatcaaaactacaacgagaaatcatctcacctctgttaaaatggcacttatcccaaagacaggcaataa

SEQ ID NO: 13856 - RNA, 191 nt, Homo sapiens
  source 1..191: mol_type = unassigned RNA
ccttatatcagaaggtctctgtttggctgttaagatatgactttgtgcttgaatatcctaggccggtcatgcccaacatggtcttcattggaggtatcaactgtaagaagaggaaagacttgtctcaggttggtgggtttatttcttttggactgccttgtttcttccaggctctgtcctccctcactcat

SEQ ID NO: 13857 - DNA, 191 bp, Homo sapiens
  source 1..191: mol_type = unassigned DNA
ccttatatcagaaggtctctgtttggctgttaagatatgactttgtgcttgaatatcctaggccggtcatgcccaacatggtcttcattggaggtatcaactgtaagaagaggaaagacttgtctcaggttggtgggtttatttcttttggactgccttgtttcttccaggctctgtcctccctcactcat

SEQ ID NO: 13858 - DNA, 191 bp, Homo sapiens
  source 1..191: mol_type = unassigned DNA
atgagtgagggaggacagagcctggaagaaacaaggcagtccaaaagaaataaacccaccaacctgagacaagtctttcctcttcttacagttgatacctccaatgaagaccatgttgggcatgaccggcctaggatattcaagcacaaagtcatatcttaacagccaaacagagaccttctgatataagg

SEQ ID NO: 13859 - RNA, 30 nt, Homo sapiens
  source 1..30: mol_type = unassigned RNA
ccagcacaaggactctgagtactcgcacct

SEQ ID NO: 13860 - DNA, 30 bp, Homo sapiens
  source 1..30: mol_type = unassigned DNA
ccagcacaaggactctgagtactcgcacct

SEQ ID NO: 13861 - DNA, 30 bp, Homo sapiens
  source 1..30: mol_type = unassigned DNA
aggtgcgagtactcagagtccttgtgctgg

SEQ ID NO: 13862 - RNA, 33 nt, Homo sapiens
  source 1..33: mol_type = unassigned RNA
ggaactttctgtggccacctacgaaagacaagt

SEQ ID NO: 13863 - DNA, 33 bp, Homo sapiens
  source 1..33: mol_type = unassigned DNA
ggaactttctgtggccacctacgaaagacaagt

SEQ ID NO: 13864 - DNA, 33 bp, Homo sapiens
  source 1..33: mol_type = unassigned DNA
acttgtctttcgtaggtggccacagaaagttcc

SEQ ID NO: 13865 - RNA, 56 nt, Homo sapiens
  source 1..56: mol_type = unassigned RNA
gtcaaccgtatagttcaacaatggaatctccaggataatgatgatgatcagctctt

SEQ ID NO: 13866 - DNA, 56 bp, Homo sapiens
  source 1..56: mol_type = unassigned DNA
gtcaaccgtatagttcaacaatggaatctccaggataatgatgatgatcagctctt

SEQ ID NO: 13867 - DNA, 56 bp, Homo sapiens
  source 1..56: mol_type = unassigned DNA
aagagctgatcatcatcattatcctggagattccattgttgaactatacggttgac

SEQ ID NO: 13868 - RNA, 42 nt, Homo sapiens
  source 1..42: mol_type = unassigned RNA
atggcaaaagccatgattactgttgcaccaacttaatatgat

SEQ ID NO: 13869 - DNA, 42 bp, Homo sapiens
  source 1..42: mol_type = unassigned DNA
atggcaaaagccatgattactgttgcaccaacttaatatgat

SEQ ID NO: 13870 - DNA, 42 bp, Homo sapiens
  source 1..42: mol_type = unassigned DNA
atcatattaagttggtgcaacagtaatcatggcttttgccat

SEQ ID NO: 13871 - RNA, 57 nt, Homo sapiens
  source 1..57: mol_type = unassigned RNA
aatagcaaaagttagctgggtgtagtggcagggcgtctgtaatcccggctaggctac

SEQ ID NO: 13872 - DNA, 57 bp, Homo sapiens
  source 1..57: mol_type = unassigned DNA
aatagcaaaagttagctgggtgtagtggcagggcgtctgtaatcccggctaggctac

SEQ ID NO: 13873 - DNA, 57 bp, Homo sapiens
  source 1..57: mol_type = unassigned DNA
gtagcctagccgggattacagacgccctgccactacacccagctaacttttgctatt

SEQ ID NO: 13874 - RNA, 30 nt, Homo sapiens
  source 1..30: mol_type = unassigned RNA
aatgcctcaccagagcagcgtgtagcagtt

SEQ ID NO: 13875 - DNA, 30 bp, Homo sapiens
  source 1..30: mol_type = unassigned DNA
aatgcctcaccagagcagcgtgtagcagtt

SEQ ID NO: 13876 - DNA, 30 bp, Homo sapiens
  source 1..30: mol_type = unassigned DNA
aactgctacacgctgctctggtgaggcatt

SEQ ID NO: 13877 - RNA, 50 nt, Homo sapiens
  source 1..50: mol_type = unassigned RNA
tcaccactctgacagcctctcagcagcagactgtaccctgggtttgcagg

SEQ ID NO: 13878 - DNA, 50 bp, Homo sapiens
  source 1..50: mol_type = unassigned DNA
tcaccactctgacagcctctcagcagcagactgtaccctgggtttgcagg

SEQ ID NO: 13879 - DNA, 50 bp, Homo sapiens
  source 1..50: mol_type = unassigned DNA
cctgcaaacccagggtacagtctgctgctgagaggctgtcagagtggtga

SEQ ID NO: 13880 - RNA, 35 nt, Homo sapiens
  source 1..35: mol_type = unassigned RNA
atgtgagtggccagaactgagaacgctgaaatcta

SEQ ID NO: 13881 - DNA, 35 bp, Homo sapiens
  source 1..35: mol_type = unassigned DNA
atgtgagtggccagaactgagaacgctgaaatcta

SEQ ID NO: 13882 - DNA, 35 bp, Homo sapiens
  source 1..35: mol_type = unassigned DNA
tagatttcagcgttctcagttctggccactcacat

SEQ ID NO: 13883 - RNA, 37 nt, Homo sapiens
  source 1..37: mol_type = unassigned RNA
tgtgtgtgtgtgtgtgtgtgtgtgtgactcgttccca

SEQ ID NO: 13884 - DNA, 37 bp, Homo sapiens
  source 1..37: mol_type = unassigned DNA
tgtgtgtgtgtgtgtgtgtgtgtgtgactcgttccca

SEQ ID NO: 13885 - DNA, 37 bp, Homo sapiens
  source 1..37: mol_type = unassigned DNA
tgggaacgagtcacacacacacacacacacacacaca

SEQ ID NO: 13886 - RNA, 29 nt, Homo sapiens
  source 1..29: mol_type = unassigned RNA
gctgccatattggacaatgtaggcctgat

SEQ ID NO: 13887 - DNA, 29 bp, Homo sapiens
  source 1..29: mol_type = unassigned DNA
gctgccatattggacaatgtaggcctgat

SEQ ID NO: 13888 - DNA, 29 bp, Homo sapiens
  source 1..29: mol_type = unassigned DNA
atcaggcctacattgtccaatatggcagc

SEQ ID NO: 13889 - RNA, 144 nt, Homo sapiens
  source 1..144: mol_type = unassigned RNA
aaaatagccatatttgtcactgtccctaaagtgaatgttcatagatctgggactgtttttgactgtacctctgagactcaagatcaggacagattgttactttaaaatgttacctggaagacgattcttctaagggctataatg

SEQ ID NO: 13890 - DNA, 144 bp, Homo sapiens
  source 1..144: mol_type = unassigned DNA
aaaatagccatatttgtcactgtccctaaagtgaatgttcatagatctgggactgtttttgactgtacctctgagactcaagatcaggacagattgttactttaaaatgttacctggaagacgattcttctaagggctataatg

SEQ ID NO: 13891 - DNA, 144 bp, Homo sapiens
  source 1..144: mol_type = unassigned DNA
cattatagcccttagaagaatcgtcttccaggtaacattttaaagtaacaatctgtcctgatcttgagtctcagaggtacagtcaaaaacagtcccagatctatgaacattcactttagggacagtgacaaatatggctatttt

SEQ ID NO: 13892 - RNA, 115 nt, Homo sapiens
  source 1..115: mol_type = unassigned RNA
cccttgctggagctggccagcgacactcaccacagataaagcacgtggtcttcaagatctcttccttcttctgcttctcactcctcaggtcagcaaaagtgtcaatgataacccc

SEQ ID NO: 13893 - DNA, 115 bp, Homo sapiens
  source 1..115: mol_type = unassigned DNA
cccttgctggagctggccagcgacactcaccacagataaagcacgtggtcttcaagatctcttccttcttctgcttctcactcctcaggtcagcaaaagtgtcaatgataacccc

SEQ ID NO: 13894 - DNA, 115 bp, Homo sapiens
  source 1..115: mol_type = unassigned DNA
ggggttatcattgacacttttgctgacctgaggagtgagaagcagaagaaggaagagatcttgaagaccacgtgctttatctgtggtgagtgtcgctggccagctccagcaaggg

SEQ ID NO: 13895 - RNA, 26 nt, Homo sapiens
  source 1..26: mol_type = unassigned RNA
ttgtctctgactacgaaacacatggt

SEQ ID NO: 13896 - DNA, 26 bp, Homo sapiens
  source 1..26: mol_type = unassigned DNA
ttgtctctgactacgaaacacatggt

SEQ ID NO: 13897 - DNA, 26 bp, Homo sapiens
  source 1..26: mol_type = unassigned DNA
accatgtgtttcgtagtcagagacaa

SEQ ID NO: 13898 - RNA, 154 nt, Homo sapiens
  source 1..154: mol_type = unassigned RNA
agtataaagaatcagattggtagtgaattaagactatattctaaattttcccattttttattaaggtcctggatgcctcatcccttagtttcaacaccagattgaaatggtttgccatctgcttcgtatgtggcgttttcttttctattcttgt

SEQ ID NO: 13899 - DNA, 154 bp, Homo sapiens
  source 1..154: mol_type = unassigned DNA
agtataaagaatcagattggtagtgaattaagactatattctaaattttcccattttttattaaggtcctggatgcctcatcccttagtttcaacaccagattgaaatggtttgccatctgcttcgtatgtggcgttttcttttctattcttgt

SEQ ID NO: 13900 - DNA, 154 bp, Homo sapiens
  source 1..154: mol_type = unassigned DNA
acaagaatagaaaagaaaacgccacatacgaagcagatggcaaaccatttcaatctggtgttgaaactaagggatgaggcatccaggaccttaataaaaaatgggaaaatttagaatatagtcttaattcactaccaatctgattctttatact

SEQ ID NO: 13901 - RNA, 30 nt, Homo sapiens
  source 1..30: mol_type = unassigned RNA
gcagtgttaattggtcagatgtagaccttt

SEQ ID NO: 13902 - DNA, 30 bp, Homo sapiens
  source 1..30: mol_type = unassigned DNA
gcagtgttaattggtcagatgtagaccttt

SEQ ID NO: 13903 - DNA, 30 bp, Homo sapiens
  source 1..30: mol_type = unassigned DNA
aaaggtctacatctgaccaattaacactgc

SEQ ID NO: 13904 - RNA, 27 nt, Homo sapiens
  source 1..27: mol_type = unassigned RNA
gccaaagcttcgctttgccagtagaat

SEQ ID NO: 13905 - DNA, 27 bp, Homo sapiens
  source 1..27: mol_type = unassigned DNA
gccaaagcttcgctttgccagtagaat

SEQ ID NO: 13906 - DNA, 27 bp, Homo sapiens
  source 1..27: mol_type = unassigned DNA
attctactggcaaagcgaagctttggc

SEQ ID NO: 13907 - RNA, 31 nt, Homo sapiens
  source 1..31: mol_type = unassigned RNA
gtttcaaggacattgagagctttctgatgat

SEQ ID NO: 13908 - DNA, 31 bp, Homo sapiens
  source 1..31: mol_type = unassigned DNA
gtttcaaggacattgagagctttctgatgat

SEQ ID NO: 13909 - DNA, 31 bp, Homo sapiens
  source 1..31: mol_type = unassigned DNA
atcatcagaaagctctcaatgtccttgaaac

SEQ ID NO: 13910 - RNA, 34 nt, Homo sapiens
  source 1..34: mol_type = unassigned RNA
gtcccaccagtcgatggcctgagggtgtgctggc

SEQ ID NO: 13911 - DNA, 34 bp, Homo sapiens
  source 1..34: mol_type = unassigned DNA
gtcccaccagtcgatggcctgagggtgtgctggc

SEQ ID NO: 13912 - DNA, 34 bp, Homo sapiens
  source 1..34: mol_type = unassigned DNA
gccagcacaccctcaggccatcgactggtgggac

SEQ ID NO: 13913 - RNA, 32 nt, Homo sapiens
  source 1..32: mol_type = unassigned RNA
aaatttaaactcgaaccaagcaaaaggcttca

SEQ ID NO: 13914 - DNA, 32 bp, Homo sapiens
  source 1..32: mol_type = unassigned DNA
aaatttaaactcgaaccaagcaaaaggcttca

SEQ ID NO: 13915 - DNA, 32 bp, Homo sapiens
  source 1..32: mol_type = unassigned DNA
tgaagccttttgcttggttcgagtttaaattt

SEQ ID NO: 13916 - RNA, 109 nt, Homo sapiens
  source 1..109: mol_type = unassigned RNA
acttctaggccagtctcctcacttctttaccgcctgctcctggctctctactgtaagactgctgcccactccaattcatcctgaacagccaactgaatcttcctaaggt

SEQ ID NO: 13917 - DNA, 109 bp, Homo sapiens
  source 1..109: mol_type = unassigned DNA
acttctaggccagtctcctcacttctttaccgcctgctcctggctctctactgtaagactgctgcccactccaattcatcctgaacagccaactgaatcttcctaaggt

SEQ ID NO: 13918 - DNA, 109 bp, Homo sapiens
  source 1..109: mol_type = unassigned DNA
accttaggaagattcagttggctgttcaggatgaattggagtgggcagcagtcttacagtagagagccaggagcaggcggtaaagaagtgaggagactggcctagaagt

SEQ ID NO: 13919 - RNA, 118 nt, Homo sapiens
  source 1..118: mol_type = unassigned RNA
actagacgtcacccattactctctttgactgcctcctcctccccagtgctctttctgaccatctcagttagaaccgaatgaacctcgctaaacccagacacttttcatcccaagccag

SEQ ID NO: 13920 - DNA, 118 bp, Homo sapiens
  source 1..118: mol_type = unassigned DNA
actagacgtcacccattactctctttgactgcctcctcctccccagtgctctttctgaccatctcagttagaaccgaatgaacctcgctaaacccagacacttttcatcccaagccag

SEQ ID NO: 13921 - DNA, 118 bp, Homo sapiens
  source 1..118: mol_type = unassigned DNA
ctggcttgggatgaaaagtgtctgggtttagcgaggttcattcggttctaactgagatggtcagaaagagcactggggaggaggaggcagtcaaagagagtaatgggtgacgtctagt

SEQ ID NO: 13922 - RNA, 27 nt, Homo sapiens
  source 1..27: mol_type = unassigned RNA
ccctgctgctgaacaaatttagggtaa

SEQ ID NO: 13923 - DNA, 27 bp, Homo sapiens
  source 1..27: mol_type = unassigned DNA
ccctgctgctgaacaaatttagggtaa

SEQ ID NO: 13924 - DNA, 27 bp, Homo sapiens
  source 1..27: mol_type = unassigned DNA
ttaccctaaatttgttcagcagcaggg

SEQ ID NO: 13925 - RNA, 31 nt, Homo sapiens
  source 1..31: mol_type = unassigned RNA
actcactgagggtatctgacaatgctgaggt

SEQ ID NO: 13926 - DNA, 31 bp, Homo sapiens
  source 1..31: mol_type = unassigned DNA
actcactgagggtatctgacaatgctgaggt

SEQ ID NO: 13927 - DNA, 31 bp, Homo sapiens
  source 1..31: mol_type = unassigned DNA
acctcagcattgtcagataccctcagtgagt

SEQ ID NO: 13928 - RNA, 42 nt, Homo sapiens
  source 1..42: mol_type = unassigned RNA
tctgtaggttgcctgttcactctgatggtagtttcgtttgcc

SEQ ID NO: 13929 - DNA, 42 bp, Homo sapiens
  source 1..42: mol_type = unassigned DNA
tctgtaggttgcctgttcactctgatggtagtttcgtttgcc

SEQ ID NO: 13930 - DNA, 42 bp, Homo sapiens
  source 1..42: mol_type = unassigned DNA
ggcaaacgaaactaccatcagagtgaacaggcaacctacaga

SEQ ID NO: 13931 - RNA, 171 nt, Homo sapiens
  source 1..171: mol_type = unassigned RNA
ataggtattgttttctgtggttttcctatggatcctgagagaatctgggctcagttccaggaagttcctttgggacctttacctcccccgagccccaagatgatgcttggacctgtgactctgcacctggtaagttcctccacatcttttctcttataccacacctttttt

SEQ ID NO: 13932 - DNA, 171 bp, Homo sapiens
  source 1..171: mol_type = unassigned DNA
ataggtattgttttctgtggttttcctatggatcctgagagaatctgggctcagttccaggaagttcctttgggacctttacctcccccgagccccaagatgatgcttggacctgtgactctgcacctggtaagttcctccacatcttttctcttataccacacctttttt

SEQ ID NO: 13933 - DNA, 171 bp, Homo sapiens
  source 1..171: mol_type = unassigned DNA
aaaaaaggtgtggtataagagaaaagatgtggaggaacttaccaggtgcagagtcacaggtccaagcatcatcttggggctcgggggaggtaaaggtcccaaaggaacttcctggaactgagcccagattctctcaggatccataggaaaaccacagaaaacaatacctat

SEQ ID NO: 13934 - RNA, 23 nt, Homo sapiens
  source 1..23: mol_type = unassigned RNA
acattctcattcttctgcttgtc

SEQ ID NO: 13935 - DNA, 23 bp, Homo sapiens
  source 1..23: mol_type = unassigned DNA
acattctcattcttctgcttgtc

SEQ ID NO: 13936 - DNA, 23 bp, Homo sapiens
  source 1..23: mol_type = unassigned DNA
gacaagcagaagaatgagaatgt

SEQ ID NO: 13937 - RNA, 85 nt, Homo sapiens
  source 1..85: mol_type = unassigned RNA
tctgcactcactcctgagtctttcagaactttggacatacttgcttccacccgcttcctccatttaaccttaagactcagatggc

SEQ ID NO: 13938 - DNA, 85 bp, Homo sapiens
  source 1..85: mol_type = unassigned DNA
tctgcactcactcctgagtctttcagaactttggacatacttgcttccacccgcttcctccatttaaccttaagactcagatggc

SEQ ID NO: 13939 - DNA, 85 bp, Homo sapiens
  source 1..85: mol_type = unassigned DNA
gccatctgagtcttaaggttaaatggaggaagcgggtggaagcaagtatgtccaaagttctgaaagactcaggagtgagtgcaga

SEQ ID NO: 13940 - RNA, 29 nt, Homo sapiens
  source 1..29: mol_type = unassigned RNA
ccccttcctggccagagttcagagccagg

SEQ ID NO: 13941 - DNA, 29 bp, Homo sapiens
  source 1..29: mol_type = unassigned DNA
ccccttcctggccagagttcagagccagg

SEQ ID NO: 13942 - DNA, 29 bp, Homo sapiens
  source 1..29: mol_type = unassigned DNA
cctggctctgaactctggccaggaagggg

SEQ ID NO: 13943 - RNA, 31 nt, Homo sapiens
  source 1..31: mol_type = unassigned RNA
tctcaggctatacttgatcagtgcaaaacct

SEQ ID NO: 13944 - DNA, 31 bp, Homo sapiens
  source 1..31: mol_type = unassigned DNA
tctcaggctatacttgatcagtgcaaaacct

SEQ ID NO: 13945 - DNA, 31 bp, Homo sapiens
  source 1..31: mol_type = unassigned DNA
aggttttgcactgatcaagtatagcctgaga

SEQ ID NO: 13946 - RNA, 28 nt, Homo sapiens
  source 1..28: mol_type = unassigned RNA
atccctgtgtgaccttgggatactccct

SEQ ID NO: 13947 - DNA, 28 bp, Homo sapiens
  source 1..28: mol_type = unassigned DNA
atccctgtgtgaccttgggatactccct

SEQ ID NO: 13948 - DNA, 28 bp, Homo sapiens
  source 1..28: mol_type = unassigned DNA
agggagtatcccaaggtcacacagggat

SEQ ID NO: 13949 - RNA, 29 nt, Homo sapiens
  source 1..29: mol_type = unassigned RNA
atgagaactgtgactgtcctctgcaagat

SEQ ID NO: 13950 - DNA, 29 bp, Homo sapiens
  source 1..29: mol_type = unassigned DNA
atgagaactgtgactgtcctctgcaagat

SEQ ID NO: 13951 - DNA, 29 bp, Homo sapiens
  source 1..29: mol_type = unassigned DNA
atcttgcagaggacagtcacagttctcat

SEQ ID NO: 13952 - RNA, 50 nt, Homo sapiens
  source 1..50: mol_type = unassigned RNA
atgggggtccccactctgtcatccaggctaggctagaatgcagtggcaca

SEQ ID NO: 13953 - DNA, 50 bp, Homo sapiens
  source 1..50: mol_type = unassigned DNA
atgggggtccccactctgtcatccaggctaggctagaatgcagtggcaca

SEQ ID NO: 13954 - DNA, 50 bp, Homo sapiens
  source 1..50: mol_type = unassigned DNA
tgtgccactgcattctagcctagcctggatgacagagtggggacccccat

SEQ ID NO: 13955 - RNA, 32 nt, Homo sapiens
  source 1..32: mol_type = unassigned RNA
gaaactgtgattggtcgggactgggttacatg

SEQ ID NO: 13956 - DNA, 32 bp, Homo sapiens
  source 1..32: mol_type = unassigned DNA
gaaactgtgattggtcgggactgggttacatg

SEQ ID NO: 13957 - DNA, 32 bp, Homo sapiens
  source 1..32: mol_type = unassigned DNA
catgtaacccagtcccgaccaatcacagtttc

SEQ ID NO: 13958 - RNA, 31 nt, Homo sapiens
  source 1..31: mol_type = unassigned RNA
ccaggctgaggcctccgtgggactgagcttc

SEQ ID NO: 13959 - DNA, 31 bp, Homo sapiens
  source 1..31: mol_type = unassigned DNA
ccaggctgaggcctccgtgggactgagcttc

SEQ ID NO: 13960 - DNA, 31 bp, Homo sapiens
  source 1..31: mol_type = unassigned DNA
gaagctcagtcccacggaggcctcagcctgg

SEQ ID NO: 13961 - RNA, 27 nt, Homo sapiens
  source 1..27: mol_type = unassigned RNA
atttgagctaaagcaagggaagcattt

SEQ ID NO: 13962 - DNA, 27 bp, Homo sapiens
  source 1..27: mol_type = unassigned DNA
atttgagctaaagcaagggaagcattt

SEQ ID NO: 13963 - DNA, 27 bp, Homo sapiens
  source 1..27: mol_type = unassigned DNA
aaatgcttcccttgctttagctcaaat

SEQ ID NO: 13964 - RNA, 31 nt, Homo sapiens
  source 1..31: mol_type = unassigned RNA
gcacctgcataacacaactaggaacaacttt

SEQ ID NO: 13965 - DNA, 31 bp, Homo sapiens
  source 1..31: mol_type = unassigned DNA
gcacctgcataacacaactaggaacaacttt

SEQ ID NO: 13966 - DNA, 31 bp, Homo sapiens
  source 1..31: mol_type = unassigned DNA
aaagttgttcctagttgtgttatgcaggtgc

SEQ ID NO: 13967 - RNA, 34 nt, Homo sapiens
  source 1..34: mol_type = unassigned RNA
attatagcttttctagactgatgtaaaatttttt

SEQ ID NO: 13968 - DNA, 34 bp, Homo sapiens
  source 1..34: mol_type = unassigned DNA
attatagcttttctagactgatgtaaaatttttt

SEQ ID NO: 13969 - DNA, 34 bp, Homo sapiens
  source 1..34: mol_type = unassigned DNA
aaaaaattttacatcagtctagaaaagctataat

SEQ ID NO: 13970 - RNA, 30 nt, Homo sapiens
  source 1..30: mol_type = unassigned RNA
gaaagcctatgttgacctcgtccggcactc

SEQ ID NO: 13971 - DNA, 30 bp, Homo sapiens
  source 1..30: mol_type = unassigned DNA
gaaagcctatgttgacctcgtccggcactc

SEQ ID NO: 13972 - DNA, 30 bp, Homo sapiens
  source 1..30: mol_type = unassigned DNA
gagtgccggacgaggtcaacataggctttc

SEQ ID NO: 13973 - RNA, 166 nt, Homo sapiens
  source 1..166: mol_type = unassigned RNA
ttgagccgttgctggggacctcgcgatgtgagccttctccctggcgccgccagtcatcagagcaggctgctcggtagtggactgagacccccgcacctgcccttgccacacggagacgcaatgtactcgctgctctggctcgaagtcaggcctcgcggtgagacca

SEQ ID NO: 13974 - DNA, 166 bp, Homo sapiens
  source 1..166: mol_type = unassigned DNA
ttgagccgttgctggggacctcgcgatgtgagccttctccctggcgccgccagtcatcagagcaggctgctcggtagtggactgagacccccgcacctgcccttgccacacggagacgcaatgtactcgctgctctggctcgaagtcaggcctcgcggtgagacca

SEQ ID NO: 13975 - DNA, 166 bp, Homo sapiens
  source 1..166: mol_type = unassigned DNA
tggtctcaccgcgaggcctgacttcgagccagagcagcgagtacattgcgtctccgtgtggcaagggcaggtgcgggggtctcagtccactaccgagcagcctgctctgatgactggcggcgccagggagaaggctcacatcgcgaggtccccagcaacggctcaa

SEQ ID NO: 13976 - RNA, 33 nt, Homo sapiens
  source 1..33: mol_type = unassigned RNA
tgaataacgaaaatgccagattacttacttttc

SEQ ID NO: 13977 - DNA, 33 bp, Homo sapiens
  source 1..33: mol_type = unassigned DNA
tgaataacgaaaatgccagattacttacttttc

SEQ ID NO: 13978 - DNA, 33 bp, Homo sapiens
  source 1..33: mol_type = unassigned DNA
gaaaagtaagtaatctggcattttcgttattca

SEQ ID NO: 13979 - RNA, 85 nt, Homo sapiens
  source 1..85: mol_type = unassigned RNA
cctataacagaatacgcctctgtctgtctgtctctctgtctgtctgtctgtctgtttctctctctctctctctctccagtgctcc

SEQ ID NO: 13980 - DNA, 85 bp, Homo sapiens
  source 1..85: mol_type = unassigned DNA
cctataacagaatacgcctctgtctgtctgtctctctgtctgtctgtctgtctgtttctctctctctctctctctccagtgctcc

SEQ ID NO: 13981 - DNA, 85 bp, Homo sapiens
  source 1..85: mol_type = unassigned DNA
ggagcactggagagagagagagagagagaaacagacagacagacagacagagagacagacagacagaggcgtattctgttatagg

SEQ ID NO: 13982 - RNA, 65 nt, Homo sapiens
  source 1..65: mol_type = unassigned RNA
gaatgaaagagcagggggaattcttagtgatgcctgatggcccactgtagggcatcttaggaatc

SEQ ID NO: 13983 - DNA, 65 bp, Homo sapiens
  source 1..65: mol_type = unassigned DNA
gaatgaaagagcagggggaattcttagtgatgcctgatggcccactgtagggcatcttaggaatc

SEQ ID NO: 13984 - DNA, 65 bp, Homo sapiens
  source 1..65: mol_type = unassigned DNA
gattcctaagatgccctacagtgggccatcaggcatcactaagaattccccctgctctttcattc

SEQ ID NO: 13985 - RNA, 29 nt, Homo sapiens
  source 1..29: mol_type = unassigned RNA
gagacctctagaggcgtaggaagagcacc

SEQ ID NO: 13986 - DNA, 29 bp, Homo sapiens
  source 1..29: mol_type = unassigned DNA
gagacctctagaggcgtaggaagagcacc

SEQ ID NO: 13987 - DNA, 29 bp, Homo sapiens
  source 1..29: mol_type = unassigned DNA
ggtgctcttcctacgcctctagaggtctc

SEQ ID NO: 13988 - RNA, 35 nt, Homo sapiens
  source 1..35: mol_type = unassigned RNA
gtagccctctgcttgactgtatattatggaactag

SEQ ID NO: 13989 - DNA, 35 bp, Homo sapiens
  source 1..35: mol_type = unassigned DNA
gtagccctctgcttgactgtatattatggaactag

SEQ ID NO: 13990 - DNA, 35 bp, Homo sapiens
  source 1..35: mol_type = unassigned DNA
ctagttccataatatacagtcaagcagagggctac

SEQ ID NO: 13991 - RNA, 72 nt, Homo sapiens
  source 1..72: mol_type = unassigned RNA
taataaacctgatgcttttttttagaactccttactctgatgtctgtatatgttgcactgaaaaggttaata

SEQ ID NO: 13992 - DNA, 72 bp, Homo sapiens
  source 1..72: mol_type = unassigned DNA
taataaacctgatgcttttttttagaactccttactctgatgtctgtatatgttgcactgaaaaggttaata

SEQ ID NO: 13993 - DNA, 72 bp, Homo sapiens
  source 1..72: mol_type = unassigned DNA
tattaaccttttcagtgcaacatatacagacatcagagtaaggagttctaaaaaaaagcatcaggtttatta

SEQ ID NO: 13994 - RNA, 26 nt, Homo sapiens
  source 1..26: mol_type = unassigned RNA
cagtgccaaatgtgtgacccaggtaa

SEQ ID NO: 13995 - DNA, 26 bp, Homo sapiens
  source 1..26: mol_type = unassigned DNA
cagtgccaaatgtgtgacccaggtaa

SEQ ID NO: 13996 - DNA, 26 bp, Homo sapiens
  source 1..26: mol_type = unassigned DNA
ttacctgggtcacacatttggcactg

SEQ ID NO: 13997 - RNA, 130 nt, Homo sapiens
  source 1..130: mol_type = unassigned RNA
agaggtgggaaaatggaggttcatagaagttgaattgtgtgactatgaataagtaatttccttgaaggtgcgttggaagcagagttcagatttttcagtcttaagccagatctctaccctctcttctcga

SEQ ID NO: 13998 - DNA, 130 bp, Homo sapiens
  source 1..130: mol_type = unassigned DNA
agaggtgggaaaatggaggttcatagaagttgaattgtgtgactatgaataagtaatttccttgaaggtgcgttggaagcagagttcagatttttcagtcttaagccagatctctaccctctcttctcga

SEQ ID NO: 13999 - DNA, 130 bp, Homo sapiens
  source 1..130: mol_type = unassigned DNA
tcgagaagagagggtagagatctggcttaagactgaaaaatctgaactctgcttccaacgcaccttcaaggaaattacttattcatagtcacacaattcaacttctatgaacctccattttcccacctct

SEQ ID NO: 14000 - RNA, 60 nt, Homo sapiens
  source 1..60: mol_type = unassigned RNA
cttagactggaggacaaggctctgctgcccaatggatcttgggcagattttttttttttt

SEQ ID NO: 14001 - DNA, 60 bp, Homo sapiens
  source 1..60: mol_type = unassigned DNA
cttagactggaggacaaggctctgctgcccaatggatcttgggcagattttttttttttt

SEQ ID NO: 14002 - DNA, 60 bp, Homo sapiens
  source 1..60: mol_type = unassigned DNA
aaaaaaaaaaaaatctgcccaagatccattgggcagcagagccttgtcctccagtctaag

SEQ ID NO: 14003 - RNA, 98 nt, Homo sapiens
  source 1..98: mol_type = unassigned RNA
agctttgcatgatcctttatgcactgtgaaggtctgaagtttataatactcacttgacccttgtaactgatgaggcaatgatgccaccacagtattct

SEQ ID NO: 14004 - DNA, 98 bp, Homo sapiens
  source 1..98: mol_type = unassigned DNA
agctttgcatgatcctttatgcactgtgaaggtctgaagtttataatactcacttgacccttgtaactgatgaggcaatgatgccaccacagtattct

SEQ ID NO: 14005 - DNA, 98 bp, Homo sapiens
  source 1..98: mol_type = unassigned DNA
agaatactgtggtggcatcattgcctcatcagttacaagggtcaagtgagtattataaacttcagaccttcacagtgcataaaggatcatgcaaagct

SEQ ID NO: 14006 - RNA, 105 nt, Homo sapiens
  source 1..105: mol_type = unassigned RNA
aaaaaagattctccacttctgtgatgtgtcttagaaagtaagtcatgaactgtctctgcctacatcttccagtttatctccttctgcttgtcaatggtccctctg

SEQ ID NO: 14007 - DNA, 105 bp, Homo sapiens
  source 1..105: mol_type = unassigned DNA
aaaaaagattctccacttctgtgatgtgtcttagaaagtaagtcatgaactgtctctgcctacatcttccagtttatctccttctgcttgtcaatggtccctctg

SEQ ID NO: 14008 - DNA, 105 bp, Homo sapiens
  source 1..105: mol_type = unassigned DNA
cagagggaccattgacaagcagaaggagataaactggaagatgtaggcagagacagttcatgacttactttctaagacacatcacagaagtggagaatctttttt

SEQ ID NO: 14009 - RNA, 137 nt, Homo sapiens
  source 1..137: mol_type = unassigned RNA
ctaaatgaaagttgttcccaggatctggactcacaagacaaggcagcctgttccctgctggggagctcaggggcaagagggcatctcggagggagggcacattctcacctctgaagacaaggagaacatcatcagca

SEQ ID NO: 14010 - DNA, 137 bp, Homo sapiens
  source 1..137: mol_type = unassigned DNA
ctaaatgaaagttgttcccaggatctggactcacaagacaaggcagcctgttccctgctggggagctcaggggcaagagggcatctcggagggagggcacattctcacctctgaagacaaggagaacatcatcagca

SEQ ID NO: 14011 - DNA, 137 bp, Homo sapiens
  source 1..137: mol_type = unassigned DNA
tgctgatgatgttctccttgtcttcagaggtgagaatgtgccctccctccgagatgccctcttgcccctgagctccccagcagggaacaggctgccttgtcttgtgagtccagatcctgggaacaactttcatttag

SEQ ID NO: 14012 - RNA, 57 nt, Homo sapiens
  source 1..57: mol_type = unassigned RNA
ttcagagaatattctacacagtcaacagatcttggagtggaaaaattacttcgacag

SEQ ID NO: 14013 - DNA, 57 bp, Homo sapiens
  source 1..57: mol_type = unassigned DNA
ttcagagaatattctacacagtcaacagatcttggagtggaaaaattacttcgacag

SEQ ID NO: 14014 - DNA, 57 bp, Homo sapiens
  source 1..57: mol_type = unassigned DNA
ctgtcgaagtaatttttccactccaagatctgttgactgtgtagaatattctctgaa

SEQ ID NO: 14015 - RNA, 28 nt, Homo sapiens
  source 1..28: mol_type = unassigned RNA
ctgttctttctccagtccttttttttcc

SEQ ID NO: 14016 - DNA, 28 bp, Homo sapiens
  source 1..28: mol_type = unassigned DNA
ctgttctttctccagtccttttttttcc

SEQ ID NO: 14017 - DNA, 28 bp, Homo sapiens
  source 1..28: mol_type = unassigned DNA
ggaaaaaaaaggactggagaaagaacag

SEQ ID NO: 14018 - RNA, 56 nt, Homo sapiens
  source 1..56: mol_type = unassigned RNA
cctttccccgctccactttatatccatctctttggccattctgccttccgtgggcc

SEQ ID NO: 14019 - DNA, 56 bp, Homo sapiens
  source 1..56: mol_type = unassigned DNA
cctttccccgctccactttatatccatctctttggccattctgccttccgtgggcc

SEQ ID NO: 14020 - DNA, 56 bp, Homo sapiens
  source 1..56: mol_type = unassigned DNA
ggcccacggaaggcagaatggccaaagagatggatataaagtggagcggggaaagg

SEQ ID NO: 14021 - RNA, 93 nt, Homo sapiens
  source 1..93: mol_type = unassigned RNA
atttgtcatttctgagacgcagtctcactgtgtcactcagccagaagtgtaatcgcttgatctcggctcactgcaacctctgccttccatgtt

SEQ ID NO: 14022 - DNA, 93 bp, Homo sapiens
  source 1..93: mol_type = unassigned DNA
atttgtcatttctgagacgcagtctcactgtgtcactcagccagaagtgtaatcgcttgatctcggctcactgcaacctctgccttccatgtt

SEQ ID NO: 14023 - DNA, 93 bp, Homo sapiens
  source 1..93: mol_type = unassigned DNA
aacatggaaggcagaggttgcagtgagccgagatcaagcgattacacttctggctgagtgacacagtgagactgcgtctcagaaatgacaaat

SEQ ID NO: 14024 - RNA, 48 nt, Homo sapiens
  source 1..48: mol_type = unassigned RNA
tttttgaaaaggtctcactgttgaccagcttgtagtgcgttgatgtga

SEQ ID NO: 14025 - DNA, 48 bp, Homo sapiens
  source 1..48: mol_type = unassigned DNA
tttttgaaaaggtctcactgttgaccagcttgtagtgcgttgatgtga

SEQ ID NO: 14026 - DNA, 48 bp, Homo sapiens
  source 1..48: mol_type = unassigned DNA
tcacatcaacgcactacaagctggtcaacagtgagaccttttcaaaaa

SEQ ID NO: 14027 - RNA, 181 nt, Homo sapiens
  source 1..181: mol_type = unassigned RNA
ggtgaaacctgagtcatctgaagatggtggcagtgccagagagcaggagagaggagctgcaaagaagccagacagcgttgggcatcaataactcctgggcaccaccggccactggccttcattctgacaggagagccaacccaaccctaactgtgttcagagattgctccaagctttacag

SEQ ID NO: 14028 - DNA, 181 bp, Homo sapiens
  source 1..181: mol_type = unassigned DNA
ggtgaaacctgagtcatctgaagatggtggcagtgccagagagcaggagagaggagctgcaaagaagccagacagcgttgggcatcaataactcctgggcaccaccggccactggccttcattctgacaggagagccaacccaaccctaactgtgttcagagattgctccaagctttacag

SEQ ID NO: 14029 - DNA, 181 bp, Homo sapiens
  source 1..181: mol_type = unassigned DNA
ctgtaaagcttggagcaatctctgaacacagttagggttgggttggctctcctgtcagaatgaaggccagtggccggtggtgcccaggagttattgatgcccaacgctgtctggcttctttgcagctcctctctcctgctctctggcactgccaccatcttcagatgactcaggtttcacc

SEQ ID NO: 14030 - RNA, 136 nt, Homo sapiens
  source 1..136: mol_type = unassigned RNA
ctcagaaaatcttgaggcctctgcaatgataatctaccctcatttgagagtcagttttgccagcacagaggtattctctctaaaggagaagctgccctgacagctctcctcggaagaaccaccctgacattaaatg

SEQ ID NO: 14031 - DNA, 136 bp, Homo sapiens
  source 1..136: mol_type = unassigned DNA
ctcagaaaatcttgaggcctctgcaatgataatctaccctcatttgagagtcagttttgccagcacagaggtattctctctaaaggagaagctgccctgacagctctcctcggaagaaccaccctgacattaaatg

SEQ ID NO: 14032 - DNA, 136 bp, Homo sapiens
  source 1..136: mol_type = unassigned DNA
catttaatgtcagggtggttcttccgaggagagctgtcagggcagcttctcctttagagagaatacctctgtgctggcaaaactgactctcaaatgagggtagattatcattgcagaggcctcaagattttctgag

SEQ ID NO: 14033 - RNA, 187 nt, Homo sapiens
  source 1..187: mol_type = unassigned RNA
aaggaacataaagctaaggaaccaagaaggttccattacagatcagtgtctcaacgtatccttgaggtttggtacaagttctccgcttcctgaaatttttggacaaacattgtgacattcataaataccggactgctaggatattgagggctgaggtaacgcaaatacttgctgtggttttatagag

SEQ ID NO: 14034 - DNA, 187 bp, Homo sapiens
  source 1..187: mol_type = unassigned DNA
aaggaacataaagctaaggaaccaagaaggttccattacagatcagtgtctcaacgtatccttgaggtttggtacaagttctccgcttcctgaaatttttggacaaacattgtgacattcataaataccggactgctaggatattgagggctgaggtaacgcaaatacttgctgtggttttatagag

SEQ ID NO: 14035 - DNA, 187 bp, Homo sapiens
  source 1..187: mol_type = unassigned DNA
ctctataaaaccacagcaagtatttgcgttacctcagccctcaatatcctagcagtccggtatttatgaatgtcacaatgtttgtccaaaaatttcaggaagcggagaacttgtaccaaacctcaaggatacgttgagacactgatctgtaatggaaccttcttggttccttagctttatgttcctt

SEQ ID NO: 14036 - RNA, 162 nt, Homo sapiens
  source 1..162: mol_type = unassigned RNA
ttgtcaggttctccaaaatacttatcattcaggttgaataaaccagttctacagactgcttcttccatgcatttcccaatgatgctagctgcccttaaaattctttcagatttggaactgtatctgtatggaaacaacaggtaagtatttctttaaattgtc

SEQ ID NO: 14037 - DNA, 162 bp, Homo sapiens
  source 1..162: mol_type = unassigned DNA
ttgtcaggttctccaaaatacttatcattcaggttgaataaaccagttctacagactgcttcttccatgcatttcccaatgatgctagctgcccttaaaattctttcagatttggaactgtatctgtatggaaacaacaggtaagtatttctttaaattgtc

SEQ ID NO: 14038 - DNA, 162 bp, Homo sapiens
  source 1..162: mol_type = unassigned DNA
gacaatttaaagaaatacttacctgttgtttccatacagatacagttccaaatctgaaagaattttaagggcagctagcatcattgggaaatgcatggaagaagcagtctgtagaactggtttattcaacctgaatgataagtattttggagaacctgacaa

SEQ ID NO: 14039 - RNA, 27 nt, Homo sapiens
  source 1..27: mol_type = unassigned RNA
ttcttcactctgaagttaatgtacaca

SEQ ID NO: 14040 - DNA, 27 bp, Homo sapiens
  source 1..27: mol_type = unassigned DNA
ttcttcactctgaagttaatgtacaca

SEQ ID NO: 14041 - DNA, 27 bp, Homo sapiens
  source 1..27: mol_type = unassigned DNA
tgtgtacattaacttcagagtgaagaa

SEQ ID NO: 14042 - RNA, 63 nt, Homo sapiens
  source 1..63: mol_type = unassigned RNA
gaagaaggctgcttggtaacttacatcagcaccgcgtggagggttgagagctttggccatgcc

SEQ ID NO: 14043 - DNA, 63 bp, Homo sapiens
  source 1..63: mol_type = unassigned DNA
gaagaaggctgcttggtaacttacatcagcaccgcgtggagggttgagagctttggccatgcc

SEQ ID NO: 14044 - DNA, 63 bp, Homo sapiens
  source 1..63: mol_type = unassigned DNA
ggcatggccaaagctctcaaccctccacgcggtgctgatgtaagttaccaagcagccttcttc

SEQ ID NO: 14045 - RNA, 26 nt, Homo sapiens
  source 1..26: mol_type = unassigned RNA
ttgcctcaggaaagagcatttgactc

SEQ ID NO: 14046 - DNA, 26 bp, Homo sapiens
  source 1..26: mol_type = unassigned DNA
ttgcctcaggaaagagcatttgactc

SEQ ID NO: 14047 - DNA, 26 bp, Homo sapiens
  source 1..26: mol_type = unassigned DNA
gagtcaaatgctctttcctgaggcaa

SEQ ID NO: 14048 - RNA, 81 nt, Homo sapiens
  source 1..81: mol_type = unassigned RNA
aaacactttctgtgttttgaatcatgtggaatgtagttctcaaatattttcttatgccgtccagtaaagtctaaattagca

SEQ ID NO: 14049 - DNA, 81 bp, Homo sapiens
  source 1..81: mol_type = unassigned DNA
aaacactttctgtgttttgaatcatgtggaatgtagttctcaaatattttcttatgccgtccagtaaagtctaaattagca

SEQ ID NO: 14050 - DNA, 81 bp, Homo sapiens
  source 1..81: mol_type = unassigned DNA
tgctaatttagactttactggacggcataagaaaatatttgagaactacattccacatgattcaaaacacagaaagtgttt

SEQ ID NO: 14051 - RNA, 30 nt, Homo sapiens
  source 1..30: mol_type = unassigned RNA
tcaggcatttgtcggggagctcagccagtt

SEQ ID NO: 14052 - DNA, 30 bp, Homo sapiens
  source 1..30: mol_type = unassigned DNA
tcaggcatttgtcggggagctcagccagtt

SEQ ID NO: 14053 - DNA, 30 bp, Homo sapiens
  source 1..30: mol_type = unassigned DNA
aactggctgagctccccgacaaatgcctga

SEQ ID NO: 14054 - RNA, 31 nt, Homo sapiens
  source 1..31: mol_type = unassigned RNA
cgctgctctacgccttctccaaggacatctt

SEQ ID NO: 14055 - DNA, 31 bp, Homo sapiens
  source 1..31: mol_type = unassigned DNA
cgctgctctacgccttctccaaggacatctt

SEQ ID NO: 14056 - DNA, 31 bp, Homo sapiens
  source 1..31: mol_type = unassigned DNA
aagatgtccttggagaaggcgtagagcagcg

SEQ ID NO: 14057 - RNA, 32 nt, Homo sapiens
  source 1..32: mol_type = unassigned RNA
tactagactgttcatttctctctgacatgttt

SEQ ID NO: 14058 - DNA, 32 bp, Homo sapiens
  source 1..32: mol_type = unassigned DNA
tactagactgttcatttctctctgacatgttt

SEQ ID NO: 14059 - DNA, 32 bp, Homo sapiens
  source 1..32: mol_type = unassigned DNA
aaacatgtcagagagaaatgaacagtctagta

SEQ ID NO: 14060 - RNA, 69 nt, Homo sapiens
  source 1..69: mol_type = unassigned RNA
aggactcaactctgtagctgaatccatttatctcagtagcctattctgcttggtcctaatttccatccg

SEQ ID NO: 14061 - DNA, 69 bp, Homo sapiens
  source 1..69: mol_type = unassigned DNA
aggactcaactctgtagctgaatccatttatctcagtagcctattctgcttggtcctaatttccatccg

SEQ ID NO: 14062 - DNA, 69 bp, Homo sapiens
  source 1..69: mol_type = unassigned DNA
cggatggaaattaggaccaagcagaataggctactgagataaatggattcagctacagagttgagtcct

SEQ ID NO: 14063 - RNA, 71 nt, Homo sapiens
  source 1..71: mol_type = unassigned RNA
aacctaacaccattgttttattatctttactggtcattgagtcaggctgttgaactaatcatatgctgtct

SEQ ID NO: 14064 - DNA, 71 bp, Homo sapiens
  source 1..71: mol_type = unassigned DNA
aacctaacaccattgttttattatctttactggtcattgagtcaggctgttgaactaatcatatgctgtct

SEQ ID NO: 14065 - DNA, 71 bp, Homo sapiens
  source 1..71: mol_type = unassigned DNA
agacagcatatgattagttcaacagcctgactcaatgaccagtaaagataataaaacaatggtgttaggtt

SEQ ID NO: 14066 - RNA, 98 nt, Homo sapiens
  source 1..98: mol_type = unassigned RNA
ggaggcaaagcagcgcaaggcagatagcgacaagactgtcaaagaacattcctcagacctcagagaggaccctgaaagcatcaacgcagcggaaaagg

SEQ ID NO: 14067 - DNA, 98 bp, Homo sapiens
  source 1..98: mol_type = unassigned DNA
ggaggcaaagcagcgcaaggcagatagcgacaagactgtcaaagaacattcctcagacctcagagaggaccctgaaagcatcaacgcagcggaaaagg

SEQ ID NO: 14068 - DNA, 98 bp, Homo sapiens
  source 1..98: mol_type = unassigned DNA
ccttttccgctgcgttgatgctttcagggtcctctctgaggtctgaggaatgttctttgacagtcttgtcgctatctgccttgcgctgctttgcctcc

SEQ ID NO: 14069 - RNA, 30 nt, Homo sapiens
  source 1..30: mol_type = unassigned RNA
ttacaattacaatcaaggcagaaatgatct

SEQ ID NO: 14070 - DNA, 30 bp, Homo sapiens
  source 1..30: mol_type = unassigned DNA
ttacaattacaatcaaggcagaaatgatct

SEQ ID NO: 14071 - DNA, 30 bp, Homo sapiens
  source 1..30: mol_type = unassigned DNA
agatcatttctgccttgattgtaattgtaa

SEQ ID NO: 14072 - RNA, 28 nt, Homo sapiens
  source 1..28: mol_type = unassigned RNA
agtctgtgatcatccggacacagccttt

SEQ ID NO: 14073 - DNA, 28 bp, Homo sapiens
  source 1..28: mol_type = unassigned DNA
agtctgtgatcatccggacacagccttt

SEQ ID NO: 14074 - DNA, 28 bp, Homo sapiens
  source 1..28: mol_type = unassigned DNA
aaaggctgtgtccggatgatcacagact

SEQ ID NO: 14075 - RNA, 63 nt, Homo sapiens
  source 1..63: mol_type = unassigned RNA
actcctcaaatttagaatgaacttactgtaaatatctgtccatctctatgtcatttatttacc

SEQ ID NO: 14076 - DNA, 63 bp, Homo sapiens
  source 1..63: mol_type = unassigned DNA
actcctcaaatttagaatgaacttactgtaaatatctgtccatctctatgtcatttatttacc

SEQ ID NO: 14077 - DNA, 63 bp, Homo sapiens
  source 1..63: mol_type = unassigned DNA
ggtaaataaatgacatagagatggacagatatttacagtaagttcattctaaatttgaggagt

SEQ ID NO: 14078 - RNA, 38 nt, Homo sapiens
  source 1..38: mol_type = unassigned RNA
ccttaagcccagcacagtcctctgagataggaggtctc

SEQ ID NO: 14079 - DNA, 38 bp, Homo sapiens
  source 1..38: mol_type = unassigned DNA
ccttaagcccagcacagtcctctgagataggaggtctc

SEQ ID NO: 14080 - DNA, 38 bp, Homo sapiens
  source 1..38: mol_type = unassigned DNA
gagacctcctatctcagaggactgtgctgggcttaagg

SEQ ID NO: 14081 - RNA, 68 nt, Homo sapiens
  source 1..68: mol_type = unassigned RNA
ttgaattgcactgaacttgcctgcaatccatgctctgaattctccatctgcatctctgtgcctccttt

SEQ ID NO: 14082 - DNA, 68 bp, Homo sapiens
  source 1..68: mol_type = unassigned DNA
ttgaattgcactgaacttgcctgcaatccatgctctgaattctccatctgcatctctgtgcctccttt

SEQ ID NO: 14083 - DNA, 68 bp, Homo sapiens
  source 1..68: mol_type = unassigned DNA
aaaggaggcacagagatgcagatggagaattcagagcatggattgcaggcaagttcagtgcaattcaa

SEQ ID NO: 14084 - RNA, 32 nt, Homo sapiens
  source 1..32: mol_type = unassigned RNA
agccccggagcgtgccatgcactgtgggctta

SEQ ID NO: 14085 - DNA, 32 bp, Homo sapiens
  source 1..32: mol_type = unassigned DNA
agccccggagcgtgccatgcactgtgggctta

SEQ ID NO: 14086 - DNA, 32 bp, Homo sapiens
  source 1..32: mol_type = unassigned DNA
taagcccacagtgcatggcacgctccggggct

SEQ ID NO: 14087 - RNA, 24 nt, Homo sapiens
  source 1..24: mol_type = unassigned RNA
tactatgtagtatctcttcttaca

SEQ ID NO: 14088 - DNA, 24 bp, Homo sapiens
  source 1..24: mol_type = unassigned DNA
tactatgtagtatctcttcttaca

SEQ ID NO: 14089 - DNA, 24 bp, Homo sapiens
  source 1..24: mol_type = unassigned DNA
tgtaagaagagatactacatagta

SEQ ID NO: 14090 - RNA, 37 nt, Homo sapiens
  source 1..37: mol_type = unassigned RNA
gaacccgggaggcggagcttgcagtgcgctgatgtag

SEQ ID NO: 14091 - DNA, 37 bp, Homo sapiens
  source 1..37: mol_type = unassigned DNA
gaacccgggaggcggagcttgcagtgcgctgatgtag

SEQ ID NO: 14092 - DNA, 37 bp, Homo sapiens
  source 1..37: mol_type = unassigned DNA
ctacatcagcgcactgcaagctccgcctcccgggttc

SEQ ID NO: 14093 - RNA, 31 nt, Homo sapiens
  source 1..31: mol_type = unassigned RNA
ggccctggtacttccctgctgacctgctcct

SEQ ID NO: 14094 - DNA, 31 bp, Homo sapiens
  source 1..31: mol_type = unassigned DNA
ggccctggtacttccctgctgacctgctcct

SEQ ID NO: 14095 - DNA, 31 bp, Homo sapiens
  source 1..31: mol_type = unassigned DNA
aggagcaggtcagcagggaagtaccagggcc

SEQ ID NO: 14096 - RNA, 143 nt, Homo sapiens
  source 1..143: mol_type = unassigned RNA
aagccctgcctgatcacataaactagaggtaatttctgccccttcctgaatcctagtgtgttttgtttatgccagcctgatagtagttacaacatttgaccttgaactccagttatttgtatccagtcttttgtcttccgcct

SEQ ID NO: 14097 - DNA, 143 bp, Homo sapiens
  source 1..143: mol_type = unassigned DNA
aagccctgcctgatcacataaactagaggtaatttctgccccttcctgaatcctagtgtgttttgtttatgccagcctgatagtagttacaacatttgaccttgaactccagttatttgtatccagtcttttgtcttccgcct

SEQ ID NO: 14098 - DNA, 143 bp, Homo sapiens
  source 1..143: mol_type = unassigned DNA
aggcggaagacaaaagactggatacaaataactggagttcaaggtcaaatgttgtaactactatcaggctggcataaacaaaacacactaggattcaggaaggggcagaaattacctctagtttatgtgatcaggcagggctt

SEQ ID NO: 14099 - RNA, 31 nt, Homo sapiens
  source 1..31: mol_type = unassigned RNA
ccattatacatgatttgattaagaagaatct

SEQ ID NO: 14100 - DNA, 31 bp, Homo sapiens
  source 1..31: mol_type = unassigned DNA
ccattatacatgatttgattaagaagaatct

SEQ ID NO: 14101 - DNA, 31 bp, Homo sapiens
  source 1..31: mol_type = unassigned DNA
agattcttcttaatcaaatcatgtataatgg

SEQ ID NO: 14102 - RNA, 70 nt, Homo sapiens
  source 1..70: mol_type = unassigned RNA
tgtggcaagtcagaattcagatgggctgtaagtaaaaaatacacaacacgttttgaacacttagcacaaa

SEQ ID NO: 14103 - DNA, 70 bp, Homo sapiens
  source 1..70: mol_type = unassigned DNA
tgtggcaagtcagaattcagatgggctgtaagtaaaaaatacacaacacgttttgaacacttagcacaaa

SEQ ID NO: 14104 - DNA, 70 bp, Homo sapiens
  source 1..70: mol_type = unassigned DNA
tttgtgctaagtgttcaaaacgtgttgtgtattttttacttacagcccatctgaattctgacttgccaca

SEQ ID NO: 14105 - RNA, 28 nt, Homo sapiens
  source 1..28: mol_type = unassigned RNA
acctagctgtaagtccctgtagatcgca

SEQ ID NO: 14106 - DNA, 28 bp, Homo sapiens
  source 1..28: mol_type = unassigned DNA
acctagctgtaagtccctgtagatcgca

SEQ ID NO: 14107 - DNA, 28 bp, Homo sapiens
  source 1..28: mol_type = unassigned DNA
tgcgatctacagggacttacagctaggt

SEQ ID NO: 14108 - RNA, 195 nt, Homo sapiens
  source 1..195: mol_type = unassigned RNA
tttctctagatagcacaataccaattttaattaatttcttccaattaggttacttttctttaataaagttatgctgccttcagttttccaatggcaagtagacaggatatgttcaaggttttctgcactgtaggcacagtctctcaagcatatcctgatcatgtaatgactgcataaactccatcaacctaaggt

SEQ ID NO: 14109 - DNA, 195 bp, Homo sapiens
  source 1..195: mol_type = unassigned DNA
tttctctagatagcacaataccaattttaattaatttcttccaattaggttacttttctttaataaagttatgctgccttcagttttccaatggcaagtagacaggatatgttcaaggttttctgcactgtaggcacagtctctcaagcatatcctgatcatgtaatgactgcataaactccatcaacctaaggt

SEQ ID NO: 14110 - DNA, 195 bp, Homo sapiens
  source 1..195: mol_type = unassigned DNA
accttaggttgatggagtttatgcagtcattacatgatcaggatatgcttgagagactgtgcctacagtgcagaaaaccttgaacatatcctgtctacttgccattggaaaactgaaggcagcataactttattaaagaaaagtaacctaattggaagaaattaattaaaattggtattgtgctatctagagaaa

SEQ ID NO: 14111 - RNA, 28 nt, Homo sapiens
  source 1..28: mol_type = unassigned RNA
gaggcggtcaatggacactggagcctct

SEQ ID NO: 14112 - DNA, 28 bp, Homo sapiens
  source 1..28: mol_type = unassigned DNA
gaggcggtcaatggacactggagcctct

SEQ ID NO: 14113 - DNA, 28 bp, Homo sapiens
  source 1..28: mol_type = unassigned DNA
agaggctccagtgtccattgaccgcctc

SEQ ID NO: 14114 - RNA, 42 nt, Homo sapiens
  source 1..42: mol_type = unassigned RNA
attctgcttgacctttgtagaacttcttggatctgtatgctg

SEQ ID NO: 14115 - DNA, 42 bp, Homo sapiens
  source 1..42: mol_type = unassigned DNA
attctgcttgacctttgtagaacttcttggatctgtatgctg

SEQ ID NO: 14116 - DNA, 42 bp, Homo sapiens
  source 1..42: mol_type = unassigned DNA
cagcatacagatccaagaagttctacaaaggtcaagcagaat

SEQ ID NO: 14117 - RNA, 67 nt, Homo sapiens
  source 1..67: mol_type = unassigned RNA
attaggccgagacactttaactaaattatctgcttccctgactgttcctggactacagctacatctc

SEQ ID NO: 14118 - DNA, 67 bp, Homo sapiens
  source 1..67: mol_type = unassigned DNA
attaggccgagacactttaactaaattatctgcttccctgactgttcctggactacagctacatctc

SEQ ID NO: 14119 - DNA, 67 bp, Homo sapiens
  source 1..67: mol_type = unassigned DNA
gagatgtagctgtagtccaggaacagtcagggaagcagataatttagttaaagtgtctcggcctaat

SEQ ID NO: 14120 - RNA, 29 nt, Homo sapiens
  source 1..29: mol_type = unassigned RNA
ctaggtcagatgactgatttgatccatac

SEQ ID NO: 14121 - DNA, 29 bp, Homo sapiens
  source 1..29: mol_type = unassigned DNA
ctaggtcagatgactgatttgatccatac

SEQ ID NO: 14122 - DNA, 29 bp, Homo sapiens
  source 1..29: mol_type = unassigned DNA
gtatggatcaaatcagtcatctgacctag

SEQ ID NO: 14123 - RNA, 64 nt, Homo sapiens
  source 1..64: mol_type = unassigned RNA
aatcctgaagtgactgactagactctggactgaaccgtgttaatttttcatagaatcatgaact

SEQ ID NO: 14124 - DNA, 64 bp, Homo sapiens
  source 1..64: mol_type = unassigned DNA
aatcctgaagtgactgactagactctggactgaaccgtgttaatttttcatagaatcatgaact

SEQ ID NO: 14125 - DNA, 64 bp, Homo sapiens
  source 1..64: mol_type = unassigned DNA
agttcatgattctatgaaaaattaacacggttcagtccagagtctagtcagtcacttcaggatt

SEQ ID NO: 14126 - RNA, 43 nt, Homo sapiens
  source 1..43: mol_type = unassigned RNA
agtcatcactccagtctctttcttctgcttgttcctcctcaca

SEQ ID NO: 14127 - DNA, 43 bp, Homo sapiens
  source 1..43: mol_type = unassigned DNA
agtcatcactccagtctctttcttctgcttgttcctcctcaca

SEQ ID NO: 14128 - DNA, 43 bp, Homo sapiens
  source 1..43: mol_type = unassigned DNA
tgtgaggaggaacaagcagaagaaagagactggagtgatgact

SEQ ID NO: 14129 - RNA, 70 nt, Homo sapiens
  source 1..70: mol_type = unassigned RNA
tatctgcttccctgactgttcctggactacagctatatctcattgccgcccttcttcccaatccaaagcc

SEQ ID NO: 14130 - DNA, 70 bp, Homo sapiens
  source 1..70: mol_type = unassigned DNA
tatctgcttccctgactgttcctggactacagctatatctcattgccgcccttcttcccaatccaaagcc

SEQ ID NO: 14131 - DNA, 70 bp, Homo sapiens
  source 1..70: mol_type = unassigned DNA
ggctttggattgggaagaagggcggcaatgagatatagctgtagtccaggaacagtcagggaagcagata

SEQ ID NO: 14132 - RNA, 60 nt, Homo sapiens
  source 1..60: mol_type = unassigned RNA
ttctttaccctctgaatccttccatcaatgatctcattggcagtcttggctgaggaaaca

SEQ ID NO: 14133 - DNA, 60 bp, Homo sapiens
  source 1..60: mol_type = unassigned DNA
ttctttaccctctgaatccttccatcaatgatctcattggcagtcttggctgaggaaaca

SEQ ID NO: 14134 - DNA, 60 bp, Homo sapiens
  source 1..60: mol_type = unassigned DNA
tgtttcctcagccaagactgccaatgagatcattgatggaaggattcagagggtaaagaa

SEQ ID NO: 14135 - RNA, 49 nt, Homo sapiens
  source 1..49: mol_type = unassigned RNA
cctgccctccttgggaatctacaaccccccaagtttgcagcatcgttca

SEQ ID NO: 14136 - DNA, 49 bp, Homo sapiens
  source 1..49: mol_type = unassigned DNA
cctgccctccttgggaatctacaaccccccaagtttgcagcatcgttca

SEQ ID NO: 14137 - DNA, 49 bp, Homo sapiens
  source 1..49: mol_type = unassigned DNA
tgaacgatgctgcaaacttggggggttgtagattcccaaggagggcagg

SEQ ID NO: 14138 - RNA, 113 nt, Homo sapiens
  source 1..113: mol_type = unassigned RNA
ttcatgcttctatttcactcttcctcaaaacagttttatattatgttgaccagtgaaattgtaacttaatttcatggggacaggggcagtgctacagttcctggaaaaattag

SEQ ID NO: 14139 - DNA, 113 bp, Homo sapiens
  source 1..113: mol_type = unassigned DNA
ttcatgcttctatttcactcttcctcaaaacagttttatattatgttgaccagtgaaattgtaacttaatttcatggggacaggggcagtgctacagttcctggaaaaattag

SEQ ID NO: 14140 - DNA, 113 bp, Homo sapiens
  source 1..113: mol_type = unassigned DNA
ctaatttttccaggaactgtagcactgcccctgtccccatgaaattaagttacaatttcactggtcaacataatataaaactgttttgaggaagagtgaaatagaagcatgaa

SEQ ID NO: 14141 - RNA, 143 nt, Homo sapiens
  source 1..143: mol_type = unassigned RNA
tacaaagtggataatttgtattgagctgcctgtaagttctctgattcatctgtcatctcataaccgctgttgcccctgtagtgatttgttggttttggttactgtactttttaactctagaatttctgtttgtcttttgttta

SEQ ID NO: 14142 - DNA, 143 bp, Homo sapiens
  source 1..143: mol_type = unassigned DNA
tacaaagtggataatttgtattgagctgcctgtaagttctctgattcatctgtcatctcataaccgctgttgcccctgtagtgatttgttggttttggttactgtactttttaactctagaatttctgtttgtcttttgttta

SEQ ID NO: 14143 - DNA, 143 bp, Homo sapiens
  source 1..143: mol_type = unassigned DNA
taaacaaaagacaaacagaaattctagagttaaaaagtacagtaaccaaaaccaacaaatcactacaggggcaacagcggttatgagatgacagatgaatcagagaacttacaggcagctcaatacaaattatccactttgta

SEQ ID NO: 14144 - RNA, 46 nt, Homo sapiens
  source 1..46: mol_type = unassigned RNA
agcaacttctcaggtttctttgaccagctcccctatcctccatgcc

SEQ ID NO: 14145 - DNA, 46 bp, Homo sapiens
  source 1..46: mol_type = unassigned DNA
agcaacttctcaggtttctttgaccagctcccctatcctccatgcc

SEQ ID NO: 14146 - DNA, 46 bp, Homo sapiens
  source 1..46: mol_type = unassigned DNA
ggcatggaggataggggagctggtcaaagaaacctgagaagttgct

SEQ ID NO: 14147 - RNA, 106 nt, Homo sapiens
  source 1..106: mol_type = unassigned RNA
ttgggccccaccctagaccccagacctagtggaccagaacctgcatttcattttaaccagacacccaggcgattcgtatgcacgctgacatttgagaagccctggt

SEQ ID NO: 14148 - DNA, 106 bp, Homo sapiens
  source 1..106: mol_type = unassigned DNA
ttgggccccaccctagaccccagacctagtggaccagaacctgcatttcattttaaccagacacccaggcgattcgtatgcacgctgacatttgagaagccctggt

SEQ ID NO: 14149 - DNA, 106 bp, Homo sapiens
  source 1..106: mol_type = unassigned DNA
accagggcttctcaaatgtcagcgtgcatacgaatcgcctgggtgtctggttaaaatgaaatgcaggttctggtccactaggtctggggtctagggtggggcccaa

SEQ ID NO: 14150 - RNA, 40 nt, Homo sapiens
  source 1..40: mol_type = unassigned RNA
ctcactgtgctctggaaaactggcccttgactagatggat

SEQ ID NO: 14151 - DNA, 40 bp, Homo sapiens
  source 1..40: mol_type = unassigned DNA
ctcactgtgctctggaaaactggcccttgactagatggat

SEQ ID NO: 14152 - DNA, 40 bp, Homo sapiens
  source 1..40: mol_type = unassigned DNA
atccatctagtcaagggccagttttccagagcacagtgag

SEQ ID NO: 14153 - RNA, 30 nt, Homo sapiens
  source 1..30: mol_type = unassigned RNA
gagactccaaatctcaatgaagccagctca

SEQ ID NO: 14154 - DNA, 30 bp, Homo sapiens
  source 1..30: mol_type = unassigned DNA
gagactccaaatctcaatgaagccagctca

SEQ ID NO: 14155 - DNA, 30 bp, Homo sapiens
  source 1..30: mol_type = unassigned DNA
tgagctggcttcattgagatttggagtctc

SEQ ID NO: 14156 - RNA, 75 nt, Homo sapiens
  source 1..75: mol_type = unassigned RNA
tacactgtcttagaaccaagcaagattcacctgtgttttgtgttcatttgcctcttaaaggcaagggttgaagat

SEQ ID NO: 14157 - DNA, 75 bp, Homo sapiens
  source 1..75: mol_type = unassigned DNA
tacactgtcttagaaccaagcaagattcacctgtgttttgtgttcatttgcctcttaaaggcaagggttgaagat

SEQ ID NO: 14158 - DNA, 75 bp, Homo sapiens
  source 1..75: mol_type = unassigned DNA
atcttcaacccttgcctttaagaggcaaatgaacacaaaacacaggtgaatcttgcttggttctaagacagtgta

SEQ ID NO: 14159 - RNA, 38 nt, Homo sapiens
  source 1..38: mol_type = unassigned RNA
cctggagagaggaggaccatctgactgccaagatgggg

SEQ ID NO: 14160 - DNA, 38 bp, Homo sapiens
  source 1..38: mol_type = unassigned DNA
cctggagagaggaggaccatctgactgccaagatgggg

SEQ ID NO: 14161 - DNA, 38 bp, Homo sapiens
  source 1..38: mol_type = unassigned DNA
ccccatcttggcagtcagatggtcctcctctctccagg

SEQ ID NO: 14162 - RNA, 31 nt, Homo sapiens
  source 1..31: mol_type = unassigned RNA
gtacatgttgggaagactgtgtagatttctt

SEQ ID NO: 14163 - DNA, 31 bp, Homo sapiens
  source 1..31: mol_type = unassigned DNA
gtacatgttgggaagactgtgtagatttctt

SEQ ID NO: 14164 - DNA, 31 bp, Homo sapiens
  source 1..31: mol_type = unassigned DNA
aagaaatctacacagtcttcccaacatgtac

SEQ ID NO: 14165 - RNA, 29 nt, Homo sapiens
  source 1..29: mol_type = unassigned RNA
ccttcccgtgctcttctgaacatgcacaa

SEQ ID NO: 14166 - DNA, 29 bp, Homo sapiens
  source 1..29: mol_type = unassigned DNA
ccttcccgtgctcttctgaacatgcacaa

SEQ ID NO: 14167 - DNA, 29 bp, Homo sapiens
  source 1..29: mol_type = unassigned DNA
ttgtgcatgttcagaagagcacgggaagg

SEQ ID NO: 14168 - RNA, 28 nt, Homo sapiens
  source 1..28: mol_type = unassigned RNA
agaattttcataatgcagtcacatggtg

SEQ ID NO: 14169 - DNA, 28 bp, Homo sapiens
  source 1..28: mol_type = unassigned DNA
agaattttcataatgcagtcacatggtg

SEQ ID NO: 14170 - DNA, 28 bp, Homo sapiens
  source 1..28: mol_type = unassigned DNA
caccatgtgactgcattatgaaaattct

SEQ ID NO: 14171 - RNA, 69 nt, Homo sapiens
  source 1..69: mol_type = unassigned RNA
attatcactctgtcctttaaaacgagtatgtataattttcaagttagaaatctttgacacatatctcga

SEQ ID NO: 14172 - DNA, 69 bp, Homo sapiens
  source 1..69: mol_type = unassigned DNA
attatcactctgtcctttaaaacgagtatgtataattttcaagttagaaatctttgacacatatctcga

SEQ ID NO: 14173 - DNA, 69 bp, Homo sapiens
  source 1..69: mol_type = unassigned DNA
tcgagatatgtgtcaaagatttctaacttgaaaattatacatactcgttttaaaggacagagtgataat

SEQ ID NO: 14174 - RNA, 31 nt, Homo sapiens
  source 1..31: mol_type = unassigned RNA
tacattaaaactctgaattcacatacaatgc

SEQ ID NO: 14175 - DNA, 31 bp, Homo sapiens
  source 1..31: mol_type = unassigned DNA
tacattaaaactctgaattcacatacaatgc

SEQ ID NO: 14176 - DNA, 31 bp, Homo sapiens
  source 1..31: mol_type = unassigned DNA
gcattgtatgtgaattcagagttttaatgta

SEQ ID NO: 14177 - RNA, 26 nt, Homo sapiens
  source 1..26: mol_type = unassigned RNA
tttccatttgtcatccttcaccatga

SEQ ID NO: 14178 - DNA, 26 bp, Homo sapiens
  source 1..26: mol_type = unassigned DNA
tttccatttgtcatccttcaccatga

SEQ ID NO: 14179 - DNA, 26 bp, Homo sapiens
  source 1..26: mol_type = unassigned DNA
tcatggtgaaggatgacaaatggaaa

SEQ ID NO: 14180 - RNA, 31 nt, Homo sapiens
  source 1..31: mol_type = unassigned RNA
ttagttgtttatctggctgtctttctttctt

SEQ ID NO: 14181 - DNA, 31 bp, Homo sapiens
  source 1..31: mol_type = unassigned DNA
ttagttgtttatctggctgtctttctttctt

SEQ ID NO: 14182 - DNA, 31 bp, Homo sapiens
  source 1..31: mol_type = unassigned DNA
aagaaagaaagacagccagataaacaactaa

SEQ ID NO: 14183 - RNA, 46 nt, Homo sapiens
  source 1..46: mol_type = unassigned RNA
gggaatgggtctcattctctttgtcctccttcgccgtaccatgctg

SEQ ID NO: 14184 - DNA, 46 bp, Homo sapiens
  source 1..46: mol_type = unassigned DNA
gggaatgggtctcattctctttgtcctccttcgccgtaccatgctg

SEQ ID NO: 14185 - DNA, 46 bp, Homo sapiens
  source 1..46: mol_type = unassigned DNA
cagcatggtacggcgaaggaggacaaagagaatgagacccattccc

SEQ ID NO: 14186 - RNA, 28 nt, Homo sapiens
  source 1..28: mol_type = unassigned RNA
tatttgtttatctctctgtcttcctcct

SEQ ID NO: 14187 - DNA, 28 bp, Homo sapiens
  source 1..28: mol_type = unassigned DNA
tatttgtttatctctctgtcttcctcct

SEQ ID NO: 14188 - DNA, 28 bp, Homo sapiens
  source 1..28: mol_type = unassigned DNA
aggaggaagacagagagataaacaaata

SEQ ID NO: 14189 - RNA, 26 nt, Homo sapiens
  source 1..26: mol_type = unassigned RNA
tgctttgtttctctagctctattact

SEQ ID NO: 14190 - DNA, 26 bp, Homo sapiens
  source 1..26: mol_type = unassigned DNA
tgctttgtttctctagctctattact

SEQ ID NO: 14191 - DNA, 26 bp, Homo sapiens
  source 1..26: mol_type = unassigned DNA
agtaatagagctagagaaacaaagca

SEQ ID NO: 14192 - RNA, 31 nt, Homo sapiens
  source 1..31: mol_type = unassigned RNA
aaattgcctttgtcatccttcacctacaaat

SEQ ID NO: 14193 - DNA, 31 bp, Homo sapiens
  source 1..31: mol_type = unassigned DNA
aaattgcctttgtcatccttcacctacaaat

SEQ ID NO: 14194 - DNA, 31 bp, Homo sapiens
  source 1..31: mol_type = unassigned DNA
atttgtaggtgaaggatgacaaaggcaattt

SEQ ID NO: 14195 - RNA, 24 nt, Homo sapiens
  source 1..24: mol_type = unassigned RNA
tctttttttctctcactgtattat

SEQ ID NO: 14196 - DNA, 24 bp, Homo sapiens
  source 1..24: mol_type = unassigned DNA
tctttttttctctcactgtattat

SEQ ID NO: 14197 - DNA, 24 bp, Homo sapiens
  source 1..24: mol_type = unassigned DNA
ataatacagtgagagaaaaaaaga

SEQ ID NO: 14198 - RNA, 25 nt, Homo sapiens
  source 1..25: mol_type = unassigned RNA
tttccctttatcatgcttcgcaaat

SEQ ID NO: 14199 - DNA, 25 bp, Homo sapiens
  source 1..25: mol_type = unassigned DNA
tttccctttatcatgcttcgcaaat

SEQ ID NO: 14200 - DNA, 25 bp, Homo sapiens
  source 1..25: mol_type = unassigned DNA
atttgcgaagcatgataaagggaaa

SEQ ID NO: 14201 - RNA, 54 nt, Homo sapiens
  source 1..54: mol_type = unassigned RNA
atctttgtttctccagatgtatttcctagagtattgaccaggtaagcaacattc

SEQ ID NO: 14202 - DNA, 54 bp, Homo sapiens
  source 1..54: mol_type = unassigned DNA
atctttgtttctccagatgtatttcctagagtattgaccaggtaagcaacattc

SEQ ID NO: 14203 - DNA, 54 bp, Homo sapiens
  source 1..54: mol_type = unassigned DNA
gaatgttgcttacctggtcaatactctaggaaatacatctggagaaacaaagat

SEQ ID NO: 14204 - RNA, 41 nt, Homo sapiens
  source 1..41: mol_type = unassigned RNA
tctttggttatccctctttcttacacctgtctaagcctcct

SEQ ID NO: 14205 - DNA, 41 bp, Homo sapiens
  source 1..41: mol_type = unassigned DNA
tctttggttatccctctttcttacacctgtctaagcctcct

SEQ ID NO: 14206 - DNA, 41 bp, Homo sapiens
  source 1..41: mol_type = unassigned DNA
aggaggcttagacaggtgtaagaaagagggataaccaaaga

SEQ ID NO: 14207 - RNA, 34 nt, Homo sapiens
  source 1..34: mol_type = unassigned RNA
agaagatgccctgccctttgtcatccttagaaca

SEQ ID NO: 14208 - DNA, 34 bp, Homo sapiens
  source 1..34: mol_type = unassigned DNA
agaagatgccctgccctttgtcatccttagaaca

SEQ ID NO: 14209 - DNA, 34 bp, Homo sapiens
  source 1..34: mol_type = unassigned DNA
tgttctaaggatgacaaagggcagggcatcttct

SEQ ID NO: 14210 - RNA, 42 nt, Homo sapiens
  source 1..42: mol_type = unassigned RNA
ccagcctttttcatactttacatttgttatctcgctgtcttc

SEQ ID NO: 14211 - DNA, 42 bp, Homo sapiens
  source 1..42: mol_type = unassigned DNA
ccagcctttttcatactttacatttgttatctcgctgtcttc

SEQ ID NO: 14212 - DNA, 42 bp, Homo sapiens
  source 1..42: mol_type = unassigned DNA
gaagacagcgagataacaaatgtaaagtatgaaaaaggctgg

SEQ ID NO: 14213 - RNA, 50 nt, Homo sapiens
  source 1..50: mol_type = unassigned RNA
tcgctgtttactagctgtgtgaactcgaaggaatcatttaacctatccga

SEQ ID NO: 14214 - DNA, 50 bp, Homo sapiens
  source 1..50: mol_type = unassigned DNA
tcgctgtttactagctgtgtgaactcgaaggaatcatttaacctatccga

SEQ ID NO: 14215 - DNA, 50 bp, Homo sapiens
  source 1..50: mol_type = unassigned DNA
tcggataggttaaatgattccttcgagttcacacagctagtaaacagcga

SEQ ID NO: 14216 - RNA, 46 nt, Homo sapiens
  source 1..46: mol_type = unassigned RNA
tgtattcatcctactactggtaggttggttggttctcctgtattta

SEQ ID NO: 14217 - DNA, 46 bp, Homo sapiens
  source 1..46: mol_type = unassigned DNA
tgtattcatcctactactggtaggttggttggttctcctgtattta

SEQ ID NO: 14218 - DNA, 46 bp, Homo sapiens
  source 1..46: mol_type = unassigned DNA
taaatacaggagaaccaaccaacctaccagtagtaggatgaataca

SEQ ID NO: 14219 - RNA, 33 nt, Homo sapiens
  source 1..33: mol_type = unassigned RNA
ctcagcaggctttggtttctcgctgtatcaatc

SEQ ID NO: 14220 - DNA, 33 bp, Homo sapiens
  source 1..33: mol_type = unassigned DNA
ctcagcaggctttggtttctcgctgtatcaatc

SEQ ID NO: 14221 - DNA, 33 bp, Homo sapiens
  source 1..33: mol_type = unassigned DNA
gattgatacagcgagaaaccaaagcctgctgag

SEQ ID NO: 14222 - RNA, 24 nt, Homo sapiens
  source 1..24: mol_type = unassigned RNA
taggttatctgtctaatgctgaga

SEQ ID NO: 14223 - DNA, 24 bp, Homo sapiens
  source 1..24: mol_type = unassigned DNA
taggttatctgtctaatgctgaga

SEQ ID NO: 14224 - DNA, 24 bp, Homo sapiens
  source 1..24: mol_type = unassigned DNA
tctcagcattagacagataaccta

SEQ ID NO: 14225 - RNA, 31 nt, Homo sapiens
  source 1..31: mol_type = unassigned RNA
tggaagtgactgtctaccatcgccggggatc

SEQ ID NO: 14226 - DNA, 31 bp, Homo sapiens
  source 1..31: mol_type = unassigned DNA
tggaagtgactgtctaccatcgccggggatc

SEQ ID NO: 14227 - DNA, 31 bp, Homo sapiens
  source 1..31: mol_type = unassigned DNA
gatccccggcgatggtagacagtcacttcca

SEQ ID NO: 14228 - RNA, 70 nt, Homo sapiens
  source 1..70: mol_type = unassigned RNA
gggtccaattagataaactcatcctcgctggcagataatggcaccaatgtgatcatcctcctagaggtat

SEQ ID NO: 14229 - DNA, 70 bp, Homo sapiens
  source 1..70: mol_type = unassigned DNA
gggtccaattagataaactcatcctcgctggcagataatggcaccaatgtgatcatcctcctagaggtat

SEQ ID NO: 14230 - DNA, 70 bp, Homo sapiens
  source 1..70: mol_type = unassigned DNA
atacctctaggaggatgatcacattggtgccattatctgccagcgaggatgagtttatctaattggaccc

SEQ ID NO: 14231 - RNA, 23 nt, Homo sapiens
  source 1..23: mol_type = unassigned RNA
tccttttttatccagctgtattg

SEQ ID NO: 14232 - DNA, 23 bp, Homo sapiens
  source 1..23: mol_type = unassigned DNA
tccttttttatccagctgtattg

SEQ ID NO: 14233 - DNA, 23 bp, Homo sapiens
  source 1..23: mol_type = unassigned DNA
caatacagctggataaaaaagga

SEQ ID NO: 14234 - RNA, 30 nt, Homo sapiens
  source 1..30: mol_type = unassigned RNA
tttcttgtggcctgttggactagagacctc

SEQ ID NO: 14235 - DNA, 30 bp, Homo sapiens
  source 1..30: mol_type = unassigned DNA
tttcttgtggcctgttggactagagacctc

SEQ ID NO: 14236 - DNA, 30 bp, Homo sapiens
  source 1..30: mol_type = unassigned DNA
gaggtctctagtccaacaggccacaagaaa

SEQ ID NO: 14237 - RNA, 23 nt, Homo sapiens
  source 1..23: mol_type = unassigned RNA
tatttagttatctaatgtatgcc

SEQ ID NO: 14238 - DNA, 23 bp, Homo sapiens
  source 1..23: mol_type = unassigned DNA
tatttagttatctaatgtatgcc

SEQ ID NO: 14239 - DNA, 23 bp, Homo sapiens
  source 1..23: mol_type = unassigned DNA
ggcatacattagataactaaata

SEQ ID NO: 14240 - RNA, 42 nt, Homo sapiens
  source 1..42: mol_type = unassigned RNA
ttcttttttgactcgctgtctgatcatgggcatgttgtttga

SEQ ID NO: 14241 - DNA, 42 bp, Homo sapiens
  source 1..42: mol_type = unassigned DNA
ttcttttttgactcgctgtctgatcatgggcatgttgtttga

SEQ ID NO: 14242 - DNA, 42 bp, Homo sapiens
  source 1..42: mol_type = unassigned DNA
tcaaacaacatgcccatgatcagacagcgagtcaaaaaagaa

SEQ ID NO: 14243 - RNA, 51 nt, Homo sapiens
  source 1..51: mol_type = unassigned RNA
agctactgccattttcgtctttgtttctctcactatatggtttactcatgt

SEQ ID NO: 14244 - DNA, 51 bp, Homo sapiens
  source 1..51: mol_type = unassigned DNA
agctactgccattttcgtctttgtttctctcactatatggtttactcatgt

SEQ ID NO: 14245 - DNA, 51 bp, Homo sapiens
  source 1..51: mol_type = unassigned DNA
acatgagtaaaccatatagtgagagaaacaaagacgaaaatggcagtagct

SEQ ID NO: 14246 - RNA, 32 nt, Homo sapiens
  source 1..32: mol_type = unassigned RNA
aatgtatcctcttctactggtagctgcaaacc

SEQ ID NO: 14247 - DNA, 32 bp, Homo sapiens
  source 1..32: mol_type = unassigned DNA
aatgtatcctcttctactggtagctgcaaacc

SEQ ID NO: 14248 - DNA, 32 bp, Homo sapiens
  source 1..32: mol_type = unassigned DNA
ggtttgcagctaccagtagaagaggatacatt

SEQ ID NO: 14249 - RNA, 29 nt, Homo sapiens
  source 1..29: mol_type = unassigned RNA
tccccaaggcgcgccggccggagagcgca

SEQ ID NO: 14250 - DNA, 29 bp, Homo sapiens
  source 1..29: mol_type = unassigned DNA
tccccaaggcgcgccggccggagagcgca

SEQ ID NO: 14251 - DNA, 29 bp, Homo sapiens
  source 1..29: mol_type = unassigned DNA
tgcgctctccggccggcgcgccttgggga

SEQ ID NO: 14252 - RNA, 108 nt, Homo sapiens
  source 1..108: mol_type = unassigned RNA
ttcttggttttctagctgtgtttaatgtggttgaccactcattctttgaagctctattcctctggctactacagtatgacacattttgtctccttcttcagtctctgt

SEQ ID NO: 14253 - DNA, 108 bp, Homo sapiens
  source 1..108: mol_type = unassigned DNA
ttcttggttttctagctgtgtttaatgtggttgaccactcattctttgaagctctattcctctggctactacagtatgacacattttgtctccttcttcagtctctgt

SEQ ID NO: 14254 - DNA, 108 bp, Homo sapiens
  source 1..108: mol_type = unassigned DNA
acagagactgaagaaggagacaaaatgtgtcatactgtagtagccagaggaatagagcttcaaagaatgagtggtcaaccacattaaacacagctagaaaaccaagaa

SEQ ID NO: 14255 - RNA, 79 nt, Homo sapiens
  source 1..79: mol_type = unassigned RNA
cctttggccaagttacagagcagtttccagggctgggtatgaaagtcccacctactctttttttctctggctgtcttca

SEQ ID NO: 14256 - DNA, 79 bp, Homo sapiens
  source 1..79: mol_type = unassigned DNA
cctttggccaagttacagagcagtttccagggctgggtatgaaagtcccacctactctttttttctctggctgtcttca

SEQ ID NO: 14257 - DNA, 79 bp, Homo sapiens
  source 1..79: mol_type = unassigned DNA
tgaagacagccagagaaaaaaagagtaggtgggactttcatacccagccctggaaactgctctgtaacttggccaaagg

SEQ ID NO: 14258 - RNA, 34 nt, Homo sapiens
  source 1..34: mol_type = unassigned RNA
tatttgattatatagatgcatgctatttggcctg

SEQ ID NO: 14259 - DNA, 34 bp, Homo sapiens
  source 1..34: mol_type = unassigned DNA
tatttgattatatagatgcatgctatttggcctg

SEQ ID NO: 14260 - DNA, 34 bp, Homo sapiens
  source 1..34: mol_type = unassigned DNA
caggccaaatagcatgcatctatataatcaaata

SEQ ID NO: 14261 - RNA, 30 nt, Homo sapiens
  source 1..30: mol_type = unassigned RNA
tctttttttctctctctgtattctctctct

SEQ ID NO: 14262 - DNA, 30 bp, Homo sapiens
  source 1..30: mol_type = unassigned DNA
tctttttttctctctctgtattctctctct

SEQ ID NO: 14263 - DNA, 30 bp, Homo sapiens
  source 1..30: mol_type = unassigned DNA
agagagagaatacagagagagaaaaaaaga

SEQ ID NO: 14264 - RNA, 27 nt, Homo sapiens
  source 1..27: mol_type = unassigned RNA
tttatttcattgtttgaattcactgtt

SEQ ID NO: 14265 - DNA, 27 bp, Homo sapiens
  source 1..27: mol_type = unassigned DNA
tttatttcattgtttgaattcactgtt

SEQ ID NO: 14266 - DNA, 27 bp, Homo sapiens
  source 1..27: mol_type = unassigned DNA
aacagtgaattcaaacaatgaaataaa

SEQ ID NO: 14267 - RNA, 54 nt, Homo sapiens
  source 1..54: mol_type = unassigned RNA
aggttcctaggcactgttcatttttcttctcttttgttttctctgctgtctgca

SEQ ID NO: 14268 - DNA, 54 bp, Homo sapiens
  source 1..54: mol_type = unassigned DNA
aggttcctaggcactgttcatttttcttctcttttgttttctctgctgtctgca

SEQ ID NO: 14269 - DNA, 54 bp, Homo sapiens
  source 1..54: mol_type = unassigned DNA
tgcagacagcagagaaaacaaaagagaagaaaaatgaacagtgcctaggaacct

SEQ ID NO: 14270 - RNA, 24 nt, Homo sapiens
  source 1..24: mol_type = unassigned RNA
ttcattattaatttgtatagttat

SEQ ID NO: 14271 - DNA, 24 bp, Homo sapiens
  source 1..24: mol_type = unassigned DNA
ttcattattaatttgtatagttat

SEQ ID NO: 14272 - DNA, 24 bp, Homo sapiens
  source 1..24: mol_type = unassigned DNA
ataactatacaaattaataatgaa

SEQ ID NO: 14273 - RNA, 38 nt, Homo sapiens
  source 1..38: mol_type = unassigned RNA
tgttgtgggagctaagtagaaatgcagaacctgattta

SEQ ID NO: 14274 - DNA, 38 bp, Homo sapiens
  source 1..38: mol_type = unassigned DNA
tgttgtgggagctaagtagaaatgcagaacctgattta

SEQ ID NO: 14275 - DNA, 38 bp, Homo sapiens
  source 1..38: mol_type = unassigned DNA
taaatcaggttctgcatttctacttagctcccacaaca

SEQ ID NO: 14276 - RNA, 67 nt, Homo sapiens
  source 1..67: mol_type = unassigned RNA
tcttatcccatcatgactggaagcaggagtccagttttgcctgtttttgaactttacagaaatggat

SEQ ID NO: 14277 - DNA, 67 bp, Homo sapiens
  source 1..67: mol_type = unassigned DNA
tcttatcccatcatgactggaagcaggagtccagttttgcctgtttttgaactttacagaaatggat

SEQ ID NO: 14278 - DNA, 67 bp, Homo sapiens
  source 1..67: mol_type = unassigned DNA
atccatttctgtaaagttcaaaaacaggcaaaactggactcctgcttccagtcatgatgggataaga

SEQ ID NO: 14279 - RNA, 29 nt, Homo sapiens
  source 1..29: mol_type = unassigned RNA
tctttggttctctctcttctgcctccctt

SEQ ID NO: 14280 - DNA, 29 bp, Homo sapiens
  source 1..29: mol_type = unassigned DNA
tctttggttctctctcttctgcctccctt

SEQ ID NO: 14281 - DNA, 29 bp, Homo sapiens
  source 1..29: mol_type = unassigned DNA
aagggaggcagaagagagagaaccaaaga

SEQ ID NO: 14282 - RNA, 42 nt, Homo sapiens
  source 1..42: mol_type = unassigned RNA
ttttttggtcatctatatgtatgcctgtaaattttgaaacag

SEQ ID NO: 14283 - DNA, 42 bp, Homo sapiens
  source 1..42: mol_type = unassigned DNA
ttttttggtcatctatatgtatgcctgtaaattttgaaacag

SEQ ID NO: 14284 - DNA, 42 bp, Homo sapiens
  source 1..42: mol_type = unassigned DNA
ctgtttcaaaatttacaggcatacatatagatgaccaaaaaa

SEQ ID NO: 14285 - RNA, 38 nt, Homo sapiens
  source 1..38: mol_type = unassigned RNA
ctcaggttctacaattctaccaggttctcatataccca

SEQ ID NO: 14286 - DNA, 38 bp, Homo sapiens
  source 1..38: mol_type = unassigned DNA
ctcaggttctacaattctaccaggttctcatataccca

SEQ ID NO: 14287 - DNA, 38 bp, Homo sapiens
  source 1..38: mol_type = unassigned DNA
tgggtatatgagaacctggtagaattgtagaacctgag

SEQ ID NO: 14288 - RNA, 38 nt, Homo sapiens
  source 1..38: mol_type = unassigned RNA
ttctcatcatattacttcggttttagtttgtataataa

SEQ ID NO: 14289 - DNA, 38 bp, Homo sapiens
  source 1..38: mol_type = unassigned DNA
ttctcatcatattacttcggttttagtttgtataataa

SEQ ID NO: 14290 - DNA, 38 bp, Homo sapiens
  source 1..38: mol_type = unassigned DNA
ttattatacaaactaaaaccgaagtaatatgatgagaa

SEQ ID NO: 14291 - RNA, 36 nt, Homo sapiens
  source 1..36: mol_type = unassigned RNA
tttcctatcagaaagatgttgctgaaacacaaaccc

SEQ ID NO: 14292 - DNA, 36 bp, Homo sapiens
  source 1..36: mol_type = unassigned DNA
tttcctatcagaaagatgttgctgaaacacaaaccc

SEQ ID NO: 14293 - DNA, 36 bp, Homo sapiens
  source 1..36: mol_type = unassigned DNA
gggtttgtgtttcagcaacatctttctgataggaaa

SEQ ID NO: 14294 - RNA, 27 nt, Homo sapiens
  source 1..27: mol_type = unassigned RNA
ttaggtatttgtttgtgttgacttgat

SEQ ID NO: 14295 - DNA, 27 bp, Homo sapiens
  source 1..27: mol_type = unassigned DNA
ttaggtatttgtttgtgttgacttgat

SEQ ID NO: 14296 - DNA, 27 bp, Homo sapiens
  source 1..27: mol_type = unassigned DNA
atcaagtcaacacaaacaaatacctaa

SEQ ID NO: 14297 - RNA, 42 nt, Homo sapiens
  source 1..42: mol_type = unassigned RNA
tcttggctcttttttatcttgctgtgttatacatggccttga

SEQ ID NO: 14298 - DNA, 42 bp, Homo sapiens
  source 1..42: mol_type = unassigned DNA
tcttggctcttttttatcttgctgtgttatacatggccttga

SEQ ID NO: 14299 - DNA, 42 bp, Homo sapiens
  source 1..42: mol_type = unassigned DNA
tcaaggccatgtataacacagcaagataaaaaagagccaaga

SEQ ID NO: 14300 - RNA, 39 nt, Homo sapiens
  source 1..39: mol_type = unassigned RNA
aatacagatatggtacttagagcagggtcctgctgtaac

SEQ ID NO: 14301 - DNA, 39 bp, Homo sapiens
  source 1..39: mol_type = unassigned DNA
aatacagatatggtacttagagcagggtcctgctgtaac

SEQ ID NO: 14302 - DNA, 39 bp, Homo sapiens
  source 1..39: mol_type = unassigned DNA
gttacagcaggaccctgctctaagtaccatatctgtatt

SEQ ID NO: 14303 - RNA, 48 nt, Homo sapiens
  source 1..48: mol_type = unassigned RNA
gcaagtataggctgatgttgagaaggaggattttctctgtatatcttt

SEQ ID NO: 14304 - DNA, 48 bp, Homo sapiens
  source 1..48: mol_type = unassigned DNA
gcaagtataggctgatgttgagaaggaggattttctctgtatatcttt

SEQ ID NO: 14305 - DNA, 48 bp, Homo sapiens
  source 1..48: mol_type = unassigned DNA
aaagatatacagagaaaatcctccttctcaacatcagcctatacttgc

SEQ ID NO: 14306 - RNA, 60 nt, Homo sapiens
  source 1..60: mol_type = unassigned RNA
tctttgtttatctagttgactttctccttgagaccagcctttccttctccgcttcaatct

SEQ ID NO: 14307 - DNA, 60 bp, Homo sapiens
  source 1..60: mol_type = unassigned DNA
tctttgtttatctagttgactttctccttgagaccagcctttccttctccgcttcaatct

SEQ ID NO: 14308 - DNA, 60 bp, Homo sapiens
  source 1..60: mol_type = unassigned DNA
agattgaagcggagaaggaaaggctggtctcaaggagaaagtcaactagataaacaaaga

SEQ ID NO: 14309 - RNA, 26 nt, Homo sapiens
  source 1..26: mol_type = unassigned RNA
aaagatttagaggttctatagtttgg

SEQ ID NO: 14310 - DNA, 26 bp, Homo sapiens
  source 1..26: mol_type = unassigned DNA
aaagatttagaggttctatagtttgg

SEQ ID NO: 14311 - DNA, 26 bp, Homo sapiens
  source 1..26: mol_type = unassigned DNA
ccaaactatagaacctctaaatcttt

SEQ ID NO: 14312 - RNA, 41 nt, Homo sapiens
  source 1..41: mol_type = unassigned RNA
tctttgttaatctagctatcttgctgtttctagaattcttt

SEQ ID NO: 14313 - DNA, 41 bp, Homo sapiens
  source 1..41: mol_type = unassigned DNA
tctttgttaatctagctatcttgctgtttctagaattcttt

SEQ ID NO: 14314 - DNA, 41 bp, Homo sapiens
  source 1..41: mol_type = unassigned DNA
aaagaattctagaaacagcaagatagctagattaacaaaga

SEQ ID NO: 14315 - RNA, 127 nt, Homo sapiens
  source 1..127: mol_type = unassigned RNA
acttcaggagagcagggactttggttctctgctgtatccccagcaatagaaaagtacctgacacataatcctcaaaaggcatttgttgggttaaaaacaacaacaacagggccaggcacggtgactc

SEQ ID NO: 14316 - DNA, 127 bp, Homo sapiens
  source 1..127: mol_type = unassigned DNA
acttcaggagagcagggactttggttctctgctgtatccccagcaatagaaaagtacctgacacataatcctcaaaaggcatttgttgggttaaaaacaacaacaacagggccaggcacggtgactc

SEQ ID NO: 14317 - DNA, 127 bp, Homo sapiens
  source 1..127: mol_type = unassigned DNA
gagtcaccgtgcctggccctgttgttgttgtttttaacccaacaaatgccttttgaggattatgtgtcaggtacttttctattgctggggatacagcagagaaccaaagtccctgctctcctgaagt

SEQ ID NO: 14318 - RNA, 36 nt, Homo sapiens
  source 1..36: mol_type = unassigned RNA
gctgatgtatgtgtttgtttagtttttaaattaacc

SEQ ID NO: 14319 - DNA, 36 bp, Homo sapiens
  source 1..36: mol_type = unassigned DNA
gctgatgtatgtgtttgtttagtttttaaattaacc

SEQ ID NO: 14320 - DNA, 36 bp, Homo sapiens
  source 1..36: mol_type = unassigned DNA
ggttaatttaaaaactaaacaaacacatacatcagc

SEQ ID NO: 14321 - RNA, 28 nt, Homo sapiens
  source 1..28: mol_type = unassigned RNA
tctttgtttagcgctgtcttagatgtga

SEQ ID NO: 14322 - DNA, 28 bp, Homo sapiens
  source 1..28: mol_type = unassigned DNA
tctttgtttagcgctgtcttagatgtga

SEQ ID NO: 14323 - DNA, 28 bp, Homo sapiens
  source 1..28: mol_type = unassigned DNA
tcacatctaagacagcgctaaacaaaga

SEQ ID NO: 14324 - RNA, 55 nt, Homo sapiens
  source 1..55: mol_type = unassigned RNA
tgtttcaatgtaacaactcacactctttagttctggatattttgtcttgaataat

SEQ ID NO: 14325 - DNA, 55 bp, Homo sapiens
  source 1..55: mol_type = unassigned DNA
tgtttcaatgtaacaactcacactctttagttctggatattttgtcttgaataat

SEQ ID NO: 14326 - DNA, 55 bp, Homo sapiens
  source 1..55: mol_type = unassigned DNA
attattcaagacaaaatatccagaactaaagagtgtgagttgttacattgaaaca

SEQ ID NO: 14327 - RNA, 63 nt, Homo sapiens
  source 1..63: mol_type = unassigned RNA
atctcatcctcttgtccttctgacacacaccgtgtaaacatccagacttggatcaatcaaatg

SEQ ID NO: 14328 - DNA, 63 bp, Homo sapiens
  source 1..63: mol_type = unassigned DNA
atctcatcctcttgtccttctgacacacaccgtgtaaacatccagacttggatcaatcaaatg

SEQ ID NO: 14329 - DNA, 63 bp, Homo sapiens
  source 1..63: mol_type = unassigned DNA
catttgattgatccaagtctggatgtttacacggtgtgtgtcagaaggacaagaggatgagat

SEQ ID NO: 14330 - RNA, 41 nt, Homo sapiens
  source 1..41: mol_type = unassigned RNA
ccgttctaacatcccaatctacgtattagtttgaatagttc

SEQ ID NO: 14331 - DNA, 41 bp, Homo sapiens
  source 1..41: mol_type = unassigned DNA
ccgttctaacatcccaatctacgtattagtttgaatagttc

SEQ ID NO: 14332 - DNA, 41 bp, Homo sapiens
  source 1..41: mol_type = unassigned DNA
gaactattcaaactaatacgtagattgggatgttagaacgg

SEQ ID NO: 14333 - RNA, 24 nt, Homo sapiens
  source 1..24: mol_type = unassigned RNA
tctacacatgcctctactggtagg

SEQ ID NO: 14334 - DNA, 24 bp, Homo sapiens
  source 1..24: mol_type = unassigned DNA
tctacacatgcctctactggtagg

SEQ ID NO: 14335 - DNA, 24 bp, Homo sapiens
  source 1..24: mol_type = unassigned DNA
cctaccagtagaggcatgtgtaga

SEQ ID NO: 14336 - RNA, 37 nt, Homo sapiens
  source 1..37: mol_type = unassigned RNA
gcccctttctctgcttgtaaccatcatctctggtagt

SEQ ID NO: 14337 - DNA, 37 bp, Homo sapiens
  source 1..37: mol_type = unassigned DNA
gcccctttctctgcttgtaaccatcatctctggtagt

SEQ ID NO: 14338 - DNA, 37 bp, Homo sapiens
  source 1..37: mol_type = unassigned DNA
actaccagagatgatggttacaagcagagaaaggggc

SEQ ID NO: 14339 - RNA, 50 nt, Homo sapiens
  source 1..50: mol_type = unassigned RNA
ttctgacttcttttggtatccagctgtaagtgaattttaacaccttagct

SEQ ID NO: 14340 - DNA, 50 bp, Homo sapiens
  source 1..50: mol_type = unassigned DNA
ttctgacttcttttggtatccagctgtaagtgaattttaacaccttagct

SEQ ID NO: 14341 - DNA, 50 bp, Homo sapiens
  source 1..50: mol_type = unassigned DNA
agctaaggtgttaaaattcacttacagctggataccaaaagaagtcagaa

SEQ ID NO: 14342 - RNA, 34 nt, Homo sapiens
  source 1..34: mol_type = unassigned RNA
tggccaggccactgaggaggtcggccgctgaccc

SEQ ID NO: 14343 - DNA, 34 bp, Homo sapiens
  source 1..34: mol_type = unassigned DNA
tggccaggccactgaggaggtcggccgctgaccc

SEQ ID NO: 14344 - DNA, 34 bp, Homo sapiens
  source 1..34: mol_type = unassigned DNA
gggtcagcggccgacctcctcagtggcctggcca

SEQ ID NO: 14345 - RNA, 25 nt, Homo sapiens
  source 1..25: mol_type = unassigned RNA
ttatgtattagtttttattgtcatt

SEQ ID NO: 14346 - DNA, 25 bp, Homo sapiens
  source 1..25: mol_type = unassigned DNA
ttatgtattagtttttattgtcatt

SEQ ID NO: 14347 - DNA, 25 bp, Homo sapiens
  source 1..25: mol_type = unassigned DNA
aatgacaataaaaactaatacataa

SEQ ID NO: 14348 - RNA, 24 nt, Homo sapiens
  source 1..24: mol_type = unassigned RNA
ttaggtattactttgtaaggttat

SEQ ID NO: 14349 - DNA, 24 bp, Homo sapiens
  source 1..24: mol_type = unassigned DNA
ttaggtattactttgtaaggttat

SEQ ID NO: 14350 - DNA, 24 bp, Homo sapiens
  source 1..24: mol_type = unassigned DNA
ataaccttacaaagtaatacctaa

SEQ ID NO: 14351 - RNA, 24 nt, Homo sapiens
  source 1..24: mol_type = unassigned RNA
tcctttcactccacaaccttgtca

SEQ ID NO: 14352 - DNA, 24 bp, Homo sapiens
  source 1..24: mol_type = unassigned DNA
tcctttcactccacaaccttgtca

SEQ ID NO: 14353 - DNA, 24 bp, Homo sapiens
  source 1..24: mol_type = unassigned DNA
tgacaaggttgtggagtgaaagga

SEQ ID NO: 14354 - RNA, 47 nt, Homo sapiens
  source 1..47: mol_type = unassigned RNA
tatttggttatataaattatgatacactattaaaaattcatcatgat

SEQ ID NO: 14355 - DNA, 47 bp, Homo sapiens
  source 1..47: mol_type = unassigned DNA
tatttggttatataaattatgatacactattaaaaattcatcatgat

SEQ ID NO: 14356 - DNA, 47 bp, Homo sapiens
  source 1..47: mol_type = unassigned DNA
atcatgatgaatttttaatagtgtatcataatttatataaccaaata

SEQ ID NO: 14357 - RNA, 55 nt, Homo sapiens
  source 1..55: mol_type = unassigned RNA
agatattgtcgaactctagacccttatccttctgccgtattagttggtatggtgc

SEQ ID NO: 14358 - DNA, 55 bp, Homo sapiens
  source 1..55: mol_type = unassigned DNA
agatattgtcgaactctagacccttatccttctgccgtattagttggtatggtgc

SEQ ID NO: 14359 - DNA, 55 bp, Homo sapiens
  source 1..55: mol_type = unassigned DNA
gcaccataccaactaatacggcagaaggataagggtctagagttcgacaatatct

SEQ ID NO: 14360 - RNA, 88 nt, Homo sapiens
  source 1..88: mol_type = unassigned RNA
cttccagaatctaatagtggcttatgtgtgagaagcatatttctctaaacgctctttttttatcctgttgtatggcgtgttctaggtg

SEQ ID NO: 14361 - DNA, 88 bp, Homo sapiens
  source 1..88: mol_type = unassigned DNA
cttccagaatctaatagtggcttatgtgtgagaagcatatttctctaaacgctctttttttatcctgttgtatggcgtgttctaggtg

SEQ ID NO: 14362 - DNA, 88 bp, Homo sapiens
  source 1..88: mol_type = unassigned DNA
cacctagaacacgccatacaacaggataaaaaaagagcgtttagagaaatatgcttctcacacataagccactattagattctggaag

SEQ ID NO: 14363 - RNA, 81 nt, Homo sapiens
  source 1..81: mol_type = unassigned RNA
atggtagggtgagatgctgctttttgggctgcatggctatctttttttatatcgctgttttttagaggaaagaaccaattt

SEQ ID NO: 14364 - DNA, 81 bp, Homo sapiens
  source 1..81: mol_type = unassigned DNA
atggtagggtgagatgctgctttttgggctgcatggctatctttttttatatcgctgttttttagaggaaagaaccaattt

SEQ ID NO: 14365 - DNA, 81 bp, Homo sapiens
  source 1..81: mol_type = unassigned DNA
aaattggttctttcctctaaaaaacagcgatataaaaaaagatagccatgcagcccaaaaagcagcatctcaccctaccat

SEQ ID NO: 14366 - RNA, 24 nt, Homo sapiens
  source 1..24: mol_type = unassigned RNA
gtatttgttatctagatgtatctt

SEQ ID NO: 14367 - DNA, 24 bp, Homo sapiens
  source 1..24: mol_type = unassigned DNA
gtatttgttatctagatgtatctt

SEQ ID NO: 14368 - DNA, 24 bp, Homo sapiens
  source 1..24: mol_type = unassigned DNA
aagatacatctagataacaaatac

SEQ ID NO: 14369 - RNA, 22 nt, Homo sapiens
  source 1..22: mol_type = unassigned RNA
tagtttaacaaagtgatgttaa

SEQ ID NO: 14370 - DNA, 22 bp, Homo sapiens
  source 1..22: mol_type = unassigned DNA
tagtttaacaaagtgatgttaa

SEQ ID NO: 14371 - DNA, 22 bp, Homo sapiens
  source 1..22: mol_type = unassigned DNA
ttaacatcactttgttaaacta

SEQ ID NO: 14372 - RNA, 45 nt, Homo sapiens
  source 1..45: mol_type = unassigned RNA
atatttgttaaatagatgtatgaatagatctatgaatgcatggat

SEQ ID NO: 14373 - DNA, 45 bp, Homo sapiens
  source 1..45: mol_type = unassigned DNA
atatttgttaaatagatgtatgaatagatctatgaatgcatggat

SEQ ID NO: 14374 - DNA, 45 bp, Homo sapiens
  source 1..45: mol_type = unassigned DNA
atccatgcattcatagatctattcatacatctatttaacaaatat

SEQ ID NO: 14375 - RNA, 30 nt, Homo sapiens
  source 1..30: mol_type = unassigned RNA
actttggttctatagctgaattaatttgtt

SEQ ID NO: 14376 - DNA, 30 bp, Homo sapiens
  source 1..30: mol_type = unassigned DNA
actttggttctatagctgaattaatttgtt

SEQ ID NO: 14377 - DNA, 30 bp, Homo sapiens
  source 1..30: mol_type = unassigned DNA
aacaaattaattcagctatagaaccaaagt

SEQ ID NO: 14378 - RNA, 45 nt, Homo sapiens
  source 1..45: mol_type = unassigned RNA
agtaagtccctgtggagcactggactcccctccccagcggccacc

SEQ ID NO: 14379 - DNA, 45 bp, Homo sapiens
  source 1..45: mol_type = unassigned DNA
agtaagtccctgtggagcactggactcccctccccagcggccacc

SEQ ID NO: 14380 - DNA, 45 bp, Homo sapiens
  source 1..45: mol_type = unassigned DNA
ggtggccgctggggaggggagtccagtgctccacagggacttact

SEQ ID NO: 14381 - RNA, 97 nt, Homo sapiens
  source 1..97: mol_type = unassigned RNA
aacactattgtcttttgttttcttgctgtatcaggtgtgagccaaaccagtatcgcgggggtgaggaatgaatctccttaccctcccttccccaagt

SEQ ID NO: 14382 - DNA, 97 bp, Homo sapiens
  source 1..97: mol_type = unassigned DNA
aacactattgtcttttgttttcttgctgtatcaggtgtgagccaaaccagtatcgcgggggtgaggaatgaatctccttaccctcccttccccaagt

SEQ ID NO: 14383 - DNA, 97 bp, Homo sapiens
  source 1..97: mol_type = unassigned DNA
acttggggaagggagggtaaggagattcattcctcacccccgcgatactggtttggctcacacctgatacagcaagaaaacaaaagacaatagtgtt

SEQ ID NO: 14384 - RNA, 23 nt, Homo sapiens
  source 1..23: mol_type = unassigned RNA
tgtaaccctcatcttctggtagt

SEQ ID NO: 14385 - DNA, 23 bp, Homo sapiens
  source 1..23: mol_type = unassigned DNA
tgtaaccctcatcttctggtagt

SEQ ID NO: 14386 - DNA, 23 bp, Homo sapiens
  source 1..23: mol_type = unassigned DNA
actaccagaagatgagggttaca

SEQ ID NO: 14387 - RNA, 27 nt, Homo sapiens
  source 1..27: mol_type = unassigned RNA
cctccttgcccgcctccccaccaagcg

SEQ ID NO: 14388 - DNA, 27 bp, Homo sapiens
  source 1..27: mol_type = unassigned DNA
cctccttgcccgcctccccaccaagcg

SEQ ID NO: 14389 - DNA, 27 bp, Homo sapiens
  source 1..27: mol_type = unassigned DNA
cgcttggtggggaggcgggcaaggagg

SEQ ID NO: 14390 - RNA, 34 nt, Homo sapiens
  source 1..34: mol_type = unassigned RNA
cactgatcagctgactccggaccaggagcgctca

SEQ ID NO: 14391 - DNA, 34 bp, Homo sapiens
  source 1..34: mol_type = unassigned DNA
cactgatcagctgactccggaccaggagcgctca

SEQ ID NO: 14392 - DNA, 34 bp, Homo sapiens
  source 1..34: mol_type = unassigned DNA
tgagcgctcctggtccggagtcagctgatcagtg

SEQ ID NO: 14393 - RNA, 33 nt, Homo sapiens
  source 1..33: mol_type = unassigned RNA
ctcagatgcatggtggacttaggaccttgctgg

SEQ ID NO: 14394 - DNA, 33 bp, Homo sapiens
  source 1..33: mol_type = unassigned DNA
ctcagatgcatggtggacttaggaccttgctgg

SEQ ID NO: 14395 - DNA, 33 bp, Homo sapiens
  source 1..33: mol_type = unassigned DNA
ccagcaaggtcctaagtccaccatgcatctgag

SEQ ID NO: 14396 - RNA, 31 nt, Homo sapiens
  source 1..31: mol_type = unassigned RNA
ctgcagctgggctgtgtggttgacttatggg

SEQ ID NO: 14397 - DNA, 31 bp, Homo sapiens
  source 1..31: mol_type = unassigned DNA
ctgcagctgggctgtgtggttgacttatggg

SEQ ID NO: 14398 - DNA, 31 bp, Homo sapiens
  source 1..31: mol_type = unassigned DNA
cccataagtcaaccacacagcccagctgcag

SEQ ID NO: 14399 - RNA, 25 nt, Homo sapiens
  source 1..25: mol_type = unassigned RNA
cctgatcccacctccccacctggag

SEQ ID NO: 14400 - DNA, 25 bp, Homo sapiens
  source 1..25: mol_type = unassigned DNA
cctgatcccacctccccacctggag

SEQ ID NO: 14401 - DNA, 25 bp, Homo sapiens
  source 1..25: mol_type = unassigned DNA
ctccaggtggggaggtgggatcagg

SEQ ID NO: 14402 - RNA, 71 nt, Homo sapiens
  source 1..71: mol_type = unassigned RNA
aatgttctttctgacatgcttcaagttgctgcacatgctcggtgccctcctcctcaccatctcctcttccc

SEQ ID NO: 14403 - DNA, 71 bp, Homo sapiens
  source 1..71: mol_type = unassigned DNA
aatgttctttctgacatgcttcaagttgctgcacatgctcggtgccctcctcctcaccatctcctcttccc

SEQ ID NO: 14404 - DNA, 71 bp, Homo sapiens
  source 1..71: mol_type = unassigned DNA
gggaagaggagatggtgaggaggagggcaccgagcatgtgcagcaacttgaagcatgtcagaaagaacatt

SEQ ID NO: 14405 - RNA, 43 nt, Homo sapiens
  source 1..43: mol_type = unassigned RNA
tattccactggaatacattcattccaggtcagtcagagttcta

SEQ ID NO: 14406 - DNA, 43 bp, Homo sapiens
  source 1..43: mol_type = unassigned DNA
tattccactggaatacattcattccaggtcagtcagagttcta

SEQ ID NO: 14407 - DNA, 43 bp, Homo sapiens
  source 1..43: mol_type = unassigned DNA
tagaactctgactgacctggaatgaatgtattccagtggaata

SEQ ID NO: 14408 - RNA, 28 nt, Homo sapiens
  source 1..28: mol_type = unassigned RNA
ggacctggtcccacagctccacctgctt

SEQ ID NO: 14409 - DNA, 28 bp, Homo sapiens
  source 1..28: mol_type = unassigned DNA
ggacctggtcccacagctccacctgctt

SEQ ID NO: 14410 - DNA, 28 bp, Homo sapiens
  source 1..28: mol_type = unassigned DNA
aagcaggtggagctgtgggaccaggtcc

SEQ ID NO: 14411 - RNA, 27 nt, Homo sapiens
  source 1..27: mol_type = unassigned RNA
ttcccctgaatgtattttctgagcttt

SEQ ID NO: 14412 - DNA, 27 bp, Homo sapiens
  source 1..27: mol_type = unassigned DNA
ttcccctgaatgtattttctgagcttt

SEQ ID NO: 14413 - DNA, 27 bp, Homo sapiens
  source 1..27: mol_type = unassigned DNA
aaagctcagaaaatacattcaggggaa

SEQ ID NO: 14414 - RNA, 158 nt, Homo sapiens
  source 1..158: mol_type = unassigned RNA
cctgccttttgccctgaccccacagcaccacctggtgtctcccgggacggcgcaagcgccgcgcttgcagatgctgggccccctccccgtcagccgaccctccttccccaagtgcctcccctgcctggtgttcctccttccttgatgcgcccctctgg

SEQ ID NO: 14415 - DNA, 158 bp, Homo sapiens
  source 1..158: mol_type = unassigned DNA
cctgccttttgccctgaccccacagcaccacctggtgtctcccgggacggcgcaagcgccgcgcttgcagatgctgggccccctccccgtcagccgaccctccttccccaagtgcctcccctgcctggtgttcctccttccttgatgcgcccctctgg

SEQ ID NO: 14416 - DNA, 158 bp, Homo sapiens
  source 1..158: mol_type = unassigned DNA
ccagaggggcgcatcaaggaaggaggaacaccaggcaggggaggcacttggggaaggagggtcggctgacggggagggggcccagcatctgcaagcgcggcgcttgcgccgtcccgggagacaccaggtggtgctgtggggtcagggcaaaaggcagg

SEQ ID NO: 14417 - RNA, 53 nt, Homo sapiens
  source 1..53: mol_type = unassigned RNA
cctgggaggtcaaggctgcagtgagtggtgatcatgcagtatggccgacagag

SEQ ID NO: 14418 - DNA, 53 bp, Homo sapiens
  source 1..53: mol_type = unassigned DNA
cctgggaggtcaaggctgcagtgagtggtgatcatgcagtatggccgacagag

SEQ ID NO: 14419 - DNA, 53 bp, Homo sapiens
  source 1..53: mol_type = unassigned DNA
ctctgtcggccatactgcatgatcaccactcactgcagccttgacctcccagg

SEQ ID NO: 14420 - RNA, 36 nt, Homo sapiens
  source 1..36: mol_type = unassigned RNA
gggcacggtgctgaggaacctgaaattggcgaggaa

SEQ ID NO: 14421 - DNA, 36 bp, Homo sapiens
  source 1..36: mol_type = unassigned DNA
gggcacggtgctgaggaacctgaaattggcgaggaa

SEQ ID NO: 14422 - DNA, 36 bp, Homo sapiens
  source 1..36: mol_type = unassigned DNA
ttcctcgccaatttcaggttcctcagcaccgtgccc

SEQ ID NO: 14423 - RNA, 37 nt, Homo sapiens
  source 1..37: mol_type = unassigned RNA
tagactttggagcattgctgaaggtattttctgggca

SEQ ID NO: 14424 - DNA, 37 bp, Homo sapiens
  source 1..37: mol_type = unassigned DNA
tagactttggagcattgctgaaggtattttctgggca

SEQ ID NO: 14425 - DNA, 37 bp, Homo sapiens
  source 1..37: mol_type = unassigned DNA
tgcccagaaaataccttcagcaatgctccaaagtcta

SEQ ID NO: 14426 - RNA, 49 nt, Homo sapiens
  source 1..49: mol_type = unassigned RNA
aaagtctcggtgtggtagagagaacgatgccccctcctccaccaaagac

SEQ ID NO: 14427 - DNA, 49 bp, Homo sapiens
  source 1..49: mol_type = unassigned DNA
aaagtctcggtgtggtagagagaacgatgccccctcctccaccaaagac

SEQ ID NO: 14428 - DNA, 49 bp, Homo sapiens
  source 1..49: mol_type = unassigned DNA
gtctttggtggaggagggggcatcgttctctctaccacaccgagacttt

SEQ ID NO: 14429 - RNA, 53 nt, Homo sapiens
  source 1..53: mol_type = unassigned RNA
agcgacaggccctggcccagatctcattgccccggatcatctgcgacaacaca

SEQ ID NO: 14430 - DNA, 53 bp, Homo sapiens
  source 1..53: mol_type = unassigned DNA
agcgacaggccctggcccagatctcattgccccggatcatctgcgacaacaca

SEQ ID NO: 14431 - DNA, 53 bp, Homo sapiens
  source 1..53: mol_type = unassigned DNA
tgtgttgtcgcagatgatccggggcaatgagatctgggccagggcctgtcgct

SEQ ID NO: 14432 - RNA, 44 nt, Homo sapiens
  source 1..44: mol_type = unassigned RNA
tggttctgcaggctgcacagaaactgtagctgcttctgcttctg

SEQ ID NO: 14433 - DNA, 44 bp, Homo sapiens
  source 1..44: mol_type = unassigned DNA
tggttctgcaggctgcacagaaactgtagctgcttctgcttctg

SEQ ID NO: 14434 - DNA, 44 bp, Homo sapiens
  source 1..44: mol_type = unassigned DNA
cagaagcagaagcagctacagtttctgtgcagcctgcagaacca

SEQ ID NO: 14435 - RNA, 77 nt, Homo sapiens
  source 1..77: mol_type = unassigned RNA
cataattatgactgatagcataccatataccagtcatcttatagctcacacgaggatgagaagtagaaaatttgtta

SEQ ID NO: 14436 - DNA, 77 bp, Homo sapiens
  source 1..77: mol_type = unassigned DNA
cataattatgactgatagcataccatataccagtcatcttatagctcacacgaggatgagaagtagaaaatttgtta

SEQ ID NO: 14437 - DNA, 77 bp, Homo sapiens
  source 1..77: mol_type = unassigned DNA
taacaaattttctacttctcatcctcgtgtgagctataagatgactggtatatggtatgctatcagtcataattatg

SEQ ID NO: 14438 - RNA, 35 nt, Homo sapiens
  source 1..35: mol_type = unassigned RNA
gcagagctggaccagtggtgccttggagggataag

SEQ ID NO: 14439 - DNA, 35 bp, Homo sapiens
  source 1..35: mol_type = unassigned DNA
gcagagctggaccagtggtgccttggagggataag

SEQ ID NO: 14440 - DNA, 35 bp, Homo sapiens
  source 1..35: mol_type = unassigned DNA
cttatccctccaaggcaccactggtccagctctgc

SEQ ID NO: 14441 - RNA, 113 nt, Homo sapiens
  source 1..113: mol_type = unassigned RNA
atccccatgtagaatgtataatagtgaagggagagatgcggtctgaaaaaaatagttatctgggaacctagaaggaaggagccactcgagactgagaaatcctgaaaggcttt

SEQ ID NO: 14442 - DNA, 113 bp, Homo sapiens
  source 1..113: mol_type = unassigned DNA
atccccatgtagaatgtataatagtgaagggagagatgcggtctgaaaaaaatagttatctgggaacctagaaggaaggagccactcgagactgagaaatcctgaaaggcttt

SEQ ID NO: 14443 - DNA, 113 bp, Homo sapiens
  source 1..113: mol_type = unassigned DNA
aaagcctttcaggatttctcagtctcgagtggctccttccttctaggttcccagataactatttttttcagaccgcatctctcccttcactattatacattctacatggggat

SEQ ID NO: 14444 - RNA, 118 nt, Homo sapiens
  source 1..118: mol_type = unassigned RNA
cattttttgttgacctttttaaacaactagctttgttggtttcattgatttttctctatttttaaattttcgtttcattaatttctgctctcatcttttattctttctgcttgcttta

SEQ ID NO: 14445 - DNA, 118 bp, Homo sapiens
  source 1..118: mol_type = unassigned DNA
cattttttgttgacctttttaaacaactagctttgttggtttcattgatttttctctatttttaaattttcgtttcattaatttctgctctcatcttttattctttctgcttgcttta

SEQ ID NO: 14446 - DNA, 118 bp, Homo sapiens
  source 1..118: mol_type = unassigned DNA
taaagcaagcagaaagaataaaagatgagagcagaaattaatgaaacgaaaatttaaaaatagagaaaaatcaatgaaaccaacaaagctagttgtttaaaaaggtcaacaaaaaatg

SEQ ID NO: 14447 - RNA, 52 nt, Homo sapiens
  source 1..52: mol_type = unassigned RNA
aagtgctgggattatagacgtgagccactgtgcccggcctgaggagctgagt

SEQ ID NO: 14448 - DNA, 52 bp, Homo sapiens
  source 1..52: mol_type = unassigned DNA
aagtgctgggattatagacgtgagccactgtgcccggcctgaggagctgagt

SEQ ID NO: 14449 - DNA, 52 bp, Homo sapiens
  source 1..52: mol_type = unassigned DNA
actcagctcctcaggccgggcacagtggctcacgtctataatcccagcactt

SEQ ID NO: 14450 - RNA, 60 nt, Homo sapiens
  source 1..60: mol_type = unassigned RNA
caaatttttagctgctgctttgggaaatcttgtgtcagatctagctggacttgggtaggt

SEQ ID NO: 14451 - DNA, 60 bp, Homo sapiens
  source 1..60: mol_type = unassigned DNA
caaatttttagctgctgctttgggaaatcttgtgtcagatctagctggacttgggtaggt

SEQ ID NO: 14452 - DNA, 60 bp, Homo sapiens
  source 1..60: mol_type = unassigned DNA
acctacccaagtccagctagatctgacacaagatttcccaaagcagcagctaaaaatttg

SEQ ID NO: 14453 - RNA, 33 nt, Homo sapiens
  source 1..33: mol_type = unassigned RNA
atgctgcagactctgaaggagctggaggcccac

SEQ ID NO: 14454 - DNA, 33 bp, Homo sapiens
  source 1..33: mol_type = unassigned DNA
atgctgcagactctgaaggagctggaggcccac

SEQ ID NO: 14455 - DNA, 33 bp, Homo sapiens
  source 1..33: mol_type = unassigned DNA
gtgggcctccagctccttcagagtctgcagcat

SEQ ID NO: 14456 - RNA, 31 nt, Homo sapiens
  source 1..31: mol_type = unassigned RNA
gtgacaaggtcgtccctgggaacagggttac

SEQ ID NO: 14457 - DNA, 31 bp, Homo sapiens
  source 1..31: mol_type = unassigned DNA
gtgacaaggtcgtccctgggaacagggttac

SEQ ID NO: 14458 - DNA, 31 bp, Homo sapiens
  source 1..31: mol_type = unassigned DNA
gtaaccctgttcccagggacgaccttgtcac

SEQ ID NO: 14459 - RNA, 31 nt, Homo sapiens
  source 1..31: mol_type = unassigned RNA
ggactcaggtgggccctctgaacttgcctta

SEQ ID NO: 14460 - DNA, 31 bp, Homo sapiens
  source 1..31: mol_type = unassigned DNA
ggactcaggtgggccctctgaacttgcctta

SEQ ID NO: 14461 - DNA, 31 bp, Homo sapiens
  source 1..31: mol_type = unassigned DNA
taaggcaagttcagagggcccacctgagtcc

SEQ ID NO: 14462 - RNA, 27 nt, Homo sapiens
  source 1..27: mol_type = unassigned RNA
gtgtgggttttctactttatgggtaat

SEQ ID NO: 14463 - DNA, 27 bp, Homo sapiens
  source 1..27: mol_type = unassigned DNA
gtgtgggttttctactttatgggtaat

SEQ ID NO: 14464 - DNA, 27 bp, Homo sapiens
  source 1..27: mol_type = unassigned DNA
attacccataaagtagaaaacccacac

SEQ ID NO: 14465 - RNA, 31 nt, Homo sapiens
  source 1..31: mol_type = unassigned RNA
agccagcaggagctctgactaaggttgacat

SEQ ID NO: 14466 - DNA, 31 bp, Homo sapiens
  source 1..31: mol_type = unassigned DNA
agccagcaggagctctgactaaggttgacat

SEQ ID NO: 14467 - DNA, 31 bp, Homo sapiens
  source 1..31: mol_type = unassigned DNA
atgtcaaccttagtcagagctcctgctggct

SEQ ID NO: 14468 - RNA, 53 nt, Homo sapiens
  source 1..53: mol_type = unassigned RNA
cagacctgttatcctaaactagggtttttaatgaccacaacaagcaagcatgc

SEQ ID NO: 14469 - DNA, 53 bp, Homo sapiens
  source 1..53: mol_type = unassigned DNA
cagacctgttatcctaaactagggtttttaatgaccacaacaagcaagcatgc

SEQ ID NO: 14470 - DNA, 53 bp, Homo sapiens
  source 1..53: mol_type = unassigned DNA
gcatgcttgcttgttgtggtcattaaaaaccctagtttaggataacaggtctg

SEQ ID NO: 14471 - RNA, 56 nt, Homo sapiens
  source 1..56: mol_type = unassigned RNA
ctctgctcctccactgttccctctggcttcccatagtgtggtctgggaggattccc

SEQ ID NO: 14472 - DNA, 56 bp, Homo sapiens
  source 1..56: mol_type = unassigned DNA
ctctgctcctccactgttccctctggcttcccatagtgtggtctgggaggattccc

SEQ ID NO: 14473 - DNA, 56 bp, Homo sapiens
  source 1..56: mol_type = unassigned DNA
gggaatcctcccagaccacactatgggaagccagagggaacagtggaggagcagag

SEQ ID NO: 14474 - RNA, 85 nt, Homo sapiens
  source 1..85: mol_type = unassigned RNA
tccattaccatggagaaggctgaggctcacttagaggggtaagccaaaagagccaccatctctgccccctctgctgatgcccctt

SEQ ID NO: 14475 - DNA, 85 bp, Homo sapiens
  source 1..85: mol_type = unassigned DNA
tccattaccatggagaaggctgaggctcacttagaggggtaagccaaaagagccaccatctctgccccctctgctgatgcccctt

SEQ ID NO: 14476 - DNA, 85 bp, Homo sapiens
  source 1..85: mol_type = unassigned DNA
aaggggcatcagcagagggggcagagatggtggctcttttggcttacccctctaagtgagcctcagccttctccatggtaatgga

SEQ ID NO: 14477 - RNA, 139 nt, Homo sapiens
  source 1..139: mol_type = unassigned RNA
gatgaatgtttagtaaacagactgctttgtgataacggattgtgccgaaacacgccaggaagttacagctgtacgtgcccaccagggtatgtgttcaggactgagacagagacctgtgaaggtaagagctgtcttcatc

SEQ ID NO: 14478 - DNA, 139 bp, Homo sapiens
  source 1..139: mol_type = unassigned DNA
gatgaatgtttagtaaacagactgctttgtgataacggattgtgccgaaacacgccaggaagttacagctgtacgtgcccaccagggtatgtgttcaggactgagacagagacctgtgaaggtaagagctgtcttcatc

SEQ ID NO: 14479 - DNA, 139 bp, Homo sapiens
  source 1..139: mol_type = unassigned DNA
gatgaagacagctcttaccttcacaggtctctgtctcagtcctgaacacataccctggtgggcacgtacagctgtaacttcctggcgtgtttcggcacaatccgttatcacaaagcagtctgtttactaaacattcatc

SEQ ID NO: 14480 - RNA, 127 nt, Homo sapiens
  source 1..127: mol_type = unassigned RNA
actcttcaaatatgttttgataattaggtttgaaatcatgggagaagaagaaatcgcttttaaaatgattcgtaccaacgtttctcatgtggttggccagttggatgacataagaaaaaaccctagg

SEQ ID NO: 14481 - DNA, 127 bp, Homo sapiens
  source 1..127: mol_type = unassigned DNA
actcttcaaatatgttttgataattaggtttgaaatcatgggagaagaagaaatcgcttttaaaatgattcgtaccaacgtttctcatgtggttggccagttggatgacataagaaaaaaccctagg

SEQ ID NO: 14482 - DNA, 127 bp, Homo sapiens
  source 1..127: mol_type = unassigned DNA
cctagggttttttcttatgtcatccaactggccaaccacatgagaaacgttggtacgaatcattttaaaagcgatttcttcttctcccatgatttcaaacctaattatcaaaacatatttgaagagt

SEQ ID NO: 14483 - RNA, 106 nt, Homo sapiens
  source 1..106: mol_type = unassigned RNA
gaagaaaaaactccagacgcaccgccttcagagctgtaacactcactgggaaggtctgtggtttcagtcctgagcccgtgagaccacagaccgaccagtgggaaga

SEQ ID NO: 14484 - DNA, 106 bp, Homo sapiens
  source 1..106: mol_type = unassigned DNA
gaagaaaaaactccagacgcaccgccttcagagctgtaacactcactgggaaggtctgtggtttcagtcctgagcccgtgagaccacagaccgaccagtgggaaga

SEQ ID NO: 14485 - DNA, 106 bp, Homo sapiens
  source 1..106: mol_type = unassigned DNA
tcttcccactggtcggtctgtggtctcacgggctcaggactgaaaccacagaccttcccagtgagtgttacagctctgaaggcggtgcgtctggagttttttcttc

SEQ ID NO: 14486 - RNA, 44 nt, Homo sapiens
  source 1..44: mol_type = unassigned RNA
gcacaaggtgggccagatcgtgtttgagttcgtgggcgagcctg

SEQ ID NO: 14487 - DNA, 44 bp, Homo sapiens
  source 1..44: mol_type = unassigned DNA
gcacaaggtgggccagatcgtgtttgagttcgtgggcgagcctg

SEQ ID NO: 14488 - DNA, 44 bp, Homo sapiens
  source 1..44: mol_type = unassigned DNA
caggctcgcccacgaactcaaacacgatctggcccaccttgtgc

SEQ ID NO: 14489 - RNA, 75 nt, Homo sapiens
  source 1..75: mol_type = unassigned RNA
aatcacaggactatagaatgtttcccctctccccacacctaccgtgagattactgaaggcctatttacggcaagt

SEQ ID NO: 14490 - DNA, 75 bp, Homo sapiens
  source 1..75: mol_type = unassigned DNA
aatcacaggactatagaatgtttcccctctccccacacctaccgtgagattactgaaggcctatttacggcaagt

SEQ ID NO: 14491 - DNA, 75 bp, Homo sapiens
  source 1..75: mol_type = unassigned DNA
acttgccgtaaataggccttcagtaatctcacggtaggtgtggggagaggggaaacattctatagtcctgtgatt

SEQ ID NO: 14492 - RNA, 104 nt, Homo sapiens
  source 1..104: mol_type = unassigned RNA
gctttgttctagagtcctacgaaaacacagccattagtttctccatctgttccatctccaaattgctccaggaggcatgcatgtgtctggttcttgatccaacc

SEQ ID NO: 14493 - DNA, 104 bp, Homo sapiens
  source 1..104: mol_type = unassigned DNA
gctttgttctagagtcctacgaaaacacagccattagtttctccatctgttccatctccaaattgctccaggaggcatgcatgtgtctggttcttgatccaacc

SEQ ID NO: 14494 - DNA, 104 bp, Homo sapiens
  source 1..104: mol_type = unassigned DNA
ggttggatcaagaaccagacacatgcatgcctcctggagcaatttggagatggaacagatggagaaactaatggctgtgttttcgtaggactctagaacaaagc

SEQ ID NO: 14495 - RNA, 32 nt, Homo sapiens
  source 1..32: mol_type = unassigned RNA
cagctgtgtcctttccgggcctggaggcttgg

SEQ ID NO: 14496 - DNA, 32 bp, Homo sapiens
  source 1..32: mol_type = unassigned DNA
cagctgtgtcctttccgggcctggaggcttgg

SEQ ID NO: 14497 - DNA, 32 bp, Homo sapiens
  source 1..32: mol_type = unassigned DNA
ccaagcctccaggcccggaaaggacacagctg

SEQ ID NO: 14498 - RNA, 29 nt, Homo sapiens
  source 1..29: mol_type = unassigned RNA
ccaggagaaaccctgaacggagagctcgt

SEQ ID NO: 14499 - DNA, 29 bp, Homo sapiens
  source 1..29: mol_type = unassigned DNA
ccaggagaaaccctgaacggagagctcgt

SEQ ID NO: 14500 - DNA, 29 bp, Homo sapiens
  source 1..29: mol_type = unassigned DNA
acgagctctccgttcagggtttctcctgg

SEQ ID NO: 14501 - RNA, 30 nt, Homo sapiens
  source 1..30: mol_type = unassigned RNA
tgtttcttatcacagtcgtcggttccacat

SEQ ID NO: 14502 - DNA, 30 bp, Homo sapiens
  source 1..30: mol_type = unassigned DNA
tgtttcttatcacagtcgtcggttccacat

SEQ ID NO: 14503 - DNA, 30 bp, Homo sapiens
  source 1..30: mol_type = unassigned DNA
atgtggaaccgacgactgtgataagaaaca

SEQ ID NO: 14504 - RNA, 92 nt, Homo sapiens
  source 1..92: mol_type = unassigned RNA
gaaacttgaagatttctttaaaaacatggttaaatcagcagatggagtaattatttccggagtaaaggatgtagataatttctttgagcatg

SEQ ID NO: 14505 - DNA, 92 bp, Homo sapiens
  source 1..92: mol_type = unassigned DNA
gaaacttgaagatttctttaaaaacatggttaaatcagcagatggagtaattatttccggagtaaaggatgtagataatttctttgagcatg

SEQ ID NO: 14506 - DNA, 92 bp, Homo sapiens
  source 1..92: mol_type = unassigned DNA
catgctcaaagaaattatctacatcctttactccggaaataattactccatctgctgatttaaccatgtttttaaagaaatcttcaagtttc

SEQ ID NO: 14507 - RNA, 134 nt, Homo sapiens
  source 1..134: mol_type = unassigned RNA
ccaaggctatggagctctcagaggcaaggctgaggataaggagtggatgcccgtcaccaagctgggccgtctggtcaaggacatgaagatcaagtccctggaggaggtctatctcttctccctgcccctcaagg

SEQ ID NO: 14508 - DNA, 134 bp, Homo sapiens
  source 1..134: mol_type = unassigned DNA
ccaaggctatggagctctcagaggcaaggctgaggataaggagtggatgcccgtcaccaagctgggccgtctggtcaaggacatgaagatcaagtccctggaggaggtctatctcttctccctgcccctcaagg

SEQ ID NO: 14509 - DNA, 134 bp, Homo sapiens
  source 1..134: mol_type = unassigned DNA
ccttgaggggcagggagaagagatagacctcctccagggacttgatcttcatgtccttgaccagacggcccagcttggtgacgggcatccactccttatcctcagccttgcctctgagagctccatagccttgg

SEQ ID NO: 14510 - RNA, 33 nt, Homo sapiens
  source 1..33: mol_type = unassigned RNA
agttgttttgtggccatgtgtaggcgagtatgt

SEQ ID NO: 14511 - DNA, 33 bp, Homo sapiens
  source 1..33: mol_type = unassigned DNA
agttgttttgtggccatgtgtaggcgagtatgt

SEQ ID NO: 14512 - DNA, 33 bp, Homo sapiens
  source 1..33: mol_type = unassigned DNA
acatactcgcctacacatggccacaaaacaact

SEQ ID NO: 14513 - RNA, 31 nt, Homo sapiens
  source 1..31: mol_type = unassigned RNA
gcagctgagaaaatgagtgactagacgttca

SEQ ID NO: 14514 - DNA, 31 bp, Homo sapiens
  source 1..31: mol_type = unassigned DNA
gcagctgagaaaatgagtgactagacgttca

SEQ ID NO: 14515 - DNA, 31 bp, Homo sapiens
  source 1..31: mol_type = unassigned DNA
tgaacgtctagtcactcattttctcagctgc

SEQ ID NO: 14516 - RNA, 26 nt, Homo sapiens
  source 1..26: mol_type = unassigned RNA
acttggctcgcatgaggtcctggtct

SEQ ID NO: 14517 - DNA, 26 bp, Homo sapiens
  source 1..26: mol_type = unassigned DNA
acttggctcgcatgaggtcctggtct

SEQ ID NO: 14518 - DNA, 26 bp, Homo sapiens
  source 1..26: mol_type = unassigned DNA
agaccaggacctcatgcgagccaagt

SEQ ID NO: 14519 - RNA, 29 nt, Homo sapiens
  source 1..29: mol_type = unassigned RNA
gtgctgtcgcgggaagtgcagaggcaaat

SEQ ID NO: 14520 - DNA, 29 bp, Homo sapiens
  source 1..29: mol_type = unassigned DNA
gtgctgtcgcgggaagtgcagaggcaaat

SEQ ID NO: 14521 - DNA, 29 bp, Homo sapiens
  source 1..29: mol_type = unassigned DNA
atttgcctctgcacttcccgcgacagcac

SEQ ID NO: 14522 - RNA, 32 nt, Homo sapiens
  source 1..32: mol_type = unassigned RNA
gctcctgaaggcctgaggagctcctgagggac

SEQ ID NO: 14523 - DNA, 32 bp, Homo sapiens
  source 1..32: mol_type = unassigned DNA
gctcctgaaggcctgaggagctcctgagggac

SEQ ID NO: 14524 - DNA, 32 bp, Homo sapiens
  source 1..32: mol_type = unassigned DNA
gtccctcaggagctcctcaggccttcaggagc

SEQ ID NO: 14525 - RNA, 78 nt, Homo sapiens
  source 1..78: mol_type = unassigned RNA
gcgtgagccaccgtgcctggtcatccaaccatgagcttttgatagactactctgagccaggcattatgcacagcagaa

SEQ ID NO: 14526 - DNA, 78 bp, Homo sapiens
  source 1..78: mol_type = unassigned DNA
gcgtgagccaccgtgcctggtcatccaaccatgagcttttgatagactactctgagccaggcattatgcacagcagaa

SEQ ID NO: 14527 - DNA, 78 bp, Homo sapiens
  source 1..78: mol_type = unassigned DNA
ttctgctgtgcataatgcctggctcagagtagtctatcaaaagctcatggttggatgaccaggcacggtggctcacgc

SEQ ID NO: 14528 - RNA, 41 nt, Homo sapiens
  source 1..41: mol_type = unassigned RNA
atttcaaagggctcagtggtctagtcagacatctggtgaat

SEQ ID NO: 14529 - DNA, 41 bp, Homo sapiens
  source 1..41: mol_type = unassigned DNA
atttcaaagggctcagtggtctagtcagacatctggtgaat

SEQ ID NO: 14530 - DNA, 41 bp, Homo sapiens
  source 1..41: mol_type = unassigned DNA
attcaccagatgtctgactagaccactgagccctttgaaat

SEQ ID NO: 14531 - RNA, 32 nt, Homo sapiens
  source 1..32: mol_type = unassigned RNA
agaagggccttactccttcacagatcggtgag

SEQ ID NO: 14532 - DNA, 32 bp, Homo sapiens
  source 1..32: mol_type = unassigned DNA
agaagggccttactccttcacagatcggtgag

SEQ ID NO: 14533 - DNA, 32 bp, Homo sapiens
  source 1..32: mol_type = unassigned DNA
ctcaccgatctgtgaaggagtaaggcccttct

SEQ ID NO: 14534 - RNA, 38 nt, Homo sapiens
  source 1..38: mol_type = unassigned RNA
aataaatctggtcaatctggtcagacaccctagtgagg

SEQ ID NO: 14535 - DNA, 38 bp, Homo sapiens
  source 1..38: mol_type = unassigned DNA
aataaatctggtcaatctggtcagacaccctagtgagg

SEQ ID NO: 14536 - DNA, 38 bp, Homo sapiens
  source 1..38: mol_type = unassigned DNA
cctcactagggtgtctgaccagattgaccagatttatt

SEQ ID NO: 14537 - RNA, 30 nt, Homo sapiens
  source 1..30: mol_type = unassigned RNA
caagacctactgtatgaccttgacataaat

SEQ ID NO: 14538 - DNA, 30 bp, Homo sapiens
  source 1..30: mol_type = unassigned DNA
caagacctactgtatgaccttgacataaat

SEQ ID NO: 14539 - DNA, 30 bp, Homo sapiens
  source 1..30: mol_type = unassigned DNA
atttatgtcaaggtcatacagtaggtcttg

SEQ ID NO: 14540 - RNA, 48 nt, Homo sapiens
  source 1..48: mol_type = unassigned RNA
tgcgtgaaatatgtcttggcctcacttcctgtcctctgagctgcctgc

SEQ ID NO: 14541 - DNA, 48 bp, Homo sapiens
  source 1..48: mol_type = unassigned DNA
tgcgtgaaatatgtcttggcctcacttcctgtcctctgagctgcctgc

SEQ ID NO: 14542 - DNA, 48 bp, Homo sapiens
  source 1..48: mol_type = unassigned DNA
gcaggcagctcagaggacaggaagtgaggccaagacatatttcacgca

SEQ ID NO: 14543 - RNA, 31 nt, Homo sapiens
  source 1..31: mol_type = unassigned RNA
gggaagagccaggtcctgtttgctgtggtgt

SEQ ID NO: 14544 - DNA, 31 bp, Homo sapiens
  source 1..31: mol_type = unassigned DNA
gggaagagccaggtcctgtttgctgtggtgt

SEQ ID NO: 14545 - DNA, 31 bp, Homo sapiens
  source 1..31: mol_type = unassigned DNA
acaccacagcaaacaggacctggctcttccc

SEQ ID NO: 14546 - RNA, 25 nt, Homo sapiens
  source 1..25: mol_type = unassigned RNA
tgaagggtttcctacattagggagg

SEQ ID NO: 14547 - DNA, 25 bp, Homo sapiens
  source 1..25: mol_type = unassigned DNA
tgaagggtttcctacattagggagg

SEQ ID NO: 14548 - DNA, 25 bp, Homo sapiens
  source 1..25: mol_type = unassigned DNA
cctccctaatgtaggaaacccttca

SEQ ID NO: 14549 - RNA, 31 nt, Homo sapiens
  source 1..31: mol_type = unassigned RNA
ggacatgaagatcaagtccctggaggagatc

SEQ ID NO: 14550 - DNA, 31 bp, Homo sapiens
  source 1..31: mol_type = unassigned DNA
ggacatgaagatcaagtccctggaggagatc

SEQ ID NO: 14551 - DNA, 31 bp, Homo sapiens
  source 1..31: mol_type = unassigned DNA
gatctcctccagggacttgatcttcatgtcc

SEQ ID NO: 14552 - RNA, 52 nt, Homo sapiens
  source 1..52: mol_type = unassigned RNA
taggtcaataccatctggtcaagcaagctgcaatgcagaggatatatgtggg

SEQ ID NO: 14553 - DNA, 52 bp, Homo sapiens
  source 1..52: mol_type = unassigned DNA
taggtcaataccatctggtcaagcaagctgcaatgcagaggatatatgtggg

SEQ ID NO: 14554 - DNA, 52 bp, Homo sapiens
  source 1..52: mol_type = unassigned DNA
cccacatatatcctctgcattgcagcttgcttgaccagatggtattgaccta

SEQ ID NO: 14555 - RNA, 75 nt, Homo sapiens
  source 1..75: mol_type = unassigned RNA
agctgggccgctttgtcaaggacatgaagatcaagtccctggaggagatctatgtcttctccctgcccattaagc

SEQ ID NO: 14556 - DNA, 75 bp, Homo sapiens
  source 1..75: mol_type = unassigned DNA
agctgggccgctttgtcaaggacatgaagatcaagtccctggaggagatctatgtcttctccctgcccattaagc

SEQ ID NO: 14557 - DNA, 75 bp, Homo sapiens
  source 1..75: mol_type = unassigned DNA
gcttaatgggcagggagaagacatagatctcctccagggacttgatcttcatgtccttgacaaagcggcccagct

SEQ ID NO: 14558 - RNA, 30 nt, Homo sapiens
  source 1..30: mol_type = unassigned RNA
accatgccgcagcatcgtcaggaccctcca

SEQ ID NO: 14559 - DNA, 30 bp, Homo sapiens
  source 1..30: mol_type = unassigned DNA
accatgccgcagcatcgtcaggaccctcca

SEQ ID NO: 14560 - DNA, 30 bp, Homo sapiens
  source 1..30: mol_type = unassigned DNA
tggagggtcctgacgatgctgcggcatggt

SEQ ID NO: 14561 - RNA, 31 nt, Homo sapiens
  source 1..31: mol_type = unassigned RNA
ctgtctggaggaatggaccgactctgtttaa

SEQ ID NO: 14562 - DNA, 31 bp, Homo sapiens
  source 1..31: mol_type = unassigned DNA
ctgtctggaggaatggaccgactctgtttaa

SEQ ID NO: 14563 - DNA, 31 bp, Homo sapiens
  source 1..31: mol_type = unassigned DNA
ttaaacagagtcggtccattcctccagacag

SEQ ID NO: 14564 - RNA, 37 nt, Homo sapiens
  source 1..37: mol_type = unassigned RNA
attcctgaagggaattttctgagctggcaggtccttt

SEQ ID NO: 14565 - DNA, 37 bp, Homo sapiens
  source 1..37: mol_type = unassigned DNA
attcctgaagggaattttctgagctggcaggtccttt

SEQ ID NO: 14566 - DNA, 37 bp, Homo sapiens
  source 1..37: mol_type = unassigned DNA
aaaggacctgccagctcagaaaattcccttcaggaat

SEQ ID NO: 14567 - RNA, 32 nt, Homo sapiens
  source 1..32: mol_type = unassigned RNA
tccagaagctctgaggcaggaggcaccaagtt

SEQ ID NO: 14568 - DNA, 32 bp, Homo sapiens
  source 1..32: mol_type = unassigned DNA
tccagaagctctgaggcaggaggcaccaagtt

SEQ ID NO: 14569 - DNA, 32 bp, Homo sapiens
  source 1..32: mol_type = unassigned DNA
aacttggtgcctcctgcctcagagcttctgga

SEQ ID NO: 14570 - RNA, 33 nt, Homo sapiens
  source 1..33: mol_type = unassigned RNA
tcctatggaattgggttctgctggacacaacct

SEQ ID NO: 14571 - DNA, 33 bp, Homo sapiens
  source 1..33: mol_type = unassigned DNA
tcctatggaattgggttctgctggacacaacct

SEQ ID NO: 14572 - DNA, 33 bp, Homo sapiens
  source 1..33: mol_type = unassigned DNA
aggttgtgtccagcagaacccaattccatagga

SEQ ID NO: 14573 - RNA, 56 nt, Homo sapiens
  source 1..56: mol_type = unassigned RNA
caaaacagaaactaagacttaagtcagctcagtgaagccaagacccagctccgcca

SEQ ID NO: 14574 - DNA, 56 bp, Homo sapiens
  source 1..56: mol_type = unassigned DNA
caaaacagaaactaagacttaagtcagctcagtgaagccaagacccagctccgcca

SEQ ID NO: 14575 - DNA, 56 bp, Homo sapiens
  source 1..56: mol_type = unassigned DNA
tggcggagctgggtcttggcttcactgagctgacttaagtcttagtttctgttttg

SEQ ID NO: 14576 - RNA, 29 nt, Homo sapiens
  source 1..29: mol_type = unassigned RNA
tcagaaagctgtagaggaaccccttaatg

SEQ ID NO: 14577 - DNA, 29 bp, Homo sapiens
  source 1..29: mol_type = unassigned DNA
tcagaaagctgtagaggaaccccttaatg

SEQ ID NO: 14578 - DNA, 29 bp, Homo sapiens
  source 1..29: mol_type = unassigned DNA
cattaaggggttcctctacagctttctga

SEQ ID NO: 14579 - RNA, 30 nt, Homo sapiens
  source 1..30: mol_type = unassigned RNA
catagaggttgggctggaggcctgtccact

SEQ ID NO: 14580 - DNA, 30 bp, Homo sapiens
  source 1..30: mol_type = unassigned DNA
catagaggttgggctggaggcctgtccact

SEQ ID NO: 14581 - DNA, 30 bp, Homo sapiens
  source 1..30: mol_type = unassigned DNA
agtggacaggcctccagcccaacctctatg

SEQ ID NO: 14582 - RNA, 30 nt, Homo sapiens
  source 1..30: mol_type = unassigned RNA
ctgtttctccaggctggaccagtagtcaac

SEQ ID NO: 14583 - DNA, 30 bp, Homo sapiens
  source 1..30: mol_type = unassigned DNA
ctgtttctccaggctggaccagtagtcaac

SEQ ID NO: 14584 - DNA, 30 bp, Homo sapiens
  source 1..30: mol_type = unassigned DNA
gttgactactggtccagcctggagaaacag

SEQ ID NO: 14585 - RNA, 136 nt, Homo sapiens
  source 1..136: mol_type = unassigned RNA
ctttgtggtgtttgggtgtgattttattgtttctttcttctcagtttggatgctgtgaagctttgtgtcttctttccactgccttcccagtttgcatttggagtttaggttggcactgtgggtatgtattttcctc

SEQ ID NO: 14586 - DNA, 136 bp, Homo sapiens
  source 1..136: mol_type = unassigned DNA
ctttgtggtgtttgggtgtgattttattgtttctttcttctcagtttggatgctgtgaagctttgtgtcttctttccactgccttcccagtttgcatttggagtttaggttggcactgtgggtatgtattttcctc

SEQ ID NO: 14587 - DNA, 136 bp, Homo sapiens
  source 1..136: mol_type = unassigned DNA
gaggaaaatacatacccacagtgccaacctaaactccaaatgcaaactgggaaggcagtggaaagaagacacaaagcttcacagcatccaaactgagaagaaagaaacaataaaatcacacccaaacaccacaaag

SEQ ID NO: 14588 - RNA, 144 nt, Homo sapiens
  source 1..144: mol_type = unassigned RNA
ttcacagatattgatgaatgtatgataatgaacggaggctgtgacacccagtgcacaaattcagagggaagctacgaatgcagctgcagtgagggttatgccctgatgccagatgggagatcgtgtgcaggtatagaaaggaaa

SEQ ID NO: 14589 - DNA, 144 bp, Homo sapiens
  source 1..144: mol_type = unassigned DNA
ttcacagatattgatgaatgtatgataatgaacggaggctgtgacacccagtgcacaaattcagagggaagctacgaatgcagctgcagtgagggttatgccctgatgccagatgggagatcgtgtgcaggtatagaaaggaaa

SEQ ID NO: 14590 - DNA, 144 bp, Homo sapiens
  source 1..144: mol_type = unassigned DNA
tttcctttctatacctgcacacgatctcccatctggcatcagggcataaccctcactgcagctgcattcgtagcttccctctgaatttgtgcactgggtgtcacagcctccgttcattatcatacattcatcaatatctgtgaa

SEQ ID NO: 14591 - RNA, 30 nt, Homo sapiens
  source 1..30: mol_type = unassigned RNA
ctctagaagctgggctgtggacctgaactt

SEQ ID NO: 14592 - DNA, 30 bp, Homo sapiens
  source 1..30: mol_type = unassigned DNA
ctctagaagctgggctgtggacctgaactt

SEQ ID NO: 14593 - DNA, 30 bp, Homo sapiens
  source 1..30: mol_type = unassigned DNA
aagttcaggtccacagcccagcttctagag

SEQ ID NO: 14594 - RNA, 30 nt, Homo sapiens
  source 1..30: mol_type = unassigned RNA
tttgtaagtttcaggtgacatgtgaaacct

SEQ ID NO: 14595 - DNA, 30 bp, Homo sapiens
  source 1..30: mol_type = unassigned DNA
tttgtaagtttcaggtgacatgtgaaacct

SEQ ID NO: 14596 - DNA, 30 bp, Homo sapiens
  source 1..30: mol_type = unassigned DNA
aggtttcacatgtcacctgaaacttacaaa

SEQ ID NO: 14597 - RNA, 101 nt, Homo sapiens
  source 1..101: mol_type = unassigned RNA
tgcaacatcagattctggtttttctccgcagtgactttccatttcctgtgaaagcactgtacggactggaagaatacgacactcaggatgggattgccata

SEQ ID NO: 14598 - DNA, 101 bp, Homo sapiens
  source 1..101: mol_type = unassigned DNA
tgcaacatcagattctggtttttctccgcagtgactttccatttcctgtgaaagcactgtacggactggaagaatacgacactcaggatgggattgccata

SEQ ID NO: 14599 - DNA, 101 bp, Homo sapiens
  source 1..101: mol_type = unassigned DNA
tatggcaatcccatcctgagtgtcgtattcttccagtccgtacagtgctttcacaggaaatggaaagtcactgcggagaaaaaccagaatctgatgttgca

SEQ ID NO: 14600 - RNA, 26 nt, Homo sapiens
  source 1..26: mol_type = unassigned RNA
gcaaaatctggtcaaatggtcaaatt

SEQ ID NO: 14601 - DNA, 26 bp, Homo sapiens
  source 1..26: mol_type = unassigned DNA
gcaaaatctggtcaaatggtcaaatt

SEQ ID NO: 14602 - DNA, 26 bp, Homo sapiens
  source 1..26: mol_type = unassigned DNA
aatttgaccatttgaccagattttgc

SEQ ID NO: 14603 - RNA, 93 nt, Homo sapiens
  source 1..93: mol_type = unassigned RNA
ggataaggggtggacacccattaccaagctgggcctcctggtcaaggacatgaagatcaagtccctggaggagacctatctcttctccctgcc

SEQ ID NO: 14604 - DNA, 93 bp, Homo sapiens
  source 1..93: mol_type = unassigned DNA
ggataaggggtggacacccattaccaagctgggcctcctggtcaaggacatgaagatcaagtccctggaggagacctatctcttctccctgcc

SEQ ID NO: 14605 - DNA, 93 bp, Homo sapiens
  source 1..93: mol_type = unassigned DNA
ggcagggagaagagataggtctcctccagggacttgatcttcatgtccttgaccaggaggcccagcttggtaatgggtgtccaccccttatcc

SEQ ID NO: 14606 - RNA, 31 nt, Homo sapiens
  source 1..31: mol_type = unassigned RNA
gaggtagctgcggctgtaggttctcgatctc

SEQ ID NO: 14607 - DNA, 31 bp, Homo sapiens
  source 1..31: mol_type = unassigned DNA
gaggtagctgcggctgtaggttctcgatctc

SEQ ID NO: 14608 - DNA, 31 bp, Homo sapiens
  source 1..31: mol_type = unassigned DNA
gagatcgagaacctacagccgcagctacctc

SEQ ID NO: 14609 - RNA, 52 nt, Homo sapiens
  source 1..52: mol_type = unassigned RNA
ttttctttacttttgtggaaactctgacttcaaattttgtgaaattctgacc

SEQ ID NO: 14610 - DNA, 52 bp, Homo sapiens
  source 1..52: mol_type = unassigned DNA
ttttctttacttttgtggaaactctgacttcaaattttgtgaaattctgacc

SEQ ID NO: 14611 - DNA, 52 bp, Homo sapiens
  source 1..52: mol_type = unassigned DNA
ggtcagaatttcacaaaatttgaagtcagagtttccacaaaagtaaagaaaa

SEQ ID NO: 14612 - RNA, 53 nt, Homo sapiens
  source 1..53: mol_type = unassigned RNA
gctgggccgcctggtcaaggacatgaagatcaagtccctggaggagagctatc

SEQ ID NO: 14613 - DNA, 53 bp, Homo sapiens
  source 1..53: mol_type = unassigned DNA
gctgggccgcctggtcaaggacatgaagatcaagtccctggaggagagctatc

SEQ ID NO: 14614 - DNA, 53 bp, Homo sapiens
  source 1..53: mol_type = unassigned DNA
gatagctctcctccagggacttgatcttcatgtccttgaccaggcggcccagc

SEQ ID NO: 14615 - RNA, 77 nt, Homo sapiens
  source 1..77: mol_type = unassigned RNA
tgaagaggagtgacagtgagggcttgaaccaagggagtggcggggggcattctgtggttttctgcttgtcaaatcca

SEQ ID NO: 14616 - DNA, 77 bp, Homo sapiens
  source 1..77: mol_type = unassigned DNA
tgaagaggagtgacagtgagggcttgaaccaagggagtggcggggggcattctgtggttttctgcttgtcaaatcca

SEQ ID NO: 14617 - DNA, 77 bp, Homo sapiens
  source 1..77: mol_type = unassigned DNA
tggatttgacaagcagaaaaccacagaatgccccccgccactcccttggttcaagccctcactgtcactcctcttca

SEQ ID NO: 14618 - RNA, 77 nt, Homo sapiens
  source 1..77: mol_type = unassigned RNA
cagcctggtcaaagacatgaagatcaagtccctggaggagatctatctcttctccctgcccatggaggagtctgaga

SEQ ID NO: 14619 - DNA, 77 bp, Homo sapiens
  source 1..77: mol_type = unassigned DNA
cagcctggtcaaagacatgaagatcaagtccctggaggagatctatctcttctccctgcccatggaggagtctgaga

SEQ ID NO: 14620 - DNA, 77 bp, Homo sapiens
  source 1..77: mol_type = unassigned DNA
tctcagactcctccatgggcagggagaagagatagatctcctccagggacttgatcttcatgtctttgaccaggctg

SEQ ID NO: 14621 - RNA, 159 nt, Homo sapiens
  source 1..159: mol_type = unassigned RNA
aagtgtatgctctggtaagatggattaatacttaacctctgttctctgtctaattagggtcattggtttcctggaggccattgtttgcataaaatttggacaagatctcttctctaagacccaaatactctatgttgtgctttggcttctttgcgtggt

SEQ ID NO: 14622 - DNA, 159 bp, Homo sapiens
  source 1..159: mol_type = unassigned DNA
aagtgtatgctctggtaagatggattaatacttaacctctgttctctgtctaattagggtcattggtttcctggaggccattgtttgcataaaatttggacaagatctcttctctaagacccaaatactctatgttgtgctttggcttctttgcgtggt

SEQ ID NO: 14623 - DNA, 159 bp, Homo sapiens
  source 1..159: mol_type = unassigned DNA
accacgcaaagaagccaaagcacaacatagagtatttgggtcttagagaagagatcttgtccaaattttatgcaaacaatggcctccaggaaaccaatgaccctaattagacagagaacagaggttaagtattaatccatcttaccagagcatacactt

SEQ ID NO: 14624 - RNA, 29 nt, Homo sapiens
  source 1..29: mol_type = unassigned RNA
ccagaacccacagccccaccttgtcaggc

SEQ ID NO: 14625 - DNA, 29 bp, Homo sapiens
  source 1..29: mol_type = unassigned DNA
ccagaacccacagccccaccttgtcaggc

SEQ ID NO: 14626 - DNA, 29 bp, Homo sapiens
  source 1..29: mol_type = unassigned DNA
gcctgacaaggtggggctgtgggttctgg

SEQ ID NO: 14627 - RNA, 96 nt, Homo sapiens
  source 1..96: mol_type = unassigned RNA
taaaaccacagctgttactgaaacttccagtctgaaagcagctggccagaggagagtgggcctgccgcaaagctcccttccctggggggagctcag

SEQ ID NO: 14628 - DNA, 96 bp, Homo sapiens
  source 1..96: mol_type = unassigned DNA
taaaaccacagctgttactgaaacttccagtctgaaagcagctggccagaggagagtgggcctgccgcaaagctcccttccctggggggagctcag

SEQ ID NO: 14629 - DNA, 96 bp, Homo sapiens
  source 1..96: mol_type = unassigned DNA
ctgagctccccccagggaagggagctttgcggcaggcccactctcctctggccagctgctttcagactggaagtttcagtaacagctgtggtttta

SEQ ID NO: 14630 - RNA, 97 nt, Homo sapiens
  source 1..97: mol_type = unassigned RNA
gctatgagtttgacatctgcttcacctcagtgcagaagagagcgacccggaccctctggacagtgctagatgccattgatcagatgtggcccacctg

SEQ ID NO: 14631 - DNA, 97 bp, Homo sapiens
  source 1..97: mol_type = unassigned DNA
gctatgagtttgacatctgcttcacctcagtgcagaagagagcgacccggaccctctggacagtgctagatgccattgatcagatgtggcccacctg

SEQ ID NO: 14632 - DNA, 97 bp, Homo sapiens
  source 1..97: mol_type = unassigned DNA
caggtgggccacatctgatcaatggcatctagcactgtccagagggtccgggtcgctctcttctgcactgaggtgaagcagatgtcaaactcatagc

SEQ ID NO: 14633 - RNA, 30 nt, Homo sapiens
  source 1..30: mol_type = unassigned RNA
catccctgcacctctgaagccaacgtgagc

SEQ ID NO: 14634 - DNA, 30 bp, Homo sapiens
  source 1..30: mol_type = unassigned DNA
catccctgcacctctgaagccaacgtgagc

SEQ ID NO: 14635 - DNA, 30 bp, Homo sapiens
  source 1..30: mol_type = unassigned DNA
gctcacgttggcttcagaggtgcagggatg

SEQ ID NO: 14636 - RNA, 31 nt, Homo sapiens
  source 1..31: mol_type = unassigned RNA
ccatggatggtgactgctggctctgtcacct

SEQ ID NO: 14637 - DNA, 31 bp, Homo sapiens
  source 1..31: mol_type = unassigned DNA
ccatggatggtgactgctggctctgtcacct

SEQ ID NO: 14638 - DNA, 31 bp, Homo sapiens
  source 1..31: mol_type = unassigned DNA
aggtgacagagccagcagtcaccatccatgg

SEQ ID NO: 14639 - RNA, 69 nt, Homo sapiens
  source 1..69: mol_type = unassigned RNA
ttttacgttcccaccaacgatgcacataggttctcgtttccccatctccaccaacacttgctattttcc

SEQ ID NO: 14640 - DNA, 69 bp, Homo sapiens
  source 1..69: mol_type = unassigned DNA
ttttacgttcccaccaacgatgcacataggttctcgtttccccatctccaccaacacttgctattttcc

SEQ ID NO: 14641 - DNA, 69 bp, Homo sapiens
  source 1..69: mol_type = unassigned DNA
ggaaaatagcaagtgttggtggagatggggaaacgagaacctatgtgcatcgttggtgggaacgtaaaa

SEQ ID NO: 14642 - RNA, 30 nt, Homo sapiens
  source 1..30: mol_type = unassigned RNA
acagtcagagatcatctggtcaaatttctt

SEQ ID NO: 14643 - DNA, 30 bp, Homo sapiens
  source 1..30: mol_type = unassigned DNA
acagtcagagatcatctggtcaaatttctt

SEQ ID NO: 14644 - DNA, 30 bp, Homo sapiens
  source 1..30: mol_type = unassigned DNA
aagaaatttgaccagatgatctctgactgt

SEQ ID NO: 14645 - RNA, 85 nt, Homo sapiens
  source 1..85: mol_type = unassigned RNA
tgaaaataagaaaaaatatttctgaaattcgggaacttgagaacatagaagaacaccagtctgtagatattgcaactttggtaaa

SEQ ID NO: 14646 - DNA, 85 bp, Homo sapiens
  source 1..85: mol_type = unassigned DNA
tgaaaataagaaaaaatatttctgaaattcgggaacttgagaacatagaagaacaccagtctgtagatattgcaactttggtaaa

SEQ ID NO: 14647 - DNA, 85 bp, Homo sapiens
  source 1..85: mol_type = unassigned DNA
tttaccaaagttgcaatatctacagactggtgttcttctatgttctcaagttcccgaatttcagaaatattttttcttattttca

SEQ ID NO: 14648 - RNA, 32 nt, Homo sapiens
  source 1..32: mol_type = unassigned RNA
gcctcagaagccagggttggaggaagaacttt

SEQ ID NO: 14649 - DNA, 32 bp, Homo sapiens
  source 1..32: mol_type = unassigned DNA
gcctcagaagccagggttggaggaagaacttt

SEQ ID NO: 14650 - DNA, 32 bp, Homo sapiens
  source 1..32: mol_type = unassigned DNA
aaagttcttcctccaaccctggcttctgaggc

SEQ ID NO: 14651 - RNA, 24 nt, Homo sapiens
  source 1..24: mol_type = unassigned RNA
ttcattgtggctggacatttgaca

SEQ ID NO: 14652 - DNA, 24 bp, Homo sapiens
  source 1..24: mol_type = unassigned DNA
ttcattgtggctggacatttgaca

SEQ ID NO: 14653 - DNA, 24 bp, Homo sapiens
  source 1..24: mol_type = unassigned DNA
tgtcaaatgtccagccacaatgaa

SEQ ID NO: 14654 - RNA, 47 nt, Homo sapiens
  source 1..47: mol_type = unassigned RNA
gaccattgtggctggacctgtgagggagtgggcagggctagaccaca

SEQ ID NO: 14655 - DNA, 47 bp, Homo sapiens
  source 1..47: mol_type = unassigned DNA
gaccattgtggctggacctgtgagggagtgggcagggctagaccaca

SEQ ID NO: 14656 - DNA, 47 bp, Homo sapiens
  source 1..47: mol_type = unassigned DNA
tgtggtctagccctgcccactccctcacaggtccagccacaatggtc

SEQ ID NO: 14657 - RNA, 36 nt, Homo sapiens
  source 1..36: mol_type = unassigned RNA
ataataaagaattttggctggacctttgagcacaca

SEQ ID NO: 14658 - DNA, 36 bp, Homo sapiens
  source 1..36: mol_type = unassigned DNA
ataataaagaattttggctggacctttgagcacaca

SEQ ID NO: 14659 - DNA, 36 bp, Homo sapiens
  source 1..36: mol_type = unassigned DNA
tgtgtgctcaaaggtccagccaaaattctttattat

SEQ ID NO: 14660 - RNA, 27 nt, Homo sapiens
  source 1..27: mol_type = unassigned RNA
cctcattgtggctggccatctgtatat

SEQ ID NO: 14661 - DNA, 27 bp, Homo sapiens
  source 1..27: mol_type = unassigned DNA
cctcattgtggctggccatctgtatat

SEQ ID NO: 14662 - DNA, 27 bp, Homo sapiens
  source 1..27: mol_type = unassigned DNA
atatacagatggccagccacaatgagg

SEQ ID NO: 14663 - RNA, 37 nt, Homo sapiens
  source 1..37: mol_type = unassigned RNA
atcattgtggctgatcatctgtttctgaccattcctt

SEQ ID NO: 14664 - DNA, 37 bp, Homo sapiens
  source 1..37: mol_type = unassigned DNA
atcattgtggctgatcatctgtttctgaccattcctt

SEQ ID NO: 14665 - DNA, 37 bp, Homo sapiens
  source 1..37: mol_type = unassigned DNA
aaggaatggtcagaaacagatgatcagccacaatgat

SEQ ID NO: 14666 - RNA, 63 nt, Homo sapiens
  source 1..63: mol_type = unassigned RNA
ttatataaaatatcattgctcctggaaatcattttggctgaacatctgtggcattttctgtgg

SEQ ID NO: 14667 - DNA, 63 bp, Homo sapiens
  source 1..63: mol_type = unassigned DNA
ttatataaaatatcattgctcctggaaatcattttggctgaacatctgtggcattttctgtgg

SEQ ID NO: 14668 - DNA, 63 bp, Homo sapiens
  source 1..63: mol_type = unassigned DNA
ccacagaaaatgccacagatgttcagccaaaatgatttccaggagcaatgatattttatataa

SEQ ID NO: 14669 - RNA, 25 nt, Homo sapiens
  source 1..25: mol_type = unassigned RNA
gcctttgttatctagctgtcacagt

SEQ ID NO: 14670 - DNA, 25 bp, Homo sapiens
  source 1..25: mol_type = unassigned DNA
gcctttgttatctagctgtcacagt

SEQ ID NO: 14671 - DNA, 25 bp, Homo sapiens
  source 1..25: mol_type = unassigned DNA
actgtgacagctagataacaaaggc

SEQ ID NO: 14672 - RNA, 156 nt, Homo sapiens
  source 1..156: mol_type = unassigned RNA
tgagaacttttattgatgccagtcgagattaatgaaatgtagagcatctttgttgaagataaactgagggaaataccacaactttccattgctgacaggcctttgttatccagctgtctcagtcctgggtgtgtgtactgggtgcatgcccttgcc

SEQ ID NO: 14673 - DNA, 156 bp, Homo sapiens
  source 1..156: mol_type = unassigned DNA
tgagaacttttattgatgccagtcgagattaatgaaatgtagagcatctttgttgaagataaactgagggaaataccacaactttccattgctgacaggcctttgttatccagctgtctcagtcctgggtgtgtgtactgggtgcatgcccttgcc

SEQ ID NO: 14674 - DNA, 156 bp, Homo sapiens
  source 1..156: mol_type = unassigned DNA
ggcaagggcatgcacccagtacacacacccaggactgagacagctggataacaaaggcctgtcagcaatggaaagttgtggtatttccctcagtttatcttcaacaaagatgctctacatttcattaatctcgactggcatcaataaaagttctca

SEQ ID NO: 14675 - RNA, 24 nt, Homo sapiens
  source 1..24: mol_type = unassigned RNA
tctatggttatttaactctatggt

SEQ ID NO: 14676 - DNA, 24 bp, Homo sapiens
  source 1..24: mol_type = unassigned DNA
tctatggttatttaactctatggt

SEQ ID NO: 14677 - DNA, 24 bp, Homo sapiens
  source 1..24: mol_type = unassigned DNA
accatagagttaaataaccataga

SEQ ID NO: 14678 - RNA, 30 nt, Homo sapiens
  source 1..30: mol_type = unassigned RNA
tatttggttatgtatctgtattattttttt

SEQ ID NO: 14679 - DNA, 30 bp, Homo sapiens
  source 1..30: mol_type = unassigned DNA
tatttggttatgtatctgtattattttttt

SEQ ID NO: 14680 - DNA, 30 bp, Homo sapiens
  source 1..30: mol_type = unassigned DNA
aaaaaaataatacagatacataaccaaata

SEQ ID NO: 14681 - RNA, 31 nt, Homo sapiens
  source 1..31: mol_type = unassigned RNA
aaagattgaggctggacctctgaggagggat

SEQ ID NO: 14682 - DNA, 31 bp, Homo sapiens
  source 1..31: mol_type = unassigned DNA
aaagattgaggctggacctctgaggagggat

SEQ ID NO: 14683 - DNA, 31 bp, Homo sapiens
  source 1..31: mol_type = unassigned DNA
atccctcctcagaggtccagcctcaatcttt

SEQ ID NO: 14684 - RNA, 28 nt, Homo sapiens
  source 1..28: mol_type = unassigned RNA
aaacttggttatctagctatattctcaa

SEQ ID NO: 14685 - DNA, 28 bp, Homo sapiens
  source 1..28: mol_type = unassigned DNA
aaacttggttatctagctatattctcaa

SEQ ID NO: 14686 - DNA, 28 bp, Homo sapiens
  source 1..28: mol_type = unassigned DNA
ttgagaatatagctagataaccaagttt

SEQ ID NO: 14687 - RNA, 35 nt, Homo sapiens
  source 1..35: mol_type = unassigned RNA
cctctgcagcagaattctggctggacatctagaca

SEQ ID NO: 14688 - DNA, 35 bp, Homo sapiens
  source 1..35: mol_type = unassigned DNA
cctctgcagcagaattctggctggacatctagaca

SEQ ID NO: 14689 - DNA, 35 bp, Homo sapiens
  source 1..35: mol_type = unassigned DNA
tgtctagatgtccagccagaattctgctgcagagg

SEQ ID NO: 14690 - RNA, 37 nt, Homo sapiens
  source 1..37: mol_type = unassigned RNA
tctatttaaatcctgaggtgtttatctagctgtgtgg

SEQ ID NO: 14691 - DNA, 37 bp, Homo sapiens
  source 1..37: mol_type = unassigned DNA
tctatttaaatcctgaggtgtttatctagctgtgtgg

SEQ ID NO: 14692 - DNA, 37 bp, Homo sapiens
  source 1..37: mol_type = unassigned DNA
ccacacagctagataaacacctcaggatttaaataga

SEQ ID NO: 14693 - RNA, 27 nt, Homo sapiens
  source 1..27: mol_type = unassigned RNA
tattatttgtttttctagctttattag

SEQ ID NO: 14694 - DNA, 27 bp, Homo sapiens
  source 1..27: mol_type = unassigned DNA
tattatttgtttttctagctttattag

SEQ ID NO: 14695 - DNA, 27 bp, Homo sapiens
  source 1..27: mol_type = unassigned DNA
ctaataaagctagaaaaacaaataata

SEQ ID NO: 14696 - RNA, 38 nt, Homo sapiens
  source 1..38: mol_type = unassigned RNA
tgcattaggagattgtcttggggtagttatcagtatga

SEQ ID NO: 14697 - DNA, 38 bp, Homo sapiens
  source 1..38: mol_type = unassigned DNA
tgcattaggagattgtcttggggtagttatcagtatga

SEQ ID NO: 14698 - DNA, 38 bp, Homo sapiens
  source 1..38: mol_type = unassigned DNA
tcatactgataactaccccaagacaatctcctaatgca

SEQ ID NO: 14699 - RNA, 34 nt, Homo sapiens
  source 1..34: mol_type = unassigned RNA
tatttgtttatatagctgtcagaaaactactatt

SEQ ID NO: 14700 - DNA, 34 bp, Homo sapiens
  source 1..34: mol_type = unassigned DNA
tatttgtttatatagctgtcagaaaactactatt

SEQ ID NO: 14701 - DNA, 34 bp, Homo sapiens
  source 1..34: mol_type = unassigned DNA
aatagtagttttctgacagctatataaacaaata

SEQ ID NO: 14702 - RNA, 65 nt, Homo sapiens
  source 1..65: mol_type = unassigned RNA
ttttgggttttagttgggattttacatagcttgcattttaattctttggttcttcgctgtttgta

SEQ ID NO: 14703 - DNA, 65 bp, Homo sapiens
  source 1..65: mol_type = unassigned DNA
ttttgggttttagttgggattttacatagcttgcattttaattctttggttcttcgctgtttgta

SEQ ID NO: 14704 - DNA, 65 bp, Homo sapiens
  source 1..65: mol_type = unassigned DNA
tacaaacagcgaagaaccaaagaattaaaatgcaagctatgtaaaatcccaactaaaacccaaaa

SEQ ID NO: 14705 - RNA, 47 nt, Homo sapiens
  source 1..47: mol_type = unassigned RNA
gcatttcttagtgtgtatatttgtttacctagctttattattcttat

SEQ ID NO: 14706 - DNA, 47 bp, Homo sapiens
  source 1..47: mol_type = unassigned DNA
gcatttcttagtgtgtatatttgtttacctagctttattattcttat

SEQ ID NO: 14707 - DNA, 47 bp, Homo sapiens
  source 1..47: mol_type = unassigned DNA
ataagaataataaagctaggtaaacaaatatacacactaagaaatgc

SEQ ID NO: 14708 - RNA, 35 nt, Homo sapiens
  source 1..35: mol_type = unassigned RNA
cagctttcttcacggagtaggttgcagaatgaagc

SEQ ID NO: 14709 - DNA, 35 bp, Homo sapiens
  source 1..35: mol_type = unassigned DNA
cagctttcttcacggagtaggttgcagaatgaagc

SEQ ID NO: 14710 - DNA, 35 bp, Homo sapiens
  source 1..35: mol_type = unassigned DNA
gcttcattctgcaacctactccgtgaagaaagctg

SEQ ID NO: 14711 - RNA, 70 nt, Homo sapiens
  source 1..70: mol_type = unassigned RNA
tgtggtacaatgatttatatttctttgggtatgtacccagtatgagattgctgggaagaatggtagttct

SEQ ID NO: 14712 - DNA, 70 bp, Homo sapiens
  source 1..70: mol_type = unassigned DNA
tgtggtacaatgatttatatttctttgggtatgtacccagtatgagattgctgggaagaatggtagttct

SEQ ID NO: 14713 - DNA, 70 bp, Homo sapiens
  source 1..70: mol_type = unassigned DNA
agaactaccattcttcccagcaatctcatactgggtacatacccaaagaaatataaatcattgtaccaca

SEQ ID NO: 14714 - RNA, 24 nt, Homo sapiens
  source 1..24: mol_type = unassigned RNA
tctttgtttctccaggtgtcttgt

SEQ ID NO: 14715 - DNA, 24 bp, Homo sapiens
  source 1..24: mol_type = unassigned DNA
tctttgtttctccaggtgtcttgt

SEQ ID NO: 14716 - DNA, 24 bp, Homo sapiens
  source 1..24: mol_type = unassigned DNA
acaagacacctggagaaacaaaga

SEQ ID NO: 14717 - RNA, 45 nt, Homo sapiens
  source 1..45: mol_type = unassigned RNA
accattatggctggacatatgtaaatacagaaacattgggagcct

SEQ ID NO: 14718 - DNA, 45 bp, Homo sapiens
  source 1..45: mol_type = unassigned DNA
accattatggctggacatatgtaaatacagaaacattgggagcct

SEQ ID NO: 14719 - DNA, 45 bp, Homo sapiens
  source 1..45: mol_type = unassigned DNA
aggctcccaatgtttctgtatttacatatgtccagccataatggt

SEQ ID NO: 14720 - RNA, 52 nt, Homo sapiens
  source 1..52: mol_type = unassigned RNA
acctttgcattctcctccttgacaggagctgggcatccaagaagaagcagcc

SEQ ID NO: 14721 - DNA, 52 bp, Homo sapiens
  source 1..52: mol_type = unassigned DNA
acctttgcattctcctccttgacaggagctgggcatccaagaagaagcagcc

SEQ ID NO: 14722 - DNA, 52 bp, Homo sapiens
  source 1..52: mol_type = unassigned DNA
ggctgcttcttcttggatgcccagctcctgtcaaggaggagaatgcaaaggt

SEQ ID NO: 14723 - RNA, 34 nt, Homo sapiens
  source 1..34: mol_type = unassigned RNA
ttgttaaagtgcttccatgtattagtagaatagt

SEQ ID NO: 14724 - DNA, 34 bp, Homo sapiens
  source 1..34: mol_type = unassigned DNA
ttgttaaagtgcttccatgtattagtagaatagt

SEQ ID NO: 14725 - DNA, 34 bp, Homo sapiens
  source 1..34: mol_type = unassigned DNA
actattctactaatacatggaagcactttaacaa

SEQ ID NO: 14726 - RNA, 24 nt, Homo sapiens
  source 1..24: mol_type = unassigned RNA
aacattttggctggacacctgtgc

SEQ ID NO: 14727 - DNA, 24 bp, Homo sapiens
  source 1..24: mol_type = unassigned DNA
aacattttggctggacacctgtgc

SEQ ID NO: 14728 - DNA, 24 bp, Homo sapiens
  source 1..24: mol_type = unassigned DNA
gcacaggtgtccagccaaaatgtt

SEQ ID NO: 14729 - RNA, 84 nt, Homo sapiens
  source 1..84: mol_type = unassigned RNA
gtatcactaagaactacatccagttggttatatagctgtcttagccacagtgcattgctaaactctgttatattacaatgcagg

SEQ ID NO: 14730 - DNA, 84 bp, Homo sapiens
  source 1..84: mol_type = unassigned DNA
gtatcactaagaactacatccagttggttatatagctgtcttagccacagtgcattgctaaactctgttatattacaatgcagg

SEQ ID NO: 14731 - DNA, 84 bp, Homo sapiens
  source 1..84: mol_type = unassigned DNA
cctgcattgtaatataacagagtttagcaatgcactgtggctaagacagctatataaccaactggatgtagttcttagtgatac

SEQ ID NO: 14732 - RNA, 73 nt, Homo sapiens
  source 1..73: mol_type = unassigned RNA
acttgggttatctgggtctatgagagtccatggctgttctcctgagaccctcgtgagcatggctcttctgtcg

SEQ ID NO: 14733 - DNA, 73 bp, Homo sapiens
  source 1..73: mol_type = unassigned DNA
acttgggttatctgggtctatgagagtccatggctgttctcctgagaccctcgtgagcatggctcttctgtcg

SEQ ID NO: 14734 - DNA, 73 bp, Homo sapiens
  source 1..73: mol_type = unassigned DNA
cgacagaagagccatgctcacgagggtctcaggagaacagccatggactctcatagacccagataacccaagt

SEQ ID NO: 14735 - RNA, 29 nt, Homo sapiens
  source 1..29: mol_type = unassigned RNA
aagagtagtggctggccatctgaagttga

SEQ ID NO: 14736 - DNA, 29 bp, Homo sapiens
  source 1..29: mol_type = unassigned DNA
aagagtagtggctggccatctgaagttga

SEQ ID NO: 14737 - DNA, 29 bp, Homo sapiens
  source 1..29: mol_type = unassigned DNA
tcaacttcagatggccagccactactctt

SEQ ID NO: 14738 - RNA, 25 nt, Homo sapiens
  source 1..25: mol_type = unassigned RNA
tatttctcttttcccaacctgtata

SEQ ID NO: 14739 - DNA, 25 bp, Homo sapiens
  source 1..25: mol_type = unassigned DNA
tatttctcttttcccaacctgtata

SEQ ID NO: 14740 - DNA, 25 bp, Homo sapiens
  source 1..25: mol_type = unassigned DNA
tatacaggttgggaaaagagaaata

SEQ ID NO: 14741 - RNA, 24 nt, Homo sapiens
  source 1..24: mol_type = unassigned RNA
gctttggttgtatatctttatgag

SEQ ID NO: 14742 - DNA, 24 bp, Homo sapiens
  source 1..24: mol_type = unassigned DNA
gctttggttgtatatctttatgag

SEQ ID NO: 14743 - DNA, 24 bp, Homo sapiens
  source 1..24: mol_type = unassigned DNA
ctcataaagatatacaaccaaagc

SEQ ID NO: 14744 - RNA, 69 nt, Homo sapiens
  source 1..69: mol_type = unassigned RNA
gataagacatgcgaattctaggatagtaggacctaggcagatgtccacatgaacttgagggactttaaa

SEQ ID NO: 14745 - DNA, 69 bp, Homo sapiens
  source 1..69: mol_type = unassigned DNA
gataagacatgcgaattctaggatagtaggacctaggcagatgtccacatgaacttgagggactttaaa

SEQ ID NO: 14746 - DNA, 69 bp, Homo sapiens
  source 1..69: mol_type = unassigned DNA
tttaaagtccctcaagttcatgtggacatctgcctaggtcctactatcctagaattcgcatgtcttatc

SEQ ID NO: 14747 - RNA, 22 nt, Homo sapiens
  source 1..22: mol_type = unassigned RNA
ggccagaactttcatacctgat

SEQ ID NO: 14748 - DNA, 22 bp, Homo sapiens
  source 1..22: mol_type = unassigned DNA
ggccagaactttcatacctgat

SEQ ID NO: 14749 - DNA, 22 bp, Homo sapiens
  source 1..22: mol_type = unassigned DNA
atcaggtatgaaagttctggcc

SEQ ID NO: 14750 - RNA, 24 nt, Homo sapiens
  source 1..24: mol_type = unassigned RNA
tctttgtatatctatatgtattag

SEQ ID NO: 14751 - DNA, 24 bp, Homo sapiens
  source 1..24: mol_type = unassigned DNA
tctttgtatatctatatgtattag

SEQ ID NO: 14752 - DNA, 24 bp, Homo sapiens
  source 1..24: mol_type = unassigned DNA
ctaatacatatagatatacaaaga

SEQ ID NO: 14753 - RNA, 30 nt, Homo sapiens
  source 1..30: mol_type = unassigned RNA
tgatcccgatgactctgaaacatgcttggc

SEQ ID NO: 14754 - DNA, 30 bp, Homo sapiens
  source 1..30: mol_type = unassigned DNA
tgatcccgatgactctgaaacatgcttggc

SEQ ID NO: 14755 - DNA, 30 bp, Homo sapiens
  source 1..30: mol_type = unassigned DNA
gccaagcatgtttcagagtcatcgggatca

SEQ ID NO: 14756 - RNA, 57 nt, Homo sapiens
  source 1..57: mol_type = unassigned RNA
ataattgcttccatgttttagatattgtgactaatgctgctatgaacatgggtgtac

SEQ ID NO: 14757 - DNA, 57 bp, Homo sapiens
  source 1..57: mol_type = unassigned DNA
ataattgcttccatgttttagatattgtgactaatgctgctatgaacatgggtgtac

SEQ ID NO: 14758 - DNA, 57 bp, Homo sapiens
  source 1..57: mol_type = unassigned DNA
gtacacccatgttcatagcagcattagtcacaatatctaaaacatggaagcaattat

SEQ ID NO: 14759 - RNA, 31 nt, Homo sapiens
  source 1..31: mol_type = unassigned RNA
tctttgggtaggttagcagtattgatttggg

SEQ ID NO: 14760 - DNA, 31 bp, Homo sapiens
  source 1..31: mol_type = unassigned DNA
tctttgggtaggttagcagtattgatttggg

SEQ ID NO: 14761 - DNA, 31 bp, Homo sapiens
  source 1..31: mol_type = unassigned DNA
cccaaatcaatactgctaacctacccaaaga

SEQ ID NO: 14762 - RNA, 53 nt, Homo sapiens
  source 1..53: mol_type = unassigned RNA
gtaattaagttttggggtagtttgctgtatgataatagataactggaacaatt

SEQ ID NO: 14763 - DNA, 53 bp, Homo sapiens
  source 1..53: mol_type = unassigned DNA
gtaattaagttttggggtagtttgctgtatgataatagataactggaacaatt

SEQ ID NO: 14764 - DNA, 53 bp, Homo sapiens
  source 1..53: mol_type = unassigned DNA
aattgttccagttatctattatcatacagcaaactaccccaaaacttaattac

SEQ ID NO: 14765 - RNA, 110 nt, Homo sapiens
  source 1..110: mol_type = unassigned RNA
taaacttagaatctccagctagcaagggctccggaaggtcatccttgggccggatgaccttccagagtccttgccagctggagattctaagtttctcagcccccggcaag

SEQ ID NO: 14766 - DNA, 110 bp, Homo sapiens
  source 1..110: mol_type = unassigned DNA
taaacttagaatctccagctagcaagggctccggaaggtcatccttgggccggatgaccttccagagtccttgccagctggagattctaagtttctcagcccccggcaag

SEQ ID NO: 14767 - DNA, 110 bp, Homo sapiens
  source 1..110: mol_type = unassigned DNA
cttgccgggggctgagaaacttagaatctccagctggcaaggactctggaaggtcatccggcccaaggatgaccttccggagcccttgctagctggagattctaagttta

SEQ ID NO: 14768 - RNA, 40 nt, Homo sapiens
  source 1..40: mol_type = unassigned RNA
ttctttattattttgtctatttctttgtttggactttata

SEQ ID NO: 14769 - DNA, 40 bp, Homo sapiens
  source 1..40: mol_type = unassigned DNA
ttctttattattttgtctatttctttgtttggactttata

SEQ ID NO: 14770 - DNA, 40 bp, Homo sapiens
  source 1..40: mol_type = unassigned DNA
tataaagtccaaacaaagaaatagacaaaataataaagaa

SEQ ID NO: 14771 - RNA, 26 nt, Homo sapiens
  source 1..26: mol_type = unassigned RNA
aaagtgcttccttgtttcagtgatta

SEQ ID NO: 14772 - DNA, 26 bp, Homo sapiens
  source 1..26: mol_type = unassigned DNA
aaagtgcttccttgtttcagtgatta

SEQ ID NO: 14773 - DNA, 26 bp, Homo sapiens
  source 1..26: mol_type = unassigned DNA
taatcactgaaacaaggaagcacttt

SEQ ID NO: 14774 - RNA, 38 nt, Homo sapiens
  source 1..38: mol_type = unassigned RNA
atcagaactgtggctggccatctgctgctctgaataca

SEQ ID NO: 14775 - DNA, 38 bp, Homo sapiens
  source 1..38: mol_type = unassigned DNA
atcagaactgtggctggccatctgctgctctgaataca

SEQ ID NO: 14776 - DNA, 38 bp, Homo sapiens
  source 1..38: mol_type = unassigned DNA
tgtattcagagcagcagatggccagccacagttctgat

SEQ ID NO: 14777 - RNA, 29 nt, Homo sapiens
  source 1..29: mol_type = unassigned RNA
gacaagaacactgtaggagaatctggccc

SEQ ID NO: 14778 - DNA, 29 bp, Homo sapiens
  source 1..29: mol_type = unassigned DNA
gacaagaacactgtaggagaatctggccc

SEQ ID NO: 14779 - DNA, 29 bp, Homo sapiens
  source 1..29: mol_type = unassigned DNA
gggccagattctcctacagtgttcttgtc

SEQ ID NO: 14780 - RNA, 25 nt, Homo sapiens
  source 1..25: mol_type = unassigned RNA
tcttgtattattttgtgtggtcagg

SEQ ID NO: 14781 - DNA, 25 bp, Homo sapiens
  source 1..25: mol_type = unassigned DNA
tcttgtattattttgtgtggtcagg

SEQ ID NO: 14782 - DNA, 25 bp, Homo sapiens
  source 1..25: mol_type = unassigned DNA
cctgaccacacaaaataatacaaga

SEQ ID NO: 14783 - RNA, 54 nt, Homo sapiens
  source 1..54: mol_type = unassigned RNA
ccctttgtttctctctctgtatgtgtgtgtgtgtctctctctcagagtgttata

SEQ ID NO: 14784 - DNA, 54 bp, Homo sapiens
  source 1..54: mol_type = unassigned DNA
ccctttgtttctctctctgtatgtgtgtgtgtgtctctctctcagagtgttata

SEQ ID NO: 14785 - DNA, 54 bp, Homo sapiens
  source 1..54: mol_type = unassigned DNA
tataacactctgagagagagacacacacacacatacagagagagaaacaaaggg

SEQ ID NO: 14786 - RNA, 44 nt, Homo sapiens
  source 1..44: mol_type = unassigned RNA
tcttcctaatagattgaagccaggctgttaggctagtggtcaga

SEQ ID NO: 14787 - DNA, 44 bp, Homo sapiens
  source 1..44: mol_type = unassigned DNA
tcttcctaatagattgaagccaggctgttaggctagtggtcaga

SEQ ID NO: 14788 - DNA, 44 bp, Homo sapiens
  source 1..44: mol_type = unassigned DNA
tctgaccactagcctaacagcctggcttcaatctattaggaaga

SEQ ID NO: 14789 - RNA, 44 nt, Homo sapiens
  source 1..44: mol_type = unassigned RNA
tcttgcaataggctagcatctttctttatctcactttatgaacc

SEQ ID NO: 14790 - DNA, 44 bp, Homo sapiens
  source 1..44: mol_type = unassigned DNA
tcttgcaataggctagcatctttctttatctcactttatgaacc

SEQ ID NO: 14791 - DNA, 44 bp, Homo sapiens
  source 1..44: mol_type = unassigned DNA
ggttcataaagtgagataaagaaagatgctagcctattgcaaga

SEQ ID NO: 14792 - RNA, 23 nt, Homo sapiens
  source 1..23: mol_type = unassigned RNA
tgagttcttattctgtctctttt

SEQ ID NO: 14793 - DNA, 23 bp, Homo sapiens
  source 1..23: mol_type = unassigned DNA
tgagttcttattctgtctctttt

SEQ ID NO: 14794 - DNA, 23 bp, Homo sapiens
  source 1..23: mol_type = unassigned DNA
aaaagagacagaataagaactca

SEQ ID NO: 14795 - RNA, 24 nt, Homo sapiens
  source 1..24: mol_type = unassigned RNA
tactgtcttattttgtctagtaat

SEQ ID NO: 14796 - DNA, 24 bp, Homo sapiens
  source 1..24: mol_type = unassigned DNA
tactgtcttattttgtctagtaat

SEQ ID NO: 14797 - DNA, 24 bp, Homo sapiens
  source 1..24: mol_type = unassigned DNA
attactagacaaaataagacagta

SEQ ID NO: 14798 - RNA, 28 nt, Homo sapiens
  source 1..28: mol_type = unassigned RNA
gtaggttttatctagctgtctgatacga

SEQ ID NO: 14799 - DNA, 28 bp, Homo sapiens
  source 1..28: mol_type = unassigned DNA
gtaggttttatctagctgtctgatacga

SEQ ID NO: 14800 - DNA, 28 bp, Homo sapiens
  source 1..28: mol_type = unassigned DNA
tcgtatcagacagctagataaaacctac

SEQ ID NO: 14801 - RNA, 25 nt, Homo sapiens
  source 1..25: mol_type = unassigned RNA
acctttgttatctatctttttgatt

SEQ ID NO: 14802 - DNA, 25 bp, Homo sapiens
  source 1..25: mol_type = unassigned DNA
acctttgttatctatctttttgatt

SEQ ID NO: 14803 - DNA, 25 bp, Homo sapiens
  source 1..25: mol_type = unassigned DNA
aatcaaaaagatagataacaaaggt

SEQ ID NO: 14804 - RNA, 23 nt, Homo sapiens
  source 1..23: mol_type = unassigned RNA
tgagttcttatttggctagttag

SEQ ID NO: 14805 - DNA, 23 bp, Homo sapiens
  source 1..23: mol_type = unassigned DNA
tgagttcttatttggctagttag

SEQ ID NO: 14806 - DNA, 23 bp, Homo sapiens
  source 1..23: mol_type = unassigned DNA
ctaactagccaaataagaactca

SEQ ID NO: 14807 - RNA, 44 nt, Homo sapiens
  source 1..44: mol_type = unassigned RNA
ttggagtattagatttgatacttttgttatcaagctgtttggat

SEQ ID NO: 14808 - DNA, 44 bp, Homo sapiens
  source 1..44: mol_type = unassigned DNA
ttggagtattagatttgatacttttgttatcaagctgtttggat

SEQ ID NO: 14809 - DNA, 44 bp, Homo sapiens
  source 1..44: mol_type = unassigned DNA
atccaaacagcttgataacaaaagtatcaaatctaatactccaa

SEQ ID NO: 14810 - RNA, 46 nt, Homo sapiens
  source 1..46: mol_type = unassigned RNA
gagagatagagatctgtagttttcctgtattatcttgtctggtttt

SEQ ID NO: 14811 - DNA, 46 bp, Homo sapiens
  source 1..46: mol_type = unassigned DNA
gagagatagagatctgtagttttcctgtattatcttgtctggtttt

SEQ ID NO: 14812 - DNA, 46 bp, Homo sapiens
  source 1..46: mol_type = unassigned DNA
aaaaccagacaagataatacaggaaaactacagatctctatctctc

SEQ ID NO: 14813 - RNA, 35 nt, Homo sapiens
  source 1..35: mol_type = unassigned RNA
tatttgtttctctcacgtatgaactcaggcaaagc

SEQ ID NO: 14814 - DNA, 35 bp, Homo sapiens
  source 1..35: mol_type = unassigned DNA
tatttgtttctctcacgtatgaactcaggcaaagc

SEQ ID NO: 14815 - DNA, 35 bp, Homo sapiens
  source 1..35: mol_type = unassigned DNA
gctttgcctgagttcatacgtgagagaaacaaata

SEQ ID NO: 14816 - RNA, 28 nt, Homo sapiens
  source 1..28: mol_type = unassigned RNA
tatttggttctctctctgtctctttttt

SEQ ID NO: 14817 - DNA, 28 bp, Homo sapiens
  source 1..28: mol_type = unassigned DNA
tatttggttctctctctgtctctttttt

SEQ ID NO: 14818 - DNA, 28 bp, Homo sapiens
  source 1..28: mol_type = unassigned DNA
aaaaaagagacagagagagaaccaaata

SEQ ID NO: 14819 - RNA, 26 nt, Homo sapiens
  source 1..26: mol_type = unassigned RNA
catttattcctgttaaaactgaatta

SEQ ID NO: 14820 - DNA, 26 bp, Homo sapiens
  source 1..26: mol_type = unassigned DNA
catttattcctgttaaaactgaatta

SEQ ID NO: 14821 - DNA, 26 bp, Homo sapiens
  source 1..26: mol_type = unassigned DNA
taattcagttttaacaggaataaatg

SEQ ID NO: 14822 - RNA, 115 nt, Homo sapiens
  source 1..115: mol_type = unassigned RNA
atcagatgcctcctgagcagagccctgctgcccctcctgtgggaagctgtggaatagcacgtggaaggtgggcagttgttggataaacagtgtgggtggacctctgttcaggaag

SEQ ID NO: 14823 - DNA, 115 bp, Homo sapiens
  source 1..115: mol_type = unassigned DNA
atcagatgcctcctgagcagagccctgctgcccctcctgtgggaagctgtggaatagcacgtggaaggtgggcagttgttggataaacagtgtgggtggacctctgttcaggaag

SEQ ID NO: 14824 - DNA, 115 bp, Homo sapiens
  source 1..115: mol_type = unassigned DNA
cttcctgaacagaggtccacccacactgtttatccaacaactgcccaccttccacgtgctattccacagcttcccacaggaggggcagcagggctctgctcaggaggcatctgat

SEQ ID NO: 14825 - RNA, 57 nt, Homo sapiens
  source 1..57: mol_type = unassigned RNA
ctgtattatcacataaggttgtgtcctacacaatccaagggctgtcattgattttgt

SEQ ID NO: 14826 - DNA, 57 bp, Homo sapiens
  source 1..57: mol_type = unassigned DNA
ctgtattatcacataaggttgtgtcctacacaatccaagggctgtcattgattttgt

SEQ ID NO: 14827 - DNA, 57 bp, Homo sapiens
  source 1..57: mol_type = unassigned DNA
acaaaatcaatgacagcccttggattgtgtaggacacaaccttatgtgataatacag

SEQ ID NO: 14828 - RNA, 83 nt, Homo sapiens
  source 1..83: mol_type = unassigned RNA
cagcctcccacaacttcccagttcactacagtaatacacatctcctccagacacttctgagagttgaggctggacatctcagt

SEQ ID NO: 14829 - DNA, 83 bp, Homo sapiens
  source 1..83: mol_type = unassigned DNA
cagcctcccacaacttcccagttcactacagtaatacacatctcctccagacacttctgagagttgaggctggacatctcagt

SEQ ID NO: 14830 - DNA, 83 bp, Homo sapiens
  source 1..83: mol_type = unassigned DNA
actgagatgtccagcctcaactctcagaagtgtctggaggagatgtgtattactgtagtgaactgggaagttgtgggaggctg

SEQ ID NO: 14831 - RNA, 29 nt, Homo sapiens
  source 1..29: mol_type = unassigned RNA
ttttactattgtggctgagacatctggtg

SEQ ID NO: 14832 - DNA, 29 bp, Homo sapiens
  source 1..29: mol_type = unassigned DNA
ttttactattgtggctgagacatctggtg

SEQ ID NO: 14833 - DNA, 29 bp, Homo sapiens
  source 1..29: mol_type = unassigned DNA
caccagatgtctcagccacaatagtaaaa

SEQ ID NO: 14834 - RNA, 44 nt, Homo sapiens
  source 1..44: mol_type = unassigned RNA
aagaattgtgcttgggcatctgaaaaagcctcaccccatttcct

SEQ ID NO: 14835 - DNA, 44 bp, Homo sapiens
  source 1..44: mol_type = unassigned DNA
aagaattgtgcttgggcatctgaaaaagcctcaccccatttcct

SEQ ID NO: 14836 - DNA, 44 bp, Homo sapiens
  source 1..44: mol_type = unassigned DNA
aggaaatggggtgaggctttttcagatgcccaagcacaattctt

SEQ ID NO: 14837 - RNA, 30 nt, Homo sapiens
  source 1..30: mol_type = unassigned RNA
gtggttatttgtttatctggctttcttgct

SEQ ID NO: 14838 - DNA, 30 bp, Homo sapiens
  source 1..30: mol_type = unassigned DNA
gtggttatttgtttatctggctttcttgct

SEQ ID NO: 14839 - DNA, 30 bp, Homo sapiens
  source 1..30: mol_type = unassigned DNA
agcaagaaagccagataaacaaataaccac

SEQ ID NO: 14840 - RNA, 39 nt, Homo sapiens
  source 1..39: mol_type = unassigned RNA
tgggttcttattttgtctcctttgtcctttgaagcaatc

SEQ ID NO: 14841 - DNA, 39 bp, Homo sapiens
  source 1..39: mol_type = unassigned DNA
tgggttcttattttgtctcctttgtcctttgaagcaatc

SEQ ID NO: 14842 - DNA, 39 bp, Homo sapiens
  source 1..39: mol_type = unassigned DNA
gattgcttcaaaggacaaaggagacaaaataagaaccca

SEQ ID NO: 14843 - RNA, 55 nt, Homo sapiens
  source 1..55: mol_type = unassigned RNA
atttctgtcttattttgtcttgtttcttacataccaggagatccttgactatttt

SEQ ID NO: 14844 - DNA, 55 bp, Homo sapiens
  source 1..55: mol_type = unassigned DNA
atttctgtcttattttgtcttgtttcttacataccaggagatccttgactatttt

SEQ ID NO: 14845 - DNA, 55 bp, Homo sapiens
  source 1..55: mol_type = unassigned DNA
aaaatagtcaaggatctcctggtatgtaagaaacaagacaaaataagacagaaat

SEQ ID NO: 14846 - RNA, 24 nt, Homo sapiens
  source 1..24: mol_type = unassigned RNA
aagattgtggctggacaattgtca

SEQ ID NO: 14847 - DNA, 24 bp, Homo sapiens
  source 1..24: mol_type = unassigned DNA
aagattgtggctggacaattgtca

SEQ ID NO: 14848 - DNA, 24 bp, Homo sapiens
  source 1..24: mol_type = unassigned DNA
tgacaattgtccagccacaatctt

SEQ ID NO: 14849 - RNA, 31 nt, Homo sapiens
  source 1..31: mol_type = unassigned RNA
cttaaccattgtggctggacctccttgctct

SEQ ID NO: 14850 - DNA, 31 bp, Homo sapiens
  source 1..31: mol_type = unassigned DNA
cttaaccattgtggctggacctccttgctct

SEQ ID NO: 14851 - DNA, 31 bp, Homo sapiens
  source 1..31: mol_type = unassigned DNA
agagcaaggaggtccagccacaatggttaag

SEQ ID NO: 14852 - RNA, 39 nt, Homo sapiens
  source 1..39: mol_type = unassigned RNA
agaggtaacagtgtggctggagctctgtggtcaaaaggc

SEQ ID NO: 14853 - DNA, 39 bp, Homo sapiens
  source 1..39: mol_type = unassigned DNA
agaggtaacagtgtggctggagctctgtggtcaaaaggc

SEQ ID NO: 14854 - DNA, 39 bp, Homo sapiens
  source 1..39: mol_type = unassigned DNA
gccttttgaccacagagctccagccacactgttacctct

SEQ ID NO: 14855 - RNA, 126 nt, Homo sapiens
  source 1..126: mol_type = unassigned RNA
cttcagttttgtggcctgacatctgtatctgttcagaaatacttttttgactttgacacctgtctggctgaaaccacaactttggactctaaaactgggcaagggaggagtccattggaaccaggg

SEQ ID NO: 14856 - DNA, 126 bp, Homo sapiens
  source 1..126: mol_type = unassigned DNA
cttcagttttgtggcctgacatctgtatctgttcagaaatacttttttgactttgacacctgtctggctgaaaccacaactttggactctaaaactgggcaagggaggagtccattggaaccaggg

SEQ ID NO: 14857 - DNA, 126 bp, Homo sapiens
  source 1..126: mol_type = unassigned DNA
ccctggttccaatggactcctcccttgcccagttttagagtccaaagttgtggtttcagccagacaggtgtcaaagtcaaaaaagtatttctgaacagatacagatgtcaggccacaaaactgaag

SEQ ID NO: 14858 - RNA, 86 nt, Homo sapiens
  source 1..86: mol_type = unassigned RNA
taaaatgttaaaatgctgtgtccagggccttacctcttcagattctgactcaatctggggtggagccctggagtctgcattttaac

SEQ ID NO: 14859 - DNA, 86 bp, Homo sapiens
  source 1..86: mol_type = unassigned DNA
taaaatgttaaaatgctgtgtccagggccttacctcttcagattctgactcaatctggggtggagccctggagtctgcattttaac

SEQ ID NO: 14860 - DNA, 86 bp, Homo sapiens
  source 1..86: mol_type = unassigned DNA
gttaaaatgcagactccagggctccaccccagattgagtcagaatctgaagaggtaaggccctggacacagcattttaacatttta

SEQ ID NO: 14861 - RNA, 24 nt, Homo sapiens
  source 1..24: mol_type = unassigned RNA
tagtgtatttttttgtctagttaa

SEQ ID NO: 14862 - DNA, 24 bp, Homo sapiens
  source 1..24: mol_type = unassigned DNA
tagtgtatttttttgtctagttaa

SEQ ID NO: 14863 - DNA, 24 bp, Homo sapiens
  source 1..24: mol_type = unassigned DNA
ttaactagacaaaaaaatacacta

SEQ ID NO: 14864 - RNA, 41 nt, Homo sapiens
  source 1..41: mol_type = unassigned RNA
ttctttgattatctactgtctgttttcctccactagaaagt

SEQ ID NO: 14865 - DNA, 41 bp, Homo sapiens
  source 1..41: mol_type = unassigned DNA
ttctttgattatctactgtctgttttcctccactagaaagt

SEQ ID NO: 14866 - DNA, 41 bp, Homo sapiens
  source 1..41: mol_type = unassigned DNA
actttctagtggaggaaaacagacagtagataatcaaagaa

SEQ ID NO: 14867 - RNA, 47 nt, Homo sapiens
  source 1..47: mol_type = unassigned RNA
tatttggttatatatccttatgagatatagaggtttagtagtaaggt

SEQ ID NO: 14868 - DNA, 47 bp, Homo sapiens
  source 1..47: mol_type = unassigned DNA
tatttggttatatatccttatgagatatagaggtttagtagtaaggt

SEQ ID NO: 14869 - DNA, 47 bp, Homo sapiens
  source 1..47: mol_type = unassigned DNA
accttactactaaacctctatatctcataaggatatataaccaaata

SEQ ID NO: 14870 - RNA, 25 nt, Homo sapiens
  source 1..25: mol_type = unassigned RNA
ttcttgaggtaagttgcagtatgat

SEQ ID NO: 14871 - DNA, 25 bp, Homo sapiens
  source 1..25: mol_type = unassigned DNA
ttcttgaggtaagttgcagtatgat

SEQ ID NO: 14872 - DNA, 25 bp, Homo sapiens
  source 1..25: mol_type = unassigned DNA
atcatactgcaacttacctcaagaa

SEQ ID NO: 14873 - RNA, 33 nt, Homo sapiens
  source 1..33: mol_type = unassigned RNA
acattctttggtttgtagctgtatcatctctgc

SEQ ID NO: 14874 - DNA, 33 bp, Homo sapiens
  source 1..33: mol_type = unassigned DNA
acattctttggtttgtagctgtatcatctctgc

SEQ ID NO: 14875 - DNA, 33 bp, Homo sapiens
  source 1..33: mol_type = unassigned DNA
gcagagatgatacagctacaaaccaaagaatgt

SEQ ID NO: 14876 - RNA, 32 nt, Homo sapiens
  source 1..32: mol_type = unassigned RNA
atcccacttagaactgtgttgagctctcaccc

SEQ ID NO: 14877 - DNA, 32 bp, Homo sapiens
  source 1..32: mol_type = unassigned DNA
atcccacttagaactgtgttgagctctcaccc

SEQ ID NO: 14878 - DNA, 32 bp, Homo sapiens
  source 1..32: mol_type = unassigned DNA
gggtgagagctcaacacagttctaagtgggat

SEQ ID NO: 14879 - RNA, 25 nt, Homo sapiens
  source 1..25: mol_type = unassigned RNA
tgagtgggtatgtatgtgtatgtgt

SEQ ID NO: 14880 - DNA, 25 bp, Homo sapiens
  source 1..25: mol_type = unassigned DNA
tgagtgggtatgtatgtgtatgtgt

SEQ ID NO: 14881 - DNA, 25 bp, Homo sapiens
  source 1..25: mol_type = unassigned DNA
acacatacacatacatacccactca

SEQ ID NO: 14882 - RNA, 34 nt, Homo sapiens
  source 1..34: mol_type = unassigned RNA
tttgtgtgagtgtgtatgtatctgtatgtgtgga

SEQ ID NO: 14883 - DNA, 34 bp, Homo sapiens
  source 1..34: mol_type = unassigned DNA
tttgtgtgagtgtgtatgtatctgtatgtgtgga

SEQ ID NO: 14884 - DNA, 34 bp, Homo sapiens
  source 1..34: mol_type = unassigned DNA
tccacacatacagatacatacacactcacacaaa

SEQ ID NO: 14885 - RNA, 33 nt, Homo sapiens
  source 1..33: mol_type = unassigned RNA
aaaagaggagttagtggccagatcggaaacaca

SEQ ID NO: 14886 - DNA, 33 bp, Homo sapiens
  source 1..33: mol_type = unassigned DNA
aaaagaggagttagtggccagatcggaaacaca

SEQ ID NO: 14887 - DNA, 33 bp, Homo sapiens
  source 1..33: mol_type = unassigned DNA
tgtgtttccgatctggccactaactcctctttt

SEQ ID NO: 14888 - RNA, 43 nt, Homo sapiens
  source 1..43: mol_type = unassigned RNA
tctttggttctctctgtgtattgtgagaagtcgatggagacat

SEQ ID NO: 14889 - DNA, 43 bp, Homo sapiens
  source 1..43: mol_type = unassigned DNA
tctttggttctctctgtgtattgtgagaagtcgatggagacat

SEQ ID NO: 14890 - DNA, 43 bp, Homo sapiens
  source 1..43: mol_type = unassigned DNA
atgtctccatcgacttctcacaatacacagagagaaccaaaga

SEQ ID NO: 14891 - RNA, 115 nt, Homo sapiens
  source 1..115: mol_type = unassigned RNA
aggagtggctggactcaggtaccaagtgtcctggagtggaggagagtggagctgtcagcgtgactgtgactgctgtgggcttcccgctctgtcctcgttcagggctgtgaatgat

SEQ ID NO: 14892 - DNA, 115 bp, Homo sapiens
  source 1..115: mol_type = unassigned DNA
aggagtggctggactcaggtaccaagtgtcctggagtggaggagagtggagctgtcagcgtgactgtgactgctgtgggcttcccgctctgtcctcgttcagggctgtgaatgat

SEQ ID NO: 14893 - DNA, 115 bp, Homo sapiens
  source 1..115: mol_type = unassigned DNA
atcattcacagccctgaacgaggacagagcgggaagcccacagcagtcacagtcacgctgacagctccactctcctccactccaggacacttggtacctgagtccagccactcct

SEQ ID NO: 14894 - RNA, 90 nt, Homo sapiens
  source 1..90: mol_type = unassigned RNA
gtggctggggtgagggagggcaactagagctgtggagagttggtgggaaagctctggttaactcgctgtattcttgccctcaacttcagt

SEQ ID NO: 14895 - DNA, 90 bp, Homo sapiens
  source 1..90: mol_type = unassigned DNA
gtggctggggtgagggagggcaactagagctgtggagagttggtgggaaagctctggttaactcgctgtattcttgccctcaacttcagt

SEQ ID NO: 14896 - DNA, 90 bp, Homo sapiens
  source 1..90: mol_type = unassigned DNA
actgaagttgagggcaagaatacagcgagttaaccagagctttcccaccaactctccacagctctagttgccctccctcaccccagccac

SEQ ID NO: 14897 - RNA, 23 nt, Homo sapiens
  source 1..23: mol_type = unassigned RNA
ctttaatcttcaactgaaagtta

SEQ ID NO: 14898 - DNA, 23 bp, Homo sapiens
  source 1..23: mol_type = unassigned DNA
ctttaatcttcaactgaaagtta

SEQ ID NO: 14899 - DNA, 23 bp, Homo sapiens
  source 1..23: mol_type = unassigned DNA
taactttcagttgaagattaaag

SEQ ID NO: 14900 - RNA, 24 nt, Homo sapiens
  source 1..24: mol_type = unassigned RNA
tactgtatttttttgtctggtttc

SEQ ID NO: 14901 - DNA, 24 bp, Homo sapiens
  source 1..24: mol_type = unassigned DNA
tactgtatttttttgtctggtttc

SEQ ID NO: 14902 - DNA, 24 bp, Homo sapiens
  source 1..24: mol_type = unassigned DNA
gaaaccagacaaaaaaatacagta

SEQ ID NO: 14903 - RNA, 47 nt, Homo sapiens
  source 1..47: mol_type = unassigned RNA
ggattttttgtctttggtttctagcagtttgactgtggtatgtctag

SEQ ID NO: 14904 - DNA, 47 bp, Homo sapiens
  source 1..47: mol_type = unassigned DNA
ggattttttgtctttggtttctagcagtttgactgtggtatgtctag

SEQ ID NO: 14905 - DNA, 47 bp, Homo sapiens
  source 1..47: mol_type = unassigned DNA
ctagacataccacagtcaaactgctagaaaccaaagacaaaaaatcc

SEQ ID NO: 14906 - RNA, 34 nt, Homo sapiens
  source 1..34: mol_type = unassigned RNA
tcttggggtaggtagcagtgttttgattttttta

SEQ ID NO: 14907 - DNA, 34 bp, Homo sapiens
  source 1..34: mol_type = unassigned DNA
tcttggggtaggtagcagtgttttgattttttta

SEQ ID NO: 14908 - DNA, 34 bp, Homo sapiens
  source 1..34: mol_type = unassigned DNA
taaaaaaatcaaaacactgctacctaccccaaga

SEQ ID NO: 14909 - RNA, 22 nt, Homo sapiens
  source 1..22: mol_type = unassigned RNA
gctttggttatccagcgtcttt

SEQ ID NO: 14910 - DNA, 22 bp, Homo sapiens
  source 1..22: mol_type = unassigned DNA
gctttggttatccagcgtcttt

SEQ ID NO: 14911 - DNA, 22 bp, Homo sapiens
  source 1..22: mol_type = unassigned DNA
aaagacgctggataaccaaagc

SEQ ID NO: 14912 - RNA, 60 nt, Homo sapiens
  source 1..60: mol_type = unassigned RNA
ccttctttttatctacctgtatgcactctggataatactctgaaaagaaggaggcagggt

SEQ ID NO: 14913 - DNA, 60 bp, Homo sapiens
  source 1..60: mol_type = unassigned DNA
ccttctttttatctacctgtatgcactctggataatactctgaaaagaaggaggcagggt

SEQ ID NO: 14914 - DNA, 60 bp, Homo sapiens
  source 1..60: mol_type = unassigned DNA
accctgcctccttcttttcagagtattatccagagtgcatacaggtagataaaaagaagg

SEQ ID NO: 14915 - RNA, 25 nt, Homo sapiens
  source 1..25: mol_type = unassigned RNA
tctttggtaatccacctgtctggag

SEQ ID NO: 14916 - DNA, 25 bp, Homo sapiens
  source 1..25: mol_type = unassigned DNA
tctttggtaatccacctgtctggag

SEQ ID NO: 14917 - DNA, 25 bp, Homo sapiens
  source 1..25: mol_type = unassigned DNA
ctccagacaggtggattaccaaaga

SEQ ID NO: 14918 - RNA, 163 nt, Homo sapiens
  source 1..163: mol_type = unassigned RNA
cccctgcagcagtgattgggtctgtctccttgttgcctcttcctggttcctcctcattccctgactctgcaggtcgcagagtctggcagtgctcagtctctgacctctttgcttctgtagctgtattctctccccaggccgtcactgccagatccttcgattt

SEQ ID NO: 14919 - DNA, 163 bp, Homo sapiens
  source 1..163: mol_type = unassigned DNA
cccctgcagcagtgattgggtctgtctccttgttgcctcttcctggttcctcctcattccctgactctgcaggtcgcagagtctggcagtgctcagtctctgacctctttgcttctgtagctgtattctctccccaggccgtcactgccagatccttcgattt

SEQ ID NO: 14920 - DNA, 163 bp, Homo sapiens
  source 1..163: mol_type = unassigned DNA
aaatcgaaggatctggcagtgacggcctggggagagaatacagctacagaagcaaagaggtcagagactgagcactgccagactctgcgacctgcagagtcagggaatgaggaggaaccaggaagaggcaacaaggagacagacccaatcactgctgcagggg

SEQ ID NO: 14921 - RNA, 24 nt, Homo sapiens
  source 1..24: mol_type = unassigned RNA
ttattttttctctagctctatgag

SEQ ID NO: 14922 - DNA, 24 bp, Homo sapiens
  source 1..24: mol_type = unassigned DNA
ttattttttctctagctctatgag

SEQ ID NO: 14923 - DNA, 24 bp, Homo sapiens
  source 1..24: mol_type = unassigned DNA
ctcatagagctagagaaaaaataa

SEQ ID NO: 14924 - RNA, 25 nt, Homo sapiens
  source 1..25: mol_type = unassigned RNA
tcatgtattagtttttgttgttttt

SEQ ID NO: 14925 - DNA, 25 bp, Homo sapiens
  source 1..25: mol_type = unassigned DNA
tcatgtattagtttttgttgttttt

SEQ ID NO: 14926 - DNA, 25 bp, Homo sapiens
  source 1..25: mol_type = unassigned DNA
aaaaacaacaaaaactaatacatga

SEQ ID NO: 14927 - RNA, 30 nt, Homo sapiens
  source 1..30: mol_type = unassigned RNA
gcctctggggctcaatggccaggctgaatc

SEQ ID NO: 14928 - DNA, 30 bp, Homo sapiens
  source 1..30: mol_type = unassigned DNA
gcctctggggctcaatggccaggctgaatc

SEQ ID NO: 14929 - DNA, 30 bp, Homo sapiens
  source 1..30: mol_type = unassigned DNA
gattcagcctggccattgagccccagaggc

SEQ ID NO: 14930 - RNA, 48 nt, Homo sapiens
  source 1..48: mol_type = unassigned RNA
tgtggtattcgttttttcgttgctgtcttagtttgctgtggatgatgg

SEQ ID NO: 14931 - DNA, 48 bp, Homo sapiens
  source 1..48: mol_type = unassigned DNA
tgtggtattcgttttttcgttgctgtcttagtttgctgtggatgatgg

SEQ ID NO: 14932 - DNA, 48 bp, Homo sapiens
  source 1..48: mol_type = unassigned DNA
ccatcatccacagcaaactaagacagcaacgaaaaaacgaataccaca

SEQ ID NO: 14933 - RNA, 70 nt, Homo sapiens
  source 1..70: mol_type = unassigned RNA
cacaaaaaaaggcccgatgctgtgctctgtggttaactcctgtatgaaggggcaggaaggcagtgtgtcc

SEQ ID NO: 14934 - DNA, 70 bp, Homo sapiens
  source 1..70: mol_type = unassigned DNA
cacaaaaaaaggcccgatgctgtgctctgtggttaactcctgtatgaaggggcaggaaggcagtgtgtcc

SEQ ID NO: 14935 - DNA, 70 bp, Homo sapiens
  source 1..70: mol_type = unassigned DNA
ggacacactgccttcctgccccttcatacaggagttaaccacagagcacagcatcgggcctttttttgtg

SEQ ID NO: 14936 - RNA, 30 nt, Homo sapiens
  source 1..30: mol_type = unassigned RNA
tctttttttctccagatttatgatgctgtg

SEQ ID NO: 14937 - DNA, 30 bp, Homo sapiens
  source 1..30: mol_type = unassigned DNA
tctttttttctccagatttatgatgctgtg

SEQ ID NO: 14938 - DNA, 30 bp, Homo sapiens
  source 1..30: mol_type = unassigned DNA
cacagcatcataaatctggagaaaaaaaga

SEQ ID NO: 14939 - RNA, 45 nt, Homo sapiens
  source 1..45: mol_type = unassigned RNA
tatttgtttctccaactgtcttaagactgtgatataaaatgaaca

SEQ ID NO: 14940 - DNA, 45 bp, Homo sapiens
  source 1..45: mol_type = unassigned DNA
tatttgtttctccaactgtcttaagactgtgatataaaatgaaca

SEQ ID NO: 14941 - DNA, 45 bp, Homo sapiens
  source 1..45: mol_type = unassigned DNA
tgttcattttatatcacagtcttaagacagttggagaaacaaata

SEQ ID NO: 14942 - RNA, 41 nt, Homo sapiens
  source 1..41: mol_type = unassigned RNA
gatgttggtctgtaaatttctttggttacctctttgtcttg

SEQ ID NO: 14943 - DNA, 41 bp, Homo sapiens
  source 1..41: mol_type = unassigned DNA
gatgttggtctgtaaatttctttggttacctctttgtcttg

SEQ ID NO: 14944 - DNA, 41 bp, Homo sapiens
  source 1..41: mol_type = unassigned DNA
caagacaaagaggtaaccaaagaaatttacagaccaacatc

SEQ ID NO: 14945 - RNA, 55 nt, Homo sapiens
  source 1..55: mol_type = unassigned RNA
tgaattattatttagtctagttagagctgtgtctactgtcctgaaagaatggtga

SEQ ID NO: 14946 - DNA, 55 bp, Homo sapiens
  source 1..55: mol_type = unassigned DNA
tgaattattatttagtctagttagagctgtgtctactgtcctgaaagaatggtga

SEQ ID NO: 14947 - DNA, 55 bp, Homo sapiens
  source 1..55: mol_type = unassigned DNA
tcaccattctttcaggacagtagacacagctctaactagactaaataataattca

SEQ ID NO: 14948 - RNA, 26 nt, Homo sapiens
  source 1..26: mol_type = unassigned RNA
atcacattacactgtctacctctaat

SEQ ID NO: 14949 - DNA, 26 bp, Homo sapiens
  source 1..26: mol_type = unassigned DNA
atcacattacactgtctacctctaat

SEQ ID NO: 14950 - DNA, 26 bp, Homo sapiens
  source 1..26: mol_type = unassigned DNA
attagaggtagacagtgtaatgtgat

SEQ ID NO: 14951 - RNA, 85 nt, Homo sapiens
  source 1..85: mol_type = unassigned RNA
acagaaaatagtactttgattatatatctttatgaaatatattctgaggacgagaagaacttcaatgaaaccttgacacgtcact

SEQ ID NO: 14952 - DNA, 85 bp, Homo sapiens
  source 1..85: mol_type = unassigned DNA
acagaaaatagtactttgattatatatctttatgaaatatattctgaggacgagaagaacttcaatgaaaccttgacacgtcact

SEQ ID NO: 14953 - DNA, 85 bp, Homo sapiens
  source 1..85: mol_type = unassigned DNA
agtgacgtgtcaaggtttcattgaagttcttctcgtcctcagaatatatttcataaagatatataatcaaagtactattttctgt

SEQ ID NO: 14954 - RNA, 28 nt, Homo sapiens
  source 1..28: mol_type = unassigned RNA
cttctatttttttctctatctgtattat

SEQ ID NO: 14955 - DNA, 28 bp, Homo sapiens
  source 1..28: mol_type = unassigned DNA
cttctatttttttctctatctgtattat

SEQ ID NO: 14956 - DNA, 28 bp, Homo sapiens
  source 1..28: mol_type = unassigned DNA
ataatacagatagagaaaaaaatagaag

SEQ ID NO: 14957 - RNA, 42 nt, Homo sapiens
  source 1..42: mol_type = unassigned RNA
gcagtatttgattatctactgtatgtgtggcactggaggtgt

SEQ ID NO: 14958 - DNA, 42 bp, Homo sapiens
  source 1..42: mol_type = unassigned DNA
gcagtatttgattatctactgtatgtgtggcactggaggtgt

SEQ ID NO: 14959 - DNA, 42 bp, Homo sapiens
  source 1..42: mol_type = unassigned DNA
acacctccagtgccacacatacagtagataatcaaatactgc

SEQ ID NO: 14960 - RNA, 31 nt, Homo sapiens
  source 1..31: mol_type = unassigned RNA
ctctgtcaacataacacagaaagcctgtaat

SEQ ID NO: 14961 - DNA, 31 bp, Homo sapiens
  source 1..31: mol_type = unassigned DNA
ctctgtcaacataacacagaaagcctgtaat

SEQ ID NO: 14962 - DNA, 31 bp, Homo sapiens
  source 1..31: mol_type = unassigned DNA
attacaggctttctgtgttatgttgacagag

SEQ ID NO: 14963 - RNA, 42 nt, Homo sapiens
  source 1..42: mol_type = unassigned RNA
attccctggtgatttcgctgtatgtcaaaatttcaaaatgaa

SEQ ID NO: 14964 - DNA, 42 bp, Homo sapiens
  source 1..42: mol_type = unassigned DNA
attccctggtgatttcgctgtatgtcaaaatttcaaaatgaa

SEQ ID NO: 14965 - DNA, 42 bp, Homo sapiens
  source 1..42: mol_type = unassigned DNA
ttcattttgaaattttgacatacagcgaaatcaccagggaat

SEQ ID NO: 14966 - RNA, 91 nt, Homo sapiens
  source 1..91: mol_type = unassigned RNA
gttaacttaggagagcctgcgttgatttctagctgtcttctggaagtacctctgtctgcttatggataagtgtagttctgtgaaataagac

SEQ ID NO: 14967 - DNA, 91 bp, Homo sapiens
  source 1..91: mol_type = unassigned DNA
gttaacttaggagagcctgcgttgatttctagctgtcttctggaagtacctctgtctgcttatggataagtgtagttctgtgaaataagac

SEQ ID NO: 14968 - DNA, 91 bp, Homo sapiens
  source 1..91: mol_type = unassigned DNA
gtcttatttcacagaactacacttatccataagcagacagaggtacttccagaagacagctagaaatcaacgcaggctctcctaagttaac

SEQ ID NO: 14969 - RNA, 23 nt, Homo sapiens
  source 1..23: mol_type = unassigned RNA
tcctgggatatctagctgtagtc

SEQ ID NO: 14970 - DNA, 23 bp, Homo sapiens
  source 1..23: mol_type = unassigned DNA
tcctgggatatctagctgtagtc

SEQ ID NO: 14971 - DNA, 23 bp, Homo sapiens
  source 1..23: mol_type = unassigned DNA
gactacagctagatatcccagga

SEQ ID NO: 14972 - RNA, 53 nt, Homo sapiens
  source 1..53: mol_type = unassigned RNA
gagaccctgtgcttggggaaaccagcagttttgtggcctgacatctgaggaat

SEQ ID NO: 14973 - DNA, 53 bp, Homo sapiens
  source 1..53: mol_type = unassigned DNA
gagaccctgtgcttggggaaaccagcagttttgtggcctgacatctgaggaat

SEQ ID NO: 14974 - DNA, 53 bp, Homo sapiens
  source 1..53: mol_type = unassigned DNA
attcctcagatgtcaggccacaaaactgctggtttccccaagcacagggtctc

SEQ ID NO: 14975 - RNA, 25 nt, Homo sapiens
  source 1..25: mol_type = unassigned RNA
ttctttggttgtctagatttatctt

SEQ ID NO: 14976 - DNA, 25 bp, Homo sapiens
  source 1..25: mol_type = unassigned DNA
ttctttggttgtctagatttatctt

SEQ ID NO: 14977 - DNA, 25 bp, Homo sapiens
  source 1..25: mol_type = unassigned DNA
aagataaatctagacaaccaaagaa

SEQ ID NO: 14978 - RNA, 25 nt, Homo sapiens
  source 1..25: mol_type = unassigned RNA
tgagttattattttgtctaaataaa

SEQ ID NO: 14979 - DNA, 25 bp, Homo sapiens
  source 1..25: mol_type = unassigned DNA
tgagttattattttgtctaaataaa

SEQ ID NO: 14980 - DNA, 25 bp, Homo sapiens
  source 1..25: mol_type = unassigned DNA
tttatttagacaaaataataactca

SEQ ID NO: 14981 - RNA, 26 nt, Homo sapiens
  source 1..26: mol_type = unassigned RNA
gattattgtggctggatgtctgtaat

SEQ ID NO: 14982 - DNA, 26 bp, Homo sapiens
  source 1..26: mol_type = unassigned DNA
gattattgtggctggatgtctgtaat

SEQ ID NO: 14983 - DNA, 26 bp, Homo sapiens
  source 1..26: mol_type = unassigned DNA
attacagacatccagccacaataatc

SEQ ID NO: 14984 - RNA, 25 nt, Homo sapiens
  source 1..25: mol_type = unassigned RNA
tatttccctcttcccaccctccact

SEQ ID NO: 14985 - DNA, 25 bp, Homo sapiens
  source 1..25: mol_type = unassigned DNA
tatttccctcttcccaccctccact

SEQ ID NO: 14986 - DNA, 25 bp, Homo sapiens
  source 1..25: mol_type = unassigned DNA
agtggagggtgggaagagggaaata

SEQ ID NO: 14987 - RNA, 26 nt, Homo sapiens
  source 1..26: mol_type = unassigned RNA
agattaggttatctaaatgtatgata

SEQ ID NO: 14988 - DNA, 26 bp, Homo sapiens
  source 1..26: mol_type = unassigned DNA
agattaggttatctaaatgtatgata

SEQ ID NO: 14989 - DNA, 26 bp, Homo sapiens
  source 1..26: mol_type = unassigned DNA
tatcatacatttagataacctaatct

SEQ ID NO: 14990 - RNA, 65 nt, Homo sapiens
  source 1..65: mol_type = unassigned RNA
agaaagggaaggagccagcgacttgaagaaatggggctggacatctgcgtttagtgtttgcaaag

SEQ ID NO: 14991 - DNA, 65 bp, Homo sapiens
  source 1..65: mol_type = unassigned DNA
agaaagggaaggagccagcgacttgaagaaatggggctggacatctgcgtttagtgtttgcaaag

SEQ ID NO: 14992 - DNA, 65 bp, Homo sapiens
  source 1..65: mol_type = unassigned DNA
ctttgcaaacactaaacgcagatgtccagccccatttcttcaagtcgctggctccttccctttct

SEQ ID NO: 14993 - RNA, 56 nt, Homo sapiens
  source 1..56: mol_type = unassigned RNA
ctgggctgagtccagctccttggctaattagctgtatgactttagctaaatcactt

SEQ ID NO: 14994 - DNA, 56 bp, Homo sapiens
  source 1..56: mol_type = unassigned DNA
ctgggctgagtccagctccttggctaattagctgtatgactttagctaaatcactt

SEQ ID NO: 14995 - DNA, 56 bp, Homo sapiens
  source 1..56: mol_type = unassigned DNA
aagtgatttagctaaagtcatacagctaattagccaaggagctggactcagcccag

SEQ ID NO: 14996 - RNA, 51 nt, Homo sapiens
  source 1..51: mol_type = unassigned RNA
cctgctataaaattcctatctgtgtctctttggcgtcatggactcactcta

SEQ ID NO: 14997 - DNA, 51 bp, Homo sapiens
  source 1..51: mol_type = unassigned DNA
cctgctataaaattcctatctgtgtctctttggcgtcatggactcactcta

SEQ ID NO: 14998 - DNA, 51 bp, Homo sapiens
  source 1..51: mol_type = unassigned DNA
tagagtgagtccatgacgccaaagagacacagataggaattttatagcagg

SEQ ID NO: 14999 - RNA, 25 nt, Homo sapiens
  source 1..25: mol_type = unassigned RNA
tatttgtttctcttgctttattcca

SEQ ID NO: 15000 - DNA, 25 bp, Homo sapiens
  source 1..25: mol_type = unassigned DNA
tatttgtttctcttgctttattcca

SEQ ID NO: 15001 - DNA, 25 bp, Homo sapiens
  source 1..25: mol_type = unassigned DNA
tggaataaagcaagagaaacaaata

SEQ ID NO: 15002 - RNA, 28 nt, Homo sapiens
  source 1..28: mol_type = unassigned RNA
ttcattgtggctgaacatctggtgggta

SEQ ID NO: 15003 - DNA, 28 bp, Homo sapiens
  source 1..28: mol_type = unassigned DNA
ttcattgtggctgaacatctggtgggta

SEQ ID NO: 15004 - DNA, 28 bp, Homo sapiens
  source 1..28: mol_type = unassigned DNA
tacccaccagatgttcagccacaatgaa

SEQ ID NO: 15005 - RNA, 67 nt, Homo sapiens
  source 1..67: mol_type = unassigned RNA
ttctttcttattttgtctggctctgcctgaaatgaacagctggcatttaaatcgacggcaaatgtgc

SEQ ID NO: 15006 - DNA, 67 bp, Homo sapiens
  source 1..67: mol_type = unassigned DNA
ttctttcttattttgtctggctctgcctgaaatgaacagctggcatttaaatcgacggcaaatgtgc

SEQ ID NO: 15007 - DNA, 67 bp, Homo sapiens
  source 1..67: mol_type = unassigned DNA
gcacatttgccgtcgatttaaatgccagctgttcatttcaggcagagccagacaaaataagaaagaa

SEQ ID NO: 15008 - RNA, 42 nt, Homo sapiens
  source 1..42: mol_type = unassigned RNA
tatgggaatcattgtgcctgtacatctggtcatgggggagct

SEQ ID NO: 15009 - DNA, 42 bp, Homo sapiens
  source 1..42: mol_type = unassigned DNA
tatgggaatcattgtgcctgtacatctggtcatgggggagct

SEQ ID NO: 15010 - DNA, 42 bp, Homo sapiens
  source 1..42: mol_type = unassigned DNA
agctcccccatgaccagatgtacaggcacaatgattcccata

SEQ ID NO: 15011 - RNA, 25 nt, Homo sapiens
  source 1..25: mol_type = unassigned RNA
tattttcctcttcccagcctccatg

SEQ ID NO: 15012 - DNA, 25 bp, Homo sapiens
  source 1..25: mol_type = unassigned DNA
tattttcctcttcccagcctccatg

SEQ ID NO: 15013 - DNA, 25 bp, Homo sapiens
  source 1..25: mol_type = unassigned DNA
catggaggctgggaagaggaaaata

SEQ ID NO: 15014 - RNA, 62 nt, Homo sapiens
  source 1..62: mol_type = unassigned RNA
cgtagctggaattgtggctgggcacctgagtggactaggcagggggctaagagattggtcat

SEQ ID NO: 15015 - DNA, 62 bp, Homo sapiens
  source 1..62: mol_type = unassigned DNA
cgtagctggaattgtggctgggcacctgagtggactaggcagggggctaagagattggtcat

SEQ ID NO: 15016 - DNA, 62 bp, Homo sapiens
  source 1..62: mol_type = unassigned DNA
atgaccaatctcttagccccctgcctagtccactcaggtgcccagccacaattccagctacg

SEQ ID NO: 15017 - RNA, 193 nt, Homo sapiens
  source 1..193: mol_type = unassigned RNA
aattgtaacttcctggagattatgatcaactcatctttagttatatatctggatgatcagagttgtgaacaggtacattttgtgtacatggtcaatttgtaggccagcacagacaatttatctttgaattatgagcatttaacttcattcagggtagaaatctgtttatttcatgaggacaaggcaaaatctt

SEQ ID NO: 15018 - DNA, 193 bp, Homo sapiens
  source 1..193: mol_type = unassigned DNA
aattgtaacttcctggagattatgatcaactcatctttagttatatatctggatgatcagagttgtgaacaggtacattttgtgtacatggtcaatttgtaggccagcacagacaatttatctttgaattatgagcatttaacttcattcagggtagaaatctgtttatttcatgaggacaaggcaaaatctt

SEQ ID NO: 15019 - DNA, 193 bp, Homo sapiens
  source 1..193: mol_type = unassigned DNA
aagattttgccttgtcctcatgaaataaacagatttctaccctgaatgaagttaaatgctcataattcaaagataaattgtctgtgctggcctacaaattgaccatgtacacaaaatgtacctgttcacaactctgatcatccagatatataactaaagatgagttgatcataatctccaggaagttacaatt

SEQ ID NO: 15020 - RNA, 31 nt, Homo sapiens
  source 1..31: mol_type = unassigned RNA
tgtttggttttctagctatgtaatcacatgc

SEQ ID NO: 15021 - DNA, 31 bp, Homo sapiens
  source 1..31: mol_type = unassigned DNA
tgtttggttttctagctatgtaatcacatgc

SEQ ID NO: 15022 - DNA, 31 bp, Homo sapiens
  source 1..31: mol_type = unassigned DNA
gcatgtgattacatagctagaaaaccaaaca

SEQ ID NO: 15023 - RNA, 24 nt, Homo sapiens
  source 1..24: mol_type = unassigned RNA
ctcttttttatctccctttattac

SEQ ID NO: 15024 - DNA, 24 bp, Homo sapiens
  source 1..24: mol_type = unassigned DNA
ctcttttttatctccctttattac

SEQ ID NO: 15025 - DNA, 24 bp, Homo sapiens
  source 1..24: mol_type = unassigned DNA
gtaataaagggagataaaaaagag

SEQ ID NO: 15026 - RNA, 55 nt, Homo sapiens
  source 1..55: mol_type = unassigned RNA
gaggcagataagattaggacaagaacaacttggagttcttagttttgtgtggttc

SEQ ID NO: 15027 - DNA, 55 bp, Homo sapiens
  source 1..55: mol_type = unassigned DNA
gaggcagataagattaggacaagaacaacttggagttcttagttttgtgtggttc

SEQ ID NO: 15028 - DNA, 55 bp, Homo sapiens
  source 1..55: mol_type = unassigned DNA
gaaccacacaaaactaagaactccaagttgttcttgtcctaatcttatctgcctc

SEQ ID NO: 15029 - RNA, 33 nt, Homo sapiens
  source 1..33: mol_type = unassigned RNA
catttccctcttccaggcctcctcccaaatgga

SEQ ID NO: 15030 - DNA, 33 bp, Homo sapiens
  source 1..33: mol_type = unassigned DNA
catttccctcttccaggcctcctcccaaatgga

SEQ ID NO: 15031 - DNA, 33 bp, Homo sapiens
  source 1..33: mol_type = unassigned DNA
tccatttgggaggaggcctggaagagggaaatg

SEQ ID NO: 15032 - RNA, 23 nt, Homo sapiens
  source 1..23: mol_type = unassigned RNA
tgaattcttatttagtctctttc

SEQ ID NO: 15033 - DNA, 23 bp, Homo sapiens
  source 1..23: mol_type = unassigned DNA
tgaattcttatttagtctctttc

SEQ ID NO: 15034 - DNA, 23 bp, Homo sapiens
  source 1..23: mol_type = unassigned DNA
gaaagagactaaataagaattca

SEQ ID NO: 15035 - RNA, 24 nt, Homo sapiens
  source 1..24: mol_type = unassigned RNA
tctttagttttctagctatgtgat

SEQ ID NO: 15036 - DNA, 24 bp, Homo sapiens
  source 1..24: mol_type = unassigned DNA
tctttagttttctagctatgtgat

SEQ ID NO: 15037 - DNA, 24 bp, Homo sapiens
  source 1..24: mol_type = unassigned DNA
atcacatagctagaaaactaaaga

SEQ ID NO: 15038 - RNA, 42 nt, Homo sapiens
  source 1..42: mol_type = unassigned RNA
attctcaagcccatagtgaattgtgcccggacatctgacatc

SEQ ID NO: 15039 - DNA, 42 bp, Homo sapiens
  source 1..42: mol_type = unassigned DNA
attctcaagcccatagtgaattgtgcccggacatctgacatc

SEQ ID NO: 15040 - DNA, 42 bp, Homo sapiens
  source 1..42: mol_type = unassigned DNA
gatgtcagatgtccgggcacaattcactatgggcttgagaat

SEQ ID NO: 15041 - RNA, 29 nt, Homo sapiens
  source 1..29: mol_type = unassigned RNA
acaacgtaccccccgccgccaccagcctc

SEQ ID NO: 15042 - DNA, 29 bp, Homo sapiens
  source 1..29: mol_type = unassigned DNA
acaacgtaccccccgccgccaccagcctc

SEQ ID NO: 15043 - DNA, 29 bp, Homo sapiens
  source 1..29: mol_type = unassigned DNA
gaggctggtggcggcggggggtacgttgt

SEQ ID NO: 15044 - RNA, 24 nt, Homo sapiens
  source 1..24: mol_type = unassigned RNA
tcattggttacctagatgtgtgat

SEQ ID NO: 15045 - DNA, 24 bp, Homo sapiens
  source 1..24: mol_type = unassigned DNA
tcattggttacctagatgtgtgat

SEQ ID NO: 15046 - DNA, 24 bp, Homo sapiens
  source 1..24: mol_type = unassigned DNA
atcacacatctaggtaaccaatga

SEQ ID NO: 15047 - RNA, 24 nt, Homo sapiens
  source 1..24: mol_type = unassigned RNA
atctttggttagcatgctgtttgc

SEQ ID NO: 15048 - DNA, 24 bp, Homo sapiens
  source 1..24: mol_type = unassigned DNA
atctttggttagcatgctgtttgc

SEQ ID NO: 15049 - DNA, 24 bp, Homo sapiens
  source 1..24: mol_type = unassigned DNA
gcaaacagcatgctaaccaaagat

SEQ ID NO: 15050 - RNA, 70 nt, Homo sapiens
  source 1..70: mol_type = unassigned RNA
aactttagaattggggctggccatcagaaagacttaggcatgattagagggaggagagagtggctggaga

SEQ ID NO: 15051 - DNA, 70 bp, Homo sapiens
  source 1..70: mol_type = unassigned DNA
aactttagaattggggctggccatcagaaagacttaggcatgattagagggaggagagagtggctggaga

SEQ ID NO: 15052 - DNA, 70 bp, Homo sapiens
  source 1..70: mol_type = unassigned DNA
tctccagccactctctcctccctctaatcatgcctaagtctttctgatggccagccccaattctaaagtt

SEQ ID NO: 15053 - RNA, 23 nt, Homo sapiens
  source 1..23: mol_type = unassigned RNA
tacctggatatctagatgtattc

SEQ ID NO: 15054 - DNA, 23 bp, Homo sapiens
  source 1..23: mol_type = unassigned DNA
tacctggatatctagatgtattc

SEQ ID NO: 15055 - DNA, 23 bp, Homo sapiens
  source 1..23: mol_type = unassigned DNA
gaatacatctagatatccaggta

SEQ ID NO: 15056 - RNA, 25 nt, Homo sapiens
  source 1..25: mol_type = unassigned RNA
gagcagtgtggctggacctcagaga

SEQ ID NO: 15057 - DNA, 25 bp, Homo sapiens
  source 1..25: mol_type = unassigned DNA
gagcagtgtggctggacctcagaga

SEQ ID NO: 15058 - DNA, 25 bp, Homo sapiens
  source 1..25: mol_type = unassigned DNA
tctctgaggtccagccacactgctc

SEQ ID NO: 15059 - RNA, 120 nt, Homo sapiens
  source 1..120: mol_type = unassigned RNA
ccccccagctccttggtggcagccctggacgcggtctgggcttgcccccaccgcaattttacaaactaattctctatgcttgtctgctcaggggttcatcttaacaccagtgtgatccag

SEQ ID NO: 15060 - DNA, 120 bp, Homo sapiens
  source 1..120: mol_type = unassigned DNA
ccccccagctccttggtggcagccctggacgcggtctgggcttgcccccaccgcaattttacaaactaattctctatgcttgtctgctcaggggttcatcttaacaccagtgtgatccag

SEQ ID NO: 15061 - DNA, 120 bp, Homo sapiens
  source 1..120: mol_type = unassigned DNA
ctggatcacactggtgttaagatgaacccctgagcagacaagcatagagaattagtttgtaaaattgcggtgggggcaagcccagaccgcgtccagggctgccaccaaggagctgggggg

SEQ ID NO: 15062 - RNA, 37 nt, Homo sapiens
  source 1..37: mol_type = unassigned RNA
tatgtggttatctaagtgtatttataggtctctagaa

SEQ ID NO: 15063 - DNA, 37 bp, Homo sapiens
  source 1..37: mol_type = unassigned DNA
tatgtggttatctaagtgtatttataggtctctagaa

SEQ ID NO: 15064 - DNA, 37 bp, Homo sapiens
  source 1..37: mol_type = unassigned DNA
ttctagagacctataaatacacttagataaccacata

SEQ ID NO: 15065 - RNA, 34 nt, Homo sapiens
  source 1..34: mol_type = unassigned RNA
ggcatgtttcattctttattattttgtctcttat

SEQ ID NO: 15066 - DNA, 34 bp, Homo sapiens
  source 1..34: mol_type = unassigned DNA
ggcatgtttcattctttattattttgtctcttat

SEQ ID NO: 15067 - DNA, 34 bp, Homo sapiens
  source 1..34: mol_type = unassigned DNA
ataagagacaaaataataaagaatgaaacatgcc

SEQ ID NO: 15068 - RNA, 115 nt, Homo sapiens
  source 1..115: mol_type = unassigned RNA
tgaagttcagcactctgagttctgagtttgtgttgtgccagactcctgttgactccaacagggatggcaccatgtctgaaaggccaaagaagagacccagagccagtgaaggagg

SEQ ID NO: 15069 - DNA, 115 bp, Homo sapiens
  source 1..115: mol_type = unassigned DNA
tgaagttcagcactctgagttctgagtttgtgttgtgccagactcctgttgactccaacagggatggcaccatgtctgaaaggccaaagaagagacccagagccagtgaaggagg

SEQ ID NO: 15070 - DNA, 115 bp, Homo sapiens
  source 1..115: mol_type = unassigned DNA
cctccttcactggctctgggtctcttctttggcctttcagacatggtgccatccctgttggagtcaacaggagtctggcacaacacaaactcagaactcagagtgctgaacttca

SEQ ID NO: 15071 - RNA, 47 nt, Homo sapiens
  source 1..47: mol_type = unassigned RNA
atggaaagtactttgacacctgaccagctttgccaggattcaatttc

SEQ ID NO: 15072 - DNA, 47 bp, Homo sapiens
  source 1..47: mol_type = unassigned DNA
atggaaagtactttgacacctgaccagctttgccaggattcaatttc

SEQ ID NO: 15073 - DNA, 47 bp, Homo sapiens
  source 1..47: mol_type = unassigned DNA
gaaattgaatcctggcaaagctggtcaggtgtcaaagtactttccat

SEQ ID NO: 15074 - RNA, 26 nt, Homo sapiens
  source 1..26: mol_type = unassigned RNA
tactttggctctctagctgtaaaaac

SEQ ID NO: 15075 - DNA, 26 bp, Homo sapiens
  source 1..26: mol_type = unassigned DNA
tactttggctctctagctgtaaaaac

SEQ ID NO: 15076 - DNA, 26 bp, Homo sapiens
  source 1..26: mol_type = unassigned DNA
gtttttacagctagagagccaaagta

SEQ ID NO: 15077 - RNA, 24 nt, Homo sapiens
  source 1..24: mol_type = unassigned RNA
tcttgggttatttaggagtatgtt

SEQ ID NO: 15078 - DNA, 24 bp, Homo sapiens
  source 1..24: mol_type = unassigned DNA
tcttgggttatttaggagtatgtt

SEQ ID NO: 15079 - DNA, 24 bp, Homo sapiens
  source 1..24: mol_type = unassigned DNA
aacatactcctaaataacccaaga

SEQ ID NO: 15080 - RNA, 24 nt, Homo sapiens
  source 1..24: mol_type = unassigned RNA
tagttgtttatctattgtctgatc

SEQ ID NO: 15081 - DNA, 24 bp, Homo sapiens
  source 1..24: mol_type = unassigned DNA
tagttgtttatctattgtctgatc

SEQ ID NO: 15082 - DNA, 24 bp, Homo sapiens
  source 1..24: mol_type = unassigned DNA
gatcagacaatagataaacaacta

SEQ ID NO: 15083 - RNA, 40 nt, Homo sapiens
  source 1..40: mol_type = unassigned RNA
tccatccttattgattttgtggtctgaaaagaattcaact

SEQ ID NO: 15084 - DNA, 40 bp, Homo sapiens
  source 1..40: mol_type = unassigned DNA
tccatccttattgattttgtggtctgaaaagaattcaact

SEQ ID NO: 15085 - DNA, 40 bp, Homo sapiens
  source 1..40: mol_type = unassigned DNA
agttgaattcttttcagaccacaaaatcaataaggatgga

SEQ ID NO: 15086 - RNA, 28 nt, Homo sapiens
  source 1..28: mol_type = unassigned RNA
tcattgcttgtgtagctgtatgataaaa

SEQ ID NO: 15087 - DNA, 28 bp, Homo sapiens
  source 1..28: mol_type = unassigned DNA
tcattgcttgtgtagctgtatgataaaa

SEQ ID NO: 15088 - DNA, 28 bp, Homo sapiens
  source 1..28: mol_type = unassigned DNA
ttttatcatacagctacacaagcaatga

SEQ ID NO: 15089 - RNA, 30 nt, Homo sapiens
  source 1..30: mol_type = unassigned RNA
ctcctcaccagctgcctccctctgcagaca

SEQ ID NO: 15090 - DNA, 30 bp, Homo sapiens
  source 1..30: mol_type = unassigned DNA
ctcctcaccagctgcctccctctgcagaca

SEQ ID NO: 15091 - DNA, 30 bp, Homo sapiens
  source 1..30: mol_type = unassigned DNA
tgtctgcagagggaggcagctggtgaggag

SEQ ID NO: 15092 - RNA, 32 nt, Homo sapiens
  source 1..32: mol_type = unassigned RNA
agccaagtctctgaagaagtgaagacacgcca

SEQ ID NO: 15093 - DNA, 32 bp, Homo sapiens
  source 1..32: mol_type = unassigned DNA
agccaagtctctgaagaagtgaagacacgcca

SEQ ID NO: 15094 - DNA, 32 bp, Homo sapiens
  source 1..32: mol_type = unassigned DNA
tggcgtgtcttcacttcttcagagacttggct

SEQ ID NO: 15095 - RNA, 61 nt, Homo sapiens
  source 1..61: mol_type = unassigned RNA
acatatggttatccagctgtctgagcaccatttgttgagaagactgtcctttctccattga

SEQ ID NO: 15096 - DNA, 61 bp, Homo sapiens
  source 1..61: mol_type = unassigned DNA
acatatggttatccagctgtctgagcaccatttgttgagaagactgtcctttctccattga

SEQ ID NO: 15097 - DNA, 61 bp, Homo sapiens
  source 1..61: mol_type = unassigned DNA
tcaatggagaaaggacagtcttctcaacaaatggtgctcagacagctggataaccatatgt

SEQ ID NO: 15098 - RNA, 25 nt, Homo sapiens
  source 1..25: mol_type = unassigned RNA
atctttgtttaactagctttctcat

SEQ ID NO: 15099 - DNA, 25 bp, Homo sapiens
  source 1..25: mol_type = unassigned DNA
atctttgtttaactagctttctcat

SEQ ID NO: 15100 - DNA, 25 bp, Homo sapiens
  source 1..25: mol_type = unassigned DNA
atgagaaagctagttaaacaaagat

SEQ ID NO: 15101 - RNA, 21 nt, Homo sapiens
  source 1..21: mol_type = unassigned RNA
ggctctgtggctctatggcct

SEQ ID NO: 15102 - DNA, 21 bp, Homo sapiens
  source 1..21: mol_type = unassigned DNA
ggctctgtggctctatggcct

SEQ ID NO: 15103 - DNA, 21 bp, Homo sapiens
  source 1..21: mol_type = unassigned DNA
aggccatagagccacagagcc

SEQ ID NO: 15104 - RNA, 31 nt, Homo sapiens
  source 1..31: mol_type = unassigned RNA
ggaaggcacacggtgaatgtagagagcaggt

SEQ ID NO: 15105 - DNA, 31 bp, Homo sapiens
  source 1..31: mol_type = unassigned DNA
ggaaggcacacggtgaatgtagagagcaggt

SEQ ID NO: 15106 - DNA, 31 bp, Homo sapiens
  source 1..31: mol_type = unassigned DNA
acctgctctctacattcaccgtgtgccttcc

SEQ ID NO: 15107 - RNA, 41 nt, Homo sapiens
  source 1..41: mol_type = unassigned RNA
tctatgattcttgggttatttaggagtatgttgtataattt

SEQ ID NO: 15108 - DNA, 41 bp, Homo sapiens
  source 1..41: mol_type = unassigned DNA
tctatgattcttgggttatttaggagtatgttgtataattt

SEQ ID NO: 15109 - DNA, 41 bp, Homo sapiens
  source 1..41: mol_type = unassigned DNA
aaattatacaacatactcctaaataacccaagaatcataga

SEQ ID NO: 15110 - RNA, 26 nt, Homo sapiens
  source 1..26: mol_type = unassigned RNA
tttttccctgttagaattcattgtct

SEQ ID NO: 15111 - DNA, 26 bp, Homo sapiens
  source 1..26: mol_type = unassigned DNA
tttttccctgttagaattcattgtct

SEQ ID NO: 15112 - DNA, 26 bp, Homo sapiens
  source 1..26: mol_type = unassigned DNA
agacaatgaattctaacagggaaaaa

SEQ ID NO: 15113 - RNA, 24 nt, Homo sapiens
  source 1..24: mol_type = unassigned RNA
atcttgtggtaggtagaagaatgg

SEQ ID NO: 15114 - DNA, 24 bp, Homo sapiens
  source 1..24: mol_type = unassigned DNA
atcttgtggtaggtagaagaatgg

SEQ ID NO: 15115 - DNA, 24 bp, Homo sapiens
  source 1..24: mol_type = unassigned DNA
ccattcttctacctaccacaagat

SEQ ID NO: 15116 - RNA, 46 nt, Homo sapiens
  source 1..46: mol_type = unassigned RNA
ctgtcaaaattctgttacagaggattgtggctggacctcaggaatc

SEQ ID NO: 15117 - DNA, 46 bp, Homo sapiens
  source 1..46: mol_type = unassigned DNA
ctgtcaaaattctgttacagaggattgtggctggacctcaggaatc

SEQ ID NO: 15118 - DNA, 46 bp, Homo sapiens
  source 1..46: mol_type = unassigned DNA
gattcctgaggtccagccacaatcctctgtaacagaattttgacag

SEQ ID NO: 15119 - RNA, 60 nt, Homo sapiens
  source 1..60: mol_type = unassigned RNA
ttctttattattttgtctgttttgtactgtattaaggaggcatgcagtgggctgccacca

SEQ ID NO: 15120 - DNA, 60 bp, Homo sapiens
  source 1..60: mol_type = unassigned DNA
ttctttattattttgtctgttttgtactgtattaaggaggcatgcagtgggctgccacca

SEQ ID NO: 15121 - DNA, 60 bp, Homo sapiens
  source 1..60: mol_type = unassigned DNA
tggtggcagcccactgcatgcctccttaatacagtacaaaacagacaaaataataaagaa

SEQ ID NO: 15122 - RNA, 76 nt, Homo sapiens
  source 1..76: mol_type = unassigned RNA
tttggggggttgggttggaggatgtttttatttgtctttgttctctagctctctgaatcctgccccggatttatta

SEQ ID NO: 15123 - DNA, 76 bp, Homo sapiens
  source 1..76: mol_type = unassigned DNA
tttggggggttgggttggaggatgtttttatttgtctttgttctctagctctctgaatcctgccccggatttatta

SEQ ID NO: 15124 - DNA, 76 bp, Homo sapiens
  source 1..76: mol_type = unassigned DNA
taataaatccggggcaggattcagagagctagagaacaaagacaaataaaaacatcctccaacccaaccccccaaa

SEQ ID NO: 15125 - RNA, 31 nt, Homo sapiens
  source 1..31: mol_type = unassigned RNA
aaggagacccgggccagtgagcgggcagaga

SEQ ID NO: 15126 - DNA, 31 bp, Homo sapiens
  source 1..31: mol_type = unassigned DNA
aaggagacccgggccagtgagcgggcagaga

SEQ ID NO: 15127 - DNA, 31 bp, Homo sapiens
  source 1..31: mol_type = unassigned DNA
tctctgcccgctcactggcccgggtctcctt

SEQ ID NO: 15128 - RNA, 25 nt, Homo sapiens
  source 1..25: mol_type = unassigned RNA
gagaatagtggctggccatcagaag

SEQ ID NO: 15129 - DNA, 25 bp, Homo sapiens
  source 1..25: mol_type = unassigned DNA
gagaatagtggctggccatcagaag

SEQ ID NO: 15130 - DNA, 25 bp, Homo sapiens
  source 1..25: mol_type = unassigned DNA
cttctgatggccagccactattctc

SEQ ID NO: 15131 - RNA, 23 nt, Homo sapiens
  source 1..23: mol_type = unassigned RNA
tgatgtattattttttattgttt

SEQ ID NO: 15132 - DNA, 23 bp, Homo sapiens
  source 1..23: mol_type = unassigned DNA
tgatgtattattttttattgttt

SEQ ID NO: 15133 - DNA, 23 bp, Homo sapiens
  source 1..23: mol_type = unassigned DNA
aaacaataaaaaataatacatca

SEQ ID NO: 15134 - RNA, 36 nt, Homo sapiens
  source 1..36: mol_type = unassigned RNA
actctgaatagcatttcccttttctcggggtgtgtt

SEQ ID NO: 15135 - DNA, 36 bp, Homo sapiens
  source 1..36: mol_type = unassigned DNA
actctgaatagcatttcccttttctcggggtgtgtt

SEQ ID NO: 15136 - DNA, 36 bp, Homo sapiens
  source 1..36: mol_type = unassigned DNA
aacacaccccgagaaaagggaaatgctattcagagt

SEQ ID NO: 15137 - RNA, 29 nt, Homo sapiens
  source 1..29: mol_type = unassigned RNA
gttcatgtttgcttatctatatgtattat

SEQ ID NO: 15138 - DNA, 29 bp, Homo sapiens
  source 1..29: mol_type = unassigned DNA
gttcatgtttgcttatctatatgtattat

SEQ ID NO: 15139 - DNA, 29 bp, Homo sapiens
  source 1..29: mol_type = unassigned DNA
ataatacatatagataagcaaacatgaac

SEQ ID NO: 15140 - RNA, 38 nt, Homo sapiens
  source 1..38: mol_type = unassigned RNA
tctttgtttatataactgtctgcaacccatttctcagg

SEQ ID NO: 15141 - DNA, 38 bp, Homo sapiens
  source 1..38: mol_type = unassigned DNA
tctttgtttatataactgtctgcaacccatttctcagg

SEQ ID NO: 15142 - DNA, 38 bp, Homo sapiens
  source 1..38: mol_type = unassigned DNA
cctgagaaatgggttgcagacagttatataaacaaaga

SEQ ID NO: 15143 - RNA, 34 nt, Homo sapiens
  source 1..34: mol_type = unassigned RNA
acactggttatctgctgtctgaataatgaatctc

SEQ ID NO: 15144 - DNA, 34 bp, Homo sapiens
  source 1..34: mol_type = unassigned DNA
acactggttatctgctgtctgaataatgaatctc

SEQ ID NO: 15145 - DNA, 34 bp, Homo sapiens
  source 1..34: mol_type = unassigned DNA
gagattcattattcagacagcagataaccagtgt

SEQ ID NO: 15146 - RNA, 31 nt, Homo sapiens
  source 1..31: mol_type = unassigned RNA
gctttgcttctctagccttatgaacttacgt

SEQ ID NO: 15147 - DNA, 31 bp, Homo sapiens
  source 1..31: mol_type = unassigned DNA
gctttgcttctctagccttatgaacttacgt

SEQ ID NO: 15148 - DNA, 31 bp, Homo sapiens
  source 1..31: mol_type = unassigned DNA
acgtaagttcataaggctagagaagcaaagc

SEQ ID NO: 15149 - RNA, 24 nt, Homo sapiens
  source 1..24: mol_type = unassigned RNA
tctatcatgattgattttgttcat

SEQ ID NO: 15150 - DNA, 24 bp, Homo sapiens
  source 1..24: mol_type = unassigned DNA
tctatcatgattgattttgttcat

SEQ ID NO: 15151 - DNA, 24 bp, Homo sapiens
  source 1..24: mol_type = unassigned DNA
atgaacaaaatcaatcatgataga

SEQ ID NO: 15152 - RNA, 45 nt, Homo sapiens
  source 1..45: mol_type = unassigned RNA
gcctttgttatctaggggtatgctctgtctatgcatagtttgttg

SEQ ID NO: 15153 - DNA, 45 bp, Homo sapiens
  source 1..45: mol_type = unassigned DNA
gcctttgttatctaggggtatgctctgtctatgcatagtttgttg

SEQ ID NO: 15154 - DNA, 45 bp, Homo sapiens
  source 1..45: mol_type = unassigned DNA
caacaaactatgcatagacagagcatacccctagataacaaaggc

SEQ ID NO: 15155 - RNA, 26 nt, Homo sapiens
  source 1..26: mol_type = unassigned RNA
ttctttgagtgtctggctgtatgaaa

SEQ ID NO: 15156 - DNA, 26 bp, Homo sapiens
  source 1..26: mol_type = unassigned DNA
ttctttgagtgtctggctgtatgaaa

SEQ ID NO: 15157 - DNA, 26 bp, Homo sapiens
  source 1..26: mol_type = unassigned DNA
tttcatacagccagacactcaaagaa

SEQ ID NO: 15158 - RNA, 22 nt, Homo sapiens
  source 1..22: mol_type = unassigned RNA
tcttagggtatgtgctgtatgc

SEQ ID NO: 15159 - DNA, 22 bp, Homo sapiens
  source 1..22: mol_type = unassigned DNA
tcttagggtatgtgctgtatgc

SEQ ID NO: 15160 - DNA, 22 bp, Homo sapiens
  source 1..22: mol_type = unassigned DNA
gcatacagcacataccctaaga

SEQ ID NO: 15161 - RNA, 41 nt, Homo sapiens
  source 1..41: mol_type = unassigned RNA
tagaattgctgctggacatttgactgtccaactgttcttgc

SEQ ID NO: 15162 - DNA, 41 bp, Homo sapiens
  source 1..41: mol_type = unassigned DNA
tagaattgctgctggacatttgactgtccaactgttcttgc

SEQ ID NO: 15163 - DNA, 41 bp, Homo sapiens
  source 1..41: mol_type = unassigned DNA
gcaagaacagttggacagtcaaatgtccagcagcaattcta

SEQ ID NO: 15164 - RNA, 30 nt, Homo sapiens
  source 1..30: mol_type = unassigned RNA
ctcaaagaacttttgctggacatctgttga

SEQ ID NO: 15165 - DNA, 30 bp, Homo sapiens
  source 1..30: mol_type = unassigned DNA
ctcaaagaacttttgctggacatctgttga

SEQ ID NO: 15166 - DNA, 30 bp, Homo sapiens
  source 1..30: mol_type = unassigned DNA
tcaacagatgtccagcaaaagttctttgag

SEQ ID NO: 15167 - RNA, 50 nt, Homo sapiens
  source 1..50: mol_type = unassigned RNA
attgtgagaggattgtagctgagacctttattatctagctttatgtcttt

SEQ ID NO: 15168 - DNA, 50 bp, Homo sapiens
  source 1..50: mol_type = unassigned DNA
attgtgagaggattgtagctgagacctttattatctagctttatgtcttt

SEQ ID NO: 15169 - DNA, 50 bp, Homo sapiens
  source 1..50: mol_type = unassigned DNA
aaagacataaagctagataataaaggtctcagctacaatcctctcacaat

SEQ ID NO: 15170 - RNA, 51 nt, Homo sapiens
  source 1..51: mol_type = unassigned RNA
atcagattatttgttttttggttattgagttgtatgagctctttacatatt

SEQ ID NO: 15171 - DNA, 51 bp, Homo sapiens
  source 1..51: mol_type = unassigned DNA
atcagattatttgttttttggttattgagttgtatgagctctttacatatt

SEQ ID NO: 15172 - DNA, 51 bp, Homo sapiens
  source 1..51: mol_type = unassigned DNA
aatatgtaaagagctcatacaactcaataaccaaaaaacaaataatctgat

SEQ ID NO: 15173 - RNA, 35 nt, Homo sapiens
  source 1..35: mol_type = unassigned RNA
agttgcacttggcctctggattgtgggaattaagg

SEQ ID NO: 15174 - DNA, 35 bp, Homo sapiens
  source 1..35: mol_type = unassigned DNA
agttgcacttggcctctggattgtgggaattaagg

SEQ ID NO: 15175 - DNA, 35 bp, Homo sapiens
  source 1..35: mol_type = unassigned DNA
ccttaattcccacaatccagaggccaagtgcaact

SEQ ID NO: 15176 - RNA, 51 nt, Homo sapiens
  source 1..51: mol_type = unassigned RNA
catctgacaattttggagaacctttggatatctaactgtataatttattat

SEQ ID NO: 15177 - DNA, 51 bp, Homo sapiens
  source 1..51: mol_type = unassigned DNA
catctgacaattttggagaacctttggatatctaactgtataatttattat

SEQ ID NO: 15178 - DNA, 51 bp, Homo sapiens
  source 1..51: mol_type = unassigned DNA
ataataaattatacagttagatatccaaaggttctccaaaattgtcagatg

SEQ ID NO: 15179 - RNA, 24 nt, Homo sapiens
  source 1..24: mol_type = unassigned RNA
tacttgtttatcaagctttattac

SEQ ID NO: 15180 - DNA, 24 bp, Homo sapiens
  source 1..24: mol_type = unassigned DNA
tacttgtttatcaagctttattac

SEQ ID NO: 15181 - DNA, 24 bp, Homo sapiens
  source 1..24: mol_type = unassigned DNA
gtaataaagcttgataaacaagta

SEQ ID NO: 15182 - RNA, 24 nt, Homo sapiens
  source 1..24: mol_type = unassigned RNA
ttctttcttattttgtctcttctt

SEQ ID NO: 15183 - DNA, 24 bp, Homo sapiens
  source 1..24: mol_type = unassigned DNA
ttctttcttattttgtctcttctt

SEQ ID NO: 15184 - DNA, 24 bp, Homo sapiens
  source 1..24: mol_type = unassigned DNA
aagaagagacaaaataagaaagaa

SEQ ID NO: 15185 - RNA, 26 nt, Homo sapiens
  source 1..26: mol_type = unassigned RNA
ttgttcttgggggagtagcagaatga

SEQ ID NO: 15186 - DNA, 26 bp, Homo sapiens
  source 1..26: mol_type = unassigned DNA
ttgttcttgggggagtagcagaatga

SEQ ID NO: 15187 - DNA, 26 bp, Homo sapiens
  source 1..26: mol_type = unassigned DNA
tcattctgctactcccccaagaacaa

SEQ ID NO: 15188 - RNA, 30 nt, Homo sapiens
  source 1..30: mol_type = unassigned RNA
gaatatgctgtggagctcctctgccatata

SEQ ID NO: 15189 - DNA, 30 bp, Homo sapiens
  source 1..30: mol_type = unassigned DNA
gaatatgctgtggagctcctctgccatata

SEQ ID NO: 15190 - DNA, 30 bp, Homo sapiens
  source 1..30: mol_type = unassigned DNA
tatatggcagaggagctccacagcatattc

SEQ ID NO: 15191 - RNA, 36 nt, Homo sapiens
  source 1..36: mol_type = unassigned RNA
ctgtcttctttctttctttttttgtctagtttcatt

SEQ ID NO: 15192 - DNA, 36 bp, Homo sapiens
  source 1..36: mol_type = unassigned DNA
ctgtcttctttctttctttttttgtctagtttcatt

SEQ ID NO: 15193 - DNA, 36 bp, Homo sapiens
  source 1..36: mol_type = unassigned DNA
aatgaaactagacaaaaaaagaaagaaagaagacag

SEQ ID NO: 15194 - RNA, 37 nt, Homo sapiens
  source 1..37: mol_type = unassigned RNA
tccatcctgattgatttagttgtgatgagttggtcag

SEQ ID NO: 15195 - DNA, 37 bp, Homo sapiens
  source 1..37: mol_type = unassigned DNA
tccatcctgattgatttagttgtgatgagttggtcag

SEQ ID NO: 15196 - DNA, 37 bp, Homo sapiens
  source 1..37: mol_type = unassigned DNA
ctgaccaactcatcacaactaaatcaatcaggatgga

SEQ ID NO: 15197 - RNA, 29 nt, Homo sapiens
  source 1..29: mol_type = unassigned RNA
atgtctttggttctctggctgcaggcttc

SEQ ID NO: 15198 - DNA, 29 bp, Homo sapiens
  source 1..29: mol_type = unassigned DNA
atgtctttggttctctggctgcaggcttc

SEQ ID NO: 15199 - DNA, 29 bp, Homo sapiens
  source 1..29: mol_type = unassigned DNA
gaagcctgcagccagagaaccaaagacat

SEQ ID NO: 15200 - RNA, 59 nt, Homo sapiens
  source 1..59: mol_type = unassigned RNA
taccaccatctgaaattaccttctttggttatttaactgtctcaaatctagctttcccc

SEQ ID NO: 15201 - DNA, 59 bp, Homo sapiens
  source 1..59: mol_type = unassigned DNA
taccaccatctgaaattaccttctttggttatttaactgtctcaaatctagctttcccc

SEQ ID NO: 15202 - DNA, 59 bp, Homo sapiens
  source 1..59: mol_type = unassigned DNA
ggggaaagctagatttgagacagttaaataaccaaagaaggtaatttcagatggtggta

SEQ ID NO: 15203 - RNA, 39 nt, Homo sapiens
  source 1..39: mol_type = unassigned RNA
cttcattgtggctggacccctgcattccactgaggtctg

SEQ ID NO: 15204 - DNA, 39 bp, Homo sapiens
  source 1..39: mol_type = unassigned DNA
cttcattgtggctggacccctgcattccactgaggtctg

SEQ ID NO: 15205 - DNA, 39 bp, Homo sapiens
  source 1..39: mol_type = unassigned DNA
cagacctcagtggaatgcaggggtccagccacaatgaag

SEQ ID NO: 15206 - RNA, 31 nt, Homo sapiens
  source 1..31: mol_type = unassigned RNA
aatatttttttctagctgtatgagttctaga

SEQ ID NO: 15207 - DNA, 31 bp, Homo sapiens
  source 1..31: mol_type = unassigned DNA
aatatttttttctagctgtatgagttctaga

SEQ ID NO: 15208 - DNA, 31 bp, Homo sapiens
  source 1..31: mol_type = unassigned DNA
tctagaactcatacagctagaaaaaaatatt

SEQ ID NO: 15209 - RNA, 30 nt, Homo sapiens
  source 1..30: mol_type = unassigned RNA
tatccctatgctgcctaggctgaccttgaa

SEQ ID NO: 15210 - DNA, 30 bp, Homo sapiens
  source 1..30: mol_type = unassigned DNA
tatccctatgctgcctaggctgaccttgaa

SEQ ID NO: 15211 - DNA, 30 bp, Homo sapiens
  source 1..30: mol_type = unassigned DNA
ttcaaggtcagcctaggcagcatagggata

SEQ ID NO: 15212 - RNA, 30 nt, Homo sapiens
  source 1..30: mol_type = unassigned RNA
tatttgtttctctcgctttctctctctctc

SEQ ID NO: 15213 - DNA, 30 bp, Homo sapiens
  source 1..30: mol_type = unassigned DNA
tatttgtttctctcgctttctctctctctc

SEQ ID NO: 15214 - DNA, 30 bp, Homo sapiens
  source 1..30: mol_type = unassigned DNA
gagagagagagaaagcgagagaaacaaata

SEQ ID NO: 15215 - RNA, 24 nt, Homo sapiens
  source 1..24: mol_type = unassigned RNA
tatatggttatctatctatatgga

SEQ ID NO: 15216 - DNA, 24 bp, Homo sapiens
  source 1..24: mol_type = unassigned DNA
tatatggttatctatctatatgga

SEQ ID NO: 15217 - DNA, 24 bp, Homo sapiens
  source 1..24: mol_type = unassigned DNA
tccatatagatagataaccatata

SEQ ID NO: 15218 - RNA, 35 nt, Homo sapiens
  source 1..35: mol_type = unassigned RNA
caagtatgtaccagaattctggctggacatataat

SEQ ID NO: 15219 - DNA, 35 bp, Homo sapiens
  source 1..35: mol_type = unassigned DNA
caagtatgtaccagaattctggctggacatataat

SEQ ID NO: 15220 - DNA, 35 bp, Homo sapiens
  source 1..35: mol_type = unassigned DNA
attatatgtccagccagaattctggtacatacttg

SEQ ID NO: 15221 - RNA, 24 nt, Homo sapiens
  source 1..24: mol_type = unassigned RNA
tctttttttctctagctttctgta

SEQ ID NO: 15222 - DNA, 24 bp, Homo sapiens
  source 1..24: mol_type = unassigned DNA
tctttttttctctagctttctgta

SEQ ID NO: 15223 - DNA, 24 bp, Homo sapiens
  source 1..24: mol_type = unassigned DNA
tacagaaagctagagaaaaaaaga

SEQ ID NO: 15224 - RNA, 31 nt, Homo sapiens
  source 1..31: mol_type = unassigned RNA
cgagtccttgtttctccagctgttttttggg

SEQ ID NO: 15225 - DNA, 31 bp, Homo sapiens
  source 1..31: mol_type = unassigned DNA
cgagtccttgtttctccagctgttttttggg

SEQ ID NO: 15226 - DNA, 31 bp, Homo sapiens
  source 1..31: mol_type = unassigned DNA
cccaaaaaacagctggagaaacaaggactcg

SEQ ID NO: 15227 - RNA, 28 nt, Homo sapiens
  source 1..28: mol_type = unassigned RNA
tgaggtctgagtttgtgtagtataaaca

SEQ ID NO: 15228 - DNA, 28 bp, Homo sapiens
  source 1..28: mol_type = unassigned DNA
tgaggtctgagtttgtgtagtataaaca

SEQ ID NO: 15229 - DNA, 28 bp, Homo sapiens
  source 1..28: mol_type = unassigned DNA
tgtttatactacacaaactcagacctca

SEQ ID NO: 15230 - RNA, 22 nt, Homo sapiens
  source 1..22: mol_type = unassigned RNA
tacttggttatctagtgtctct

SEQ ID NO: 15231 - DNA, 22 bp, Homo sapiens
  source 1..22: mol_type = unassigned DNA
tacttggttatctagtgtctct

SEQ ID NO: 15232 - DNA, 22 bp, Homo sapiens
  source 1..22: mol_type = unassigned DNA
agagacactagataaccaagta

SEQ ID NO: 15233 - RNA, 22 nt, Homo sapiens
  source 1..22: mol_type = unassigned RNA
tgagaaattattttgtctagta

SEQ ID NO: 15234 - DNA, 22 bp, Homo sapiens
  source 1..22: mol_type = unassigned DNA
tgagaaattattttgtctagta

SEQ ID NO: 15235 - DNA, 22 bp, Homo sapiens
  source 1..22: mol_type = unassigned DNA
tactagacaaaataatttctca

SEQ ID NO: 15236 - RNA, 23 nt, Homo sapiens
  source 1..23: mol_type = unassigned RNA
taaatcctcattgatttttttga

SEQ ID NO: 15237 - DNA, 23 bp, Homo sapiens
  source 1..23: mol_type = unassigned DNA
taaatcctcattgatttttttga

SEQ ID NO: 15238 - DNA, 23 bp, Homo sapiens
  source 1..23: mol_type = unassigned DNA
tcaaaaaaatcaatgaggattta

SEQ ID NO: 15239 - RNA, 31 nt, Homo sapiens
  source 1..31: mol_type = unassigned RNA
gcagcccggagtagccctggaccagagttgc

SEQ ID NO: 15240 - DNA, 31 bp, Homo sapiens
  source 1..31: mol_type = unassigned DNA
gcagcccggagtagccctggaccagagttgc

SEQ ID NO: 15241 - DNA, 31 bp, Homo sapiens
  source 1..31: mol_type = unassigned DNA
gcaactctggtccagggctactccgggctgc

SEQ ID NO: 15242 - RNA, 103 nt, Homo sapiens
  source 1..103: mol_type = unassigned RNA
ttctggtcttggtggggctgtctcattcctgggttatcagctgtctgtcatcaagggaactctgctcccagaggctgtctgccatcagctggggcacctcggc

SEQ ID NO: 15243 - DNA, 103 bp, Homo sapiens
  source 1..103: mol_type = unassigned DNA
ttctggtcttggtggggctgtctcattcctgggttatcagctgtctgtcatcaagggaactctgctcccagaggctgtctgccatcagctggggcacctcggc

SEQ ID NO: 15244 - DNA, 103 bp, Homo sapiens
  source 1..103: mol_type = unassigned DNA
gccgaggtgccccagctgatggcagacagcctctgggagcagagttcccttgatgacagacagctgataacccaggaatgagacagccccaccaagaccagaa

SEQ ID NO: 15245 - RNA, 50 nt, Homo sapiens
  source 1..50: mol_type = unassigned RNA
cgattgttaggtaatgattgttccttagttatgtagttgtatgctgaaac

SEQ ID NO: 15246 - DNA, 50 bp, Homo sapiens
  source 1..50: mol_type = unassigned DNA
cgattgttaggtaatgattgttccttagttatgtagttgtatgctgaaac

SEQ ID NO: 15247 - DNA, 50 bp, Homo sapiens
  source 1..50: mol_type = unassigned DNA
gtttcagcatacaactacataactaaggaacaatcattacctaacaatcg

SEQ ID NO: 15248 - RNA, 24 nt, Homo sapiens
  source 1..24: mol_type = unassigned RNA
tagaattgctgctggacatttgac

SEQ ID NO: 15249 - DNA, 24 bp, Homo sapiens
  source 1..24: mol_type = unassigned DNA
tagaattgctgctggacatttgac

SEQ ID NO: 15250 - DNA, 24 bp, Homo sapiens
  source 1..24: mol_type = unassigned DNA
gtcaaatgtccagcagcaattcta

SEQ ID NO: 15251 - RNA, 191 nt, Homo sapiens
  source 1..191: mol_type = unassigned RNA
gaatgtctctcttccctccttgattttaaggttcatgagagcaggggccatgtctttgtttttctcactgtatcactggcacttaaaacagtgcctgacacagcaaatagttgtggaatgaacagatgaaacctgtattgagcgtctatctatgccaggtactagagagctggctgttcctcttttattcc

SEQ ID NO: 15252 - DNA, 191 bp, Homo sapiens
  source 1..191: mol_type = unassigned DNA
gaatgtctctcttccctccttgattttaaggttcatgagagcaggggccatgtctttgtttttctcactgtatcactggcacttaaaacagtgcctgacacagcaaatagttgtggaatgaacagatgaaacctgtattgagcgtctatctatgccaggtactagagagctggctgttcctcttttattcc

SEQ ID NO: 15253 - DNA, 191 bp, Homo sapiens
  source 1..191: mol_type = unassigned DNA
ggaataaaagaggaacagccagctctctagtacctggcatagatagacgctcaatacaggtttcatctgttcattccacaactatttgctgtgtcaggcactgttttaagtgccagtgatacagtgagaaaaacaaagacatggcccctgctctcatgaaccttaaaatcaaggagggaagagagacattc

SEQ ID NO: 15254 - RNA, 40 nt, Homo sapiens
  source 1..40: mol_type = unassigned RNA
cattttatcagcgcctttggtcatctaacggtctgatagg

SEQ ID NO: 15255 - DNA, 40 bp, Homo sapiens
  source 1..40: mol_type = unassigned DNA
cattttatcagcgcctttggtcatctaacggtctgatagg

SEQ ID NO: 15256 - DNA, 40 bp, Homo sapiens
  source 1..40: mol_type = unassigned DNA
cctatcagaccgttagatgaccaaaggcgctgataaaatg

SEQ ID NO: 15257 - RNA, 26 nt, Homo sapiens
  source 1..26: mol_type = unassigned RNA
tgagttagttatctgctgtattaaca

SEQ ID NO: 15258 - DNA, 26 bp, Homo sapiens
  source 1..26: mol_type = unassigned DNA
tgagttagttatctgctgtattaaca

SEQ ID NO: 15259 - DNA, 26 bp, Homo sapiens
  source 1..26: mol_type = unassigned DNA
tgttaatacagcagataactaactca

SEQ ID NO: 15260 - RNA, 36 nt, Homo sapiens
  source 1..36: mol_type = unassigned RNA
tttcccttgttttgggtttctagctgtgtgaagcta

SEQ ID NO: 15261 - DNA, 36 bp, Homo sapiens
  source 1..36: mol_type = unassigned DNA
tttcccttgttttgggtttctagctgtgtgaagcta

SEQ ID NO: 15262 - DNA, 36 bp, Homo sapiens
  source 1..36: mol_type = unassigned DNA
tagcttcacacagctagaaacccaaaacaagggaaa

SEQ ID NO: 15263 - RNA, 23 nt, Homo sapiens
  source 1..23: mol_type = unassigned RNA
tgagttataattttgtttagtta

SEQ ID NO: 15264 - DNA, 23 bp, Homo sapiens
  source 1..23: mol_type = unassigned DNA
tgagttataattttgtttagtta

SEQ ID NO: 15265 - DNA, 23 bp, Homo sapiens
  source 1..23: mol_type = unassigned DNA
taactaaacaaaattataactca

SEQ ID NO: 15266 - RNA, 24 nt, Homo sapiens
  source 1..24: mol_type = unassigned RNA
tttgtgacctgctctactaaaaaa

SEQ ID NO: 15267 - DNA, 24 bp, Homo sapiens
  source 1..24: mol_type = unassigned DNA
tttgtgacctgctctactaaaaaa

SEQ ID NO: 15268 - DNA, 24 bp, Homo sapiens
  source 1..24: mol_type = unassigned DNA
ttttttagtagagcaggtcacaaa

SEQ ID NO: 15269 - RNA, 26 nt, Homo sapiens
  source 1..26: mol_type = unassigned RNA
ttgttttgttatctagcgttattata

SEQ ID NO: 15270 - DNA, 26 bp, Homo sapiens
  source 1..26: mol_type = unassigned DNA
ttgttttgttatctagcgttattata

SEQ ID NO: 15271 - DNA, 26 bp, Homo sapiens
  source 1..26: mol_type = unassigned DNA
tataataacgctagataacaaaacaa

SEQ ID NO: 15272 - RNA, 52 nt, Homo sapiens
  source 1..52: mol_type = unassigned RNA
atgattgtgtgacctttggttataaagctgtgtgaaactcagtaagtcaaac

SEQ ID NO: 15273 - DNA, 52 bp, Homo sapiens
  source 1..52: mol_type = unassigned DNA
atgattgtgtgacctttggttataaagctgtgtgaaactcagtaagtcaaac

SEQ ID NO: 15274 - DNA, 52 bp, Homo sapiens
  source 1..52: mol_type = unassigned DNA
gtttgacttactgagtttcacacagctttataaccaaaggtcacacaatcat

SEQ ID NO: 15275 - RNA, 31 nt, Homo sapiens
  source 1..31: mol_type = unassigned RNA
tcttttgttgtctcactgtattcctaaaacc

SEQ ID NO: 15276 - DNA, 31 bp, Homo sapiens
  source 1..31: mol_type = unassigned DNA
tcttttgttgtctcactgtattcctaaaacc

SEQ ID NO: 15277 - DNA, 31 bp, Homo sapiens
  source 1..31: mol_type = unassigned DNA
ggttttaggaatacagtgagacaacaaaaga

SEQ ID NO: 15278 - RNA, 32 nt, Homo sapiens
  source 1..32: mol_type = unassigned RNA
ccatgttccaggtctctgtttctcactggaca

SEQ ID NO: 15279 - DNA, 32 bp, Homo sapiens
  source 1..32: mol_type = unassigned DNA
ccatgttccaggtctctgtttctcactggaca

SEQ ID NO: 15280 - DNA, 32 bp, Homo sapiens
  source 1..32: mol_type = unassigned DNA
tgtccagtgagaaacagagacctggaacatgg

SEQ ID NO: 15281 - RNA, 80 nt, Homo sapiens
  source 1..80: mol_type = unassigned RNA
gcattattcttgatctttgtttatatctatgtatgtgtccaatgaatatactgtaggatgtatatgtaattatatatcgt

SEQ ID NO: 15282 - DNA, 80 bp, Homo sapiens
  source 1..80: mol_type = unassigned DNA
gcattattcttgatctttgtttatatctatgtatgtgtccaatgaatatactgtaggatgtatatgtaattatatatcgt

SEQ ID NO: 15283 - DNA, 80 bp, Homo sapiens
  source 1..80: mol_type = unassigned DNA
acgatatataattacatatacatcctacagtatattcattggacacatacatagatataaacaaagatcaagaataatgc

SEQ ID NO: 15284 - RNA, 27 nt, Homo sapiens
  source 1..27: mol_type = unassigned RNA
tattatttgtttctctcggtgttttat

SEQ ID NO: 15285 - DNA, 27 bp, Homo sapiens
  source 1..27: mol_type = unassigned DNA
tattatttgtttctctcggtgttttat

SEQ ID NO: 15286 - DNA, 27 bp, Homo sapiens
  source 1..27: mol_type = unassigned DNA
ataaaacaccgagagaaacaaataata

SEQ ID NO: 15287 - RNA, 38 nt, Homo sapiens
  source 1..38: mol_type = unassigned RNA
atcagagacccagtagccagatgtagctgctgattacg

SEQ ID NO: 15288 - DNA, 38 bp, Homo sapiens
  source 1..38: mol_type = unassigned DNA
atcagagacccagtagccagatgtagctgctgattacg

SEQ ID NO: 15289 - DNA, 38 bp, Homo sapiens
  source 1..38: mol_type = unassigned DNA
cgtaatcagcagctacatctggctactgggtctctgat

SEQ ID NO: 15290 - RNA, 77 nt, Homo sapiens
  source 1..77: mol_type = unassigned RNA
tgagttcatggtttgtgtggcgggaggtattatagtgaggatggccatatggaaatacctgagaccacactcggagc

SEQ ID NO: 15291 - DNA, 77 bp, Homo sapiens
  source 1..77: mol_type = unassigned DNA
tgagttcatggtttgtgtggcgggaggtattatagtgaggatggccatatggaaatacctgagaccacactcggagc

SEQ ID NO: 15292 - DNA, 77 bp, Homo sapiens
  source 1..77: mol_type = unassigned DNA
gctccgagtgtggtctcaggtatttccatatggccatcctcactataatacctcccgccacacaaaccatgaactca

SEQ ID NO: 15293 - RNA, 32 nt, Homo sapiens
  source 1..32: mol_type = unassigned RNA
cttccttctgctttattacttggtctcgtttt

SEQ ID NO: 15294 - DNA, 32 bp, Homo sapiens
  source 1..32: mol_type = unassigned DNA
cttccttctgctttattacttggtctcgtttt

SEQ ID NO: 15295 - DNA, 32 bp, Homo sapiens
  source 1..32: mol_type = unassigned DNA
aaaacgagaccaagtaataaagcagaaggaag

SEQ ID NO: 15296 - RNA, 25 nt, Homo sapiens
  source 1..25: mol_type = unassigned RNA
ttgaggttttattttttctggttta

SEQ ID NO: 15297 - DNA, 25 bp, Homo sapiens
  source 1..25: mol_type = unassigned DNA
ttgaggttttattttttctggttta

SEQ ID NO: 15298 - DNA, 25 bp, Homo sapiens
  source 1..25: mol_type = unassigned DNA
taaaccagaaaaaataaaacctcaa

SEQ ID NO: 15299 - RNA, 55 nt, Homo sapiens
  source 1..55: mol_type = unassigned RNA
ttcttgggtatatagctgtaagttgaattactggatcaaggtaactctatgctta

SEQ ID NO: 15300 - DNA, 55 bp, Homo sapiens
  source 1..55: mol_type = unassigned DNA
ttcttgggtatatagctgtaagttgaattactggatcaaggtaactctatgctta

SEQ ID NO: 15301 - DNA, 55 bp, Homo sapiens
  source 1..55: mol_type = unassigned DNA
taagcatagagttaccttgatccagtaattcaacttacagctatatacccaagaa

SEQ ID NO: 15302 - RNA, 23 nt, Homo sapiens
  source 1..23: mol_type = unassigned RNA
tcactgctaccctgacttgtcac

SEQ ID NO: 15303 - DNA, 23 bp, Homo sapiens
  source 1..23: mol_type = unassigned DNA
tcactgctaccctgacttgtcac

SEQ ID NO: 15304 - DNA, 23 bp, Homo sapiens
  source 1..23: mol_type = unassigned DNA
gtgacaagtcagggtagcagtga

SEQ ID NO: 15305 - RNA, 30 nt, Homo sapiens
  source 1..30: mol_type = unassigned RNA
ctggccagatggcccggatgctgcttccgg

SEQ ID NO: 15306 - DNA, 30 bp, Homo sapiens
  source 1..30: mol_type = unassigned DNA
ctggccagatggcccggatgctgcttccgg

SEQ ID NO: 15307 - DNA, 30 bp, Homo sapiens
  source 1..30: mol_type = unassigned DNA
ccggaagcagcatccgggccatctggccag

SEQ ID NO: 15308 - RNA, 28 nt, Homo sapiens
  source 1..28: mol_type = unassigned RNA
aacaccttggttatctgagctatctgag

SEQ ID NO: 15309 - DNA, 28 bp, Homo sapiens
  source 1..28: mol_type = unassigned DNA
aacaccttggttatctgagctatctgag

SEQ ID NO: 15310 - DNA, 28 bp, Homo sapiens
  source 1..28: mol_type = unassigned DNA
ctcagatagctcagataaccaaggtgtt

SEQ ID NO: 15311 - RNA, 57 nt, Homo sapiens
  source 1..57: mol_type = unassigned RNA
ttagcaaggtttcaggaccaccatgatgactgctgacgtggcctgaacgcaatggag

SEQ ID NO: 15312 - DNA, 57 bp, Homo sapiens
  source 1..57: mol_type = unassigned DNA
ttagcaaggtttcaggaccaccatgatgactgctgacgtggcctgaacgcaatggag

SEQ ID NO: 15313 - DNA, 57 bp, Homo sapiens
  source 1..57: mol_type = unassigned DNA
ctccattgcgttcaggccacgtcagcagtcatcatggtggtcctgaaaccttgctaa

SEQ ID NO: 15314 - RNA, 134 nt, Homo sapiens
  source 1..134: mol_type = unassigned RNA
gggccatgtttaattacttggcttttctctttggtgtttctgttttgtttttagatatgagtggtgaactttggttatccatctgtatttaagagcaaggggctgagttttatttttcttcacagatggtgtgg

SEQ ID NO: 15315 - DNA, 134 bp, Homo sapiens
  source 1..134: mol_type = unassigned DNA
gggccatgtttaattacttggcttttctctttggtgtttctgttttgtttttagatatgagtggtgaactttggttatccatctgtatttaagagcaaggggctgagttttatttttcttcacagatggtgtgg

SEQ ID NO: 15316 - DNA, 134 bp, Homo sapiens
  source 1..134: mol_type = unassigned DNA
ccacaccatctgtgaagaaaaataaaactcagccccttgctcttaaatacagatggataaccaaagttcaccactcatatctaaaaacaaaacagaaacaccaaagagaaaagccaagtaattaaacatggccc

SEQ ID NO: 15317 - RNA, 25 nt, Homo sapiens
  source 1..25: mol_type = unassigned RNA
tctgtggttatgtaactttataaaa

SEQ ID NO: 15318 - DNA, 25 bp, Homo sapiens
  source 1..25: mol_type = unassigned DNA
tctgtggttatgtaactttataaaa

SEQ ID NO: 15319 - DNA, 25 bp, Homo sapiens
  source 1..25: mol_type = unassigned DNA
ttttataaagttacataaccacaga

SEQ ID NO: 15320 - RNA, 28 nt, Homo sapiens
  source 1..28: mol_type = unassigned RNA
ttcttggggaggtagcagaatgggaatg

SEQ ID NO: 15321 - DNA, 28 bp, Homo sapiens
  source 1..28: mol_type = unassigned DNA
ttcttggggaggtagcagaatgggaatg

SEQ ID NO: 15322 - DNA, 28 bp, Homo sapiens
  source 1..28: mol_type = unassigned DNA
cattcccattctgctacctccccaagaa

SEQ ID NO: 15323 - RNA, 28 nt, Homo sapiens
  source 1..28: mol_type = unassigned RNA
aagctgcaaggtgtagactgtatgtcac

SEQ ID NO: 15324 - DNA, 28 bp, Homo sapiens
  source 1..28: mol_type = unassigned DNA
aagctgcaaggtgtagactgtatgtcac

SEQ ID NO: 15325 - DNA, 28 bp, Homo sapiens
  source 1..28: mol_type = unassigned DNA
gtgacatacagtctacaccttgcagctt

SEQ ID NO: 15326 - RNA, 47 nt, Homo sapiens
  source 1..47: mol_type = unassigned RNA
cttcaaggttctgaggtaggcagctttatagataaaggcagtcctta

SEQ ID NO: 15327 - DNA, 47 bp, Homo sapiens
  source 1..47: mol_type = unassigned DNA
cttcaaggttctgaggtaggcagctttatagataaaggcagtcctta

SEQ ID NO: 15328 - DNA, 47 bp, Homo sapiens
  source 1..47: mol_type = unassigned DNA
taaggactgcctttatctataaagctgcctacctcagaaccttgaag

SEQ ID NO: 15329 - RNA, 25 nt, Homo sapiens
  source 1..25: mol_type = unassigned RNA
tcacattcctgttataactgcagaa

SEQ ID NO: 15330 - DNA, 25 bp, Homo sapiens
  source 1..25: mol_type = unassigned DNA
tcacattcctgttataactgcagaa

SEQ ID NO: 15331 - DNA, 25 bp, Homo sapiens
  source 1..25: mol_type = unassigned DNA
ttctgcagttataacaggaatgtga

SEQ ID NO: 15332 - RNA, 90 nt, Homo sapiens
  source 1..90: mol_type = unassigned RNA
ttaagtgtactccgttgtagaattggggaaaattagttacactaggcagtgcatgttctttggtctttagttaactgctgtatgccctat

SEQ ID NO: 15333 - DNA, 90 bp, Homo sapiens
  source 1..90: mol_type = unassigned DNA
ttaagtgtactccgttgtagaattggggaaaattagttacactaggcagtgcatgttctttggtctttagttaactgctgtatgccctat

SEQ ID NO: 15334 - DNA, 90 bp, Homo sapiens
  source 1..90: mol_type = unassigned DNA
atagggcatacagcagttaactaaagaccaaagaacatgcactgcctagtgtaactaattttccccaattctacaacggagtacacttaa

SEQ ID NO: 15335 - RNA, 53 nt, Homo sapiens
  source 1..53: mol_type = unassigned RNA
taaggtattattttctctggttatccttggccatttggcccagaacaactgca

SEQ ID NO: 15336 - DNA, 53 bp, Homo sapiens
  source 1..53: mol_type = unassigned DNA
taaggtattattttctctggttatccttggccatttggcccagaacaactgca

SEQ ID NO: 15337 - DNA, 53 bp, Homo sapiens
  source 1..53: mol_type = unassigned DNA
tgcagttgttctgggccaaatggccaaggataaccagagaaaataatacctta

SEQ ID NO: 15338 - RNA, 25 nt, Homo sapiens
  source 1..25: mol_type = unassigned RNA
gtatttgtttctttatctgtatgca

SEQ ID NO: 15339 - DNA, 25 bp, Homo sapiens
  source 1..25: mol_type = unassigned DNA
gtatttgtttctttatctgtatgca

SEQ ID NO: 15340 - DNA, 25 bp, Homo sapiens
  source 1..25: mol_type = unassigned DNA
tgcatacagataaagaaacaaatac

SEQ ID NO: 15341 - RNA, 51 nt, Homo sapiens
  source 1..51: mol_type = unassigned RNA
atactctggttggttagttggttgtcaagctgtagaatttatgagctgggt

SEQ ID NO: 15342 - DNA, 51 bp, Homo sapiens
  source 1..51: mol_type = unassigned DNA
atactctggttggttagttggttgtcaagctgtagaatttatgagctgggt

SEQ ID NO: 15343 - DNA, 51 bp, Homo sapiens
  source 1..51: mol_type = unassigned DNA
acccagctcataaattctacagcttgacaaccaactaaccaaccagagtat

SEQ ID NO: 15344 - RNA, 40 nt, Homo sapiens
  source 1..40: mol_type = unassigned RNA
cagtggttggatgtacacgatagtggctagacatctgtat

SEQ ID NO: 15345 - DNA, 40 bp, Homo sapiens
  source 1..40: mol_type = unassigned DNA
cagtggttggatgtacacgatagtggctagacatctgtat

SEQ ID NO: 15346 - DNA, 40 bp, Homo sapiens
  source 1..40: mol_type = unassigned DNA
atacagatgtctagccactatcgtgtacatccaaccactg

SEQ ID NO: 15347 - RNA, 32 nt, Homo sapiens
  source 1..32: mol_type = unassigned RNA
acccagcttatttgtttatcttgatgtcttaa

SEQ ID NO: 15348 - DNA, 32 bp, Homo sapiens
  source 1..32: mol_type = unassigned DNA
acccagcttatttgtttatcttgatgtcttaa

SEQ ID NO: 15349 - DNA, 32 bp, Homo sapiens
  source 1..32: mol_type = unassigned DNA
ttaagacatcaagataaacaaataagctgggt

SEQ ID NO: 15350 - RNA, 22 nt, Homo sapiens
  source 1..22: mol_type = unassigned RNA
tctttgctaatctagctatggg

SEQ ID NO: 15351 - DNA, 22 bp, Homo sapiens
  source 1..22: mol_type = unassigned DNA
tctttgctaatctagctatggg

SEQ ID NO: 15352 - DNA, 22 bp, Homo sapiens
  source 1..22: mol_type = unassigned DNA
cccatagctagattagcaaaga

SEQ ID NO: 15353 - RNA, 56 nt, Homo sapiens
  source 1..56: mol_type = unassigned RNA
taattgattatctagctttatcctaaatgcctctttttccctcagccgtttccatc

SEQ ID NO: 15354 - DNA, 56 bp, Homo sapiens
  source 1..56: mol_type = unassigned DNA
taattgattatctagctttatcctaaatgcctctttttccctcagccgtttccatc

SEQ ID NO: 15355 - DNA, 56 bp, Homo sapiens
  source 1..56: mol_type = unassigned DNA
gatggaaacggctgagggaaaaagaggcatttaggataaagctagataatcaatta

SEQ ID NO: 15356 - RNA, 50 nt, Homo sapiens
  source 1..50: mol_type = unassigned RNA
gatttcttctttgacccattggttatttagctgtgtgctatttaatttcc

SEQ ID NO: 15357 - DNA, 50 bp, Homo sapiens
  source 1..50: mol_type = unassigned DNA
gatttcttctttgacccattggttatttagctgtgtgctatttaatttcc

SEQ ID NO: 15358 - DNA, 50 bp, Homo sapiens
  source 1..50: mol_type = unassigned DNA
ggaaattaaatagcacacagctaaataaccaatgggtcaaagaagaaatc

SEQ ID NO: 15359 - RNA, 41 nt, Homo sapiens
  source 1..41: mol_type = unassigned RNA
ttttgtattagtttgtcaggttgagacgacctgaccttatg

SEQ ID NO: 15360 - DNA, 41 bp, Homo sapiens
  source 1..41: mol_type = unassigned DNA
ttttgtattagtttgtcaggttgagacgacctgaccttatg

SEQ ID NO: 15361 - DNA, 41 bp, Homo sapiens
  source 1..41: mol_type = unassigned DNA
cataaggtcaggtcgtctcaacctgacaaactaatacaaaa

SEQ ID NO: 15362 - RNA, 41 nt, Homo sapiens
  source 1..41: mol_type = unassigned RNA
cctctgtatgcaatgtgtctttatttctctagctgcctttc

SEQ ID NO: 15363 - DNA, 41 bp, Homo sapiens
  source 1..41: mol_type = unassigned DNA
cctctgtatgcaatgtgtctttatttctctagctgcctttc

SEQ ID NO: 15364 - DNA, 41 bp, Homo sapiens
  source 1..41: mol_type = unassigned DNA
gaaaggcagctagagaaataaagacacattgcatacagagg

SEQ ID NO: 15365 - RNA, 59 nt, Homo sapiens
  source 1..59: mol_type = unassigned RNA
tacccttgagaaccgtccatctttaacagcttacttgaatgattattttgtgtggttgc

SEQ ID NO: 15366 - DNA, 59 bp, Homo sapiens
  source 1..59: mol_type = unassigned DNA
tacccttgagaaccgtccatctttaacagcttacttgaatgattattttgtgtggttgc

SEQ ID NO: 15367 - DNA, 59 bp, Homo sapiens
  source 1..59: mol_type = unassigned DNA
gcaaccacacaaaataatcattcaagtaagctgttaaagatggacggttctcaagggta

SEQ ID NO: 15368 - RNA, 31 nt, Homo sapiens
  source 1..31: mol_type = unassigned RNA
tctttttggttatatagctctatttttttct

SEQ ID NO: 15369 - DNA, 31 bp, Homo sapiens
  source 1..31: mol_type = unassigned DNA
tctttttggttatatagctctatttttttct

SEQ ID NO: 15370 - DNA, 31 bp, Homo sapiens
  source 1..31: mol_type = unassigned DNA
agaaaaaaatagagctatataaccaaaaaga

SEQ ID NO: 15371 - RNA, 60 nt, Homo sapiens
  source 1..60: mol_type = unassigned RNA
tccattggttatctagaagtatgttgcttactttccaaacagttgggcatttcttttcct

SEQ ID NO: 15372 - DNA, 60 bp, Homo sapiens
  source 1..60: mol_type = unassigned DNA
tccattggttatctagaagtatgttgcttactttccaaacagttgggcatttcttttcct

SEQ ID NO: 15373 - DNA, 60 bp, Homo sapiens
  source 1..60: mol_type = unassigned DNA
aggaaaagaaatgcccaactgtttggaaagtaagcaacatacttctagataaccaatgga

SEQ ID NO: 15374 - RNA, 42 nt, Homo sapiens
  source 1..42: mol_type = unassigned RNA
tctgagtagttgggtttataggtgccctccaccacgcccggc

SEQ ID NO: 15375 - DNA, 42 bp, Homo sapiens
  source 1..42: mol_type = unassigned DNA
tctgagtagttgggtttataggtgccctccaccacgcccggc

SEQ ID NO: 15376 - DNA, 42 bp, Homo sapiens
  source 1..42: mol_type = unassigned DNA
gccgggcgtggtggagggcacctataaacccaactactcaga

SEQ ID NO: 15377 - RNA, 30 nt, Homo sapiens
  source 1..30: mol_type = unassigned RNA
atgcatgatttattattttgactagttagg

SEQ ID NO: 15378 - DNA, 30 bp, Homo sapiens
  source 1..30: mol_type = unassigned DNA
atgcatgatttattattttgactagttagg

SEQ ID NO: 15379 - DNA, 30 bp, Homo sapiens
  source 1..30: mol_type = unassigned DNA
cctaactagtcaaaataataaatcatgcat

SEQ ID NO: 15380 - RNA, 25 nt, Homo sapiens
  source 1..25: mol_type = unassigned RNA
gacaaactagataaccgacagtaga

SEQ ID NO: 15381 - DNA, 25 bp, Homo sapiens
  source 1..25: mol_type = unassigned DNA
gacaaactagataaccgacagtaga

SEQ ID NO: 15382 - DNA, 25 bp, Homo sapiens
  source 1..25: mol_type = unassigned DNA
tctactgtcggttatctagtttgtc

SEQ ID NO: 15383 - RNA, 23 nt, Homo sapiens
  source 1..23: mol_type = unassigned RNA
tatctggttatctttctgtattg

SEQ ID NO: 15384 - DNA, 23 bp, Homo sapiens
  source 1..23: mol_type = unassigned DNA
tatctggttatctttctgtattg

SEQ ID NO: 15385 - DNA, 23 bp, Homo sapiens
  source 1..23: mol_type = unassigned DNA
caatacagaaagataaccagata

SEQ ID NO: 15386 - RNA, 26 nt, Homo sapiens
  source 1..26: mol_type = unassigned RNA
caagaatggtggctgggcatgtgagt

SEQ ID NO: 15387 - DNA, 26 bp, Homo sapiens
  source 1..26: mol_type = unassigned DNA
caagaatggtggctgggcatgtgagt

SEQ ID NO: 15388 - DNA, 26 bp, Homo sapiens
  source 1..26: mol_type = unassigned DNA
actcacatgcccagccaccattcttg

SEQ ID NO: 15389 - RNA, 24 nt, Homo sapiens
  source 1..24: mol_type = unassigned RNA
ttcctgtattagtttgattagtta

SEQ ID NO: 15390 - DNA, 24 bp, Homo sapiens
  source 1..24: mol_type = unassigned DNA
ttcctgtattagtttgattagtta

SEQ ID NO: 15391 - DNA, 24 bp, Homo sapiens
  source 1..24: mol_type = unassigned DNA
taactaatcaaactaatacaggaa

SEQ ID NO: 15392 - RNA, 23 nt, Homo sapiens
  source 1..23: mol_type = unassigned RNA
ttcggtattattttgtatattca

SEQ ID NO: 15393 - DNA, 23 bp, Homo sapiens
  source 1..23: mol_type = unassigned DNA
ttcggtattattttgtatattca

SEQ ID NO: 15394 - DNA, 23 bp, Homo sapiens
  source 1..23: mol_type = unassigned DNA
tgaatatacaaaataataccgaa

SEQ ID NO: 15395 - RNA, 44 nt, Homo sapiens
  source 1..44: mol_type = unassigned RNA
tgagttattatttttctccttttaacttttggagtctgcagaat

SEQ ID NO: 15396 - DNA, 44 bp, Homo sapiens
  source 1..44: mol_type = unassigned DNA
tgagttattatttttctccttttaacttttggagtctgcagaat

SEQ ID NO: 15397 - DNA, 44 bp, Homo sapiens
  source 1..44: mol_type = unassigned DNA
attctgcagactccaaaagttaaaaggagaaaaataataactca

SEQ ID NO: 15398 - RNA, 22 nt, Homo sapiens
  source 1..22: mol_type = unassigned RNA
tcccaggtaacctgtctcttac

SEQ ID NO: 15399 - DNA, 22 bp, Homo sapiens
  source 1..22: mol_type = unassigned DNA
tcccaggtaacctgtctcttac

SEQ ID NO: 15400 - DNA, 22 bp, Homo sapiens
  source 1..22: mol_type = unassigned DNA
gtaagagacaggttacctggga

SEQ ID NO: 15401 - RNA, 73 nt, Homo sapiens
  source 1..73: mol_type = unassigned RNA
tgtcattagtgagaactctgaaactgtgccttccacagctacattgtgttattgttttgtgtggttgctttcg

SEQ ID NO: 15402 - DNA, 73 bp, Homo sapiens
  source 1..73: mol_type = unassigned DNA
tgtcattagtgagaactctgaaactgtgccttccacagctacattgtgttattgttttgtgtggttgctttcg

SEQ ID NO: 15403 - DNA, 73 bp, Homo sapiens
  source 1..73: mol_type = unassigned DNA
cgaaagcaaccacacaaaacaataacacaatgtagctgtggaaggcacagtttcagagttctcactaatgaca

SEQ ID NO: 15404 - RNA, 30 nt, Homo sapiens
  source 1..30: mol_type = unassigned RNA
cctttggttttatatatgtatgaatgatat

SEQ ID NO: 15405 - DNA, 30 bp, Homo sapiens
  source 1..30: mol_type = unassigned DNA
cctttggttttatatatgtatgaatgatat

SEQ ID NO: 15406 - DNA, 30 bp, Homo sapiens
  source 1..30: mol_type = unassigned DNA
atatcattcatacatatataaaaccaaagg

SEQ ID NO: 15407 - RNA, 38 nt, Homo sapiens
  source 1..38: mol_type = unassigned RNA
gtttgtatatctgagttattattttgattagttgatac

SEQ ID NO: 15408 - DNA, 38 bp, Homo sapiens
  source 1..38: mol_type = unassigned DNA
gtttgtatatctgagttattattttgattagttgatac

SEQ ID NO: 15409 - DNA, 38 bp, Homo sapiens
  source 1..38: mol_type = unassigned DNA
gtatcaactaatcaaaataataactcagatatacaaac

SEQ ID NO: 15410 - RNA, 42 nt, Homo sapiens
  source 1..42: mol_type = unassigned RNA
cagcttgtttctgttgttactttataattttgtgtggttttc

SEQ ID NO: 15411 - DNA, 42 bp, Homo sapiens
  source 1..42: mol_type = unassigned DNA
cagcttgtttctgttgttactttataattttgtgtggttttc

SEQ ID NO: 15412 - DNA, 42 bp, Homo sapiens
  source 1..42: mol_type = unassigned DNA
gaaaaccacacaaaattataaagtaacaacagaaacaagctg

SEQ ID NO: 15413 - RNA, 55 nt, Homo sapiens
  source 1..55: mol_type = unassigned RNA
aatgactgtgctactgtctttggaaaaatgtttgtctcagttggaaataataaaa

SEQ ID NO: 15414 - DNA, 55 bp, Homo sapiens
  source 1..55: mol_type = unassigned DNA
aatgactgtgctactgtctttggaaaaatgtttgtctcagttggaaataataaaa

SEQ ID NO: 15415 - DNA, 55 bp, Homo sapiens
  source 1..55: mol_type = unassigned DNA
ttttattatttccaactgagacaaacatttttccaaagacagtagcacagtcatt

SEQ ID NO: 15416 - RNA, 73 nt, Homo sapiens
  source 1..73: mol_type = unassigned RNA
agtgttgaagcaccataaatgtggatgagttcttattttctctattttgtaacttgtagtggaacttttaggt

SEQ ID NO: 15417 - DNA, 73 bp, Homo sapiens
  source 1..73: mol_type = unassigned DNA
agtgttgaagcaccataaatgtggatgagttcttattttctctattttgtaacttgtagtggaacttttaggt

SEQ ID NO: 15418 - DNA, 73 bp, Homo sapiens
  source 1..73: mol_type = unassigned DNA
acctaaaagttccactacaagttacaaaatagagaaaataagaactcatccacatttatggtgcttcaacact

SEQ ID NO: 15419 - RNA, 67 nt, Homo sapiens
  source 1..67: mol_type = unassigned RNA
ctaaacaatgttcctttctgaataattatctctgattatccttttctgtggttgactaactgtatat

SEQ ID NO: 15420 - DNA, 67 bp, Homo sapiens
  source 1..67: mol_type = unassigned DNA
ctaaacaatgttcctttctgaataattatctctgattatccttttctgtggttgactaactgtatat

SEQ ID NO: 15421 - DNA, 67 bp, Homo sapiens
  source 1..67: mol_type = unassigned DNA
atatacagttagtcaaccacagaaaaggataatcagagataattattcagaaaggaacattgtttag

SEQ ID NO: 15422 - RNA, 40 nt, Homo sapiens
  source 1..40: mol_type = unassigned RNA
tatacatttgcagagttctgagttattatttttctctttg

SEQ ID NO: 15423 - DNA, 40 bp, Homo sapiens
  source 1..40: mol_type = unassigned DNA
tatacatttgcagagttctgagttattatttttctctttg

SEQ ID NO: 15424 - DNA, 40 bp, Homo sapiens
  source 1..40: mol_type = unassigned DNA
caaagagaaaaataataactcagaactctgcaaatgtata

SEQ ID NO: 15425 - RNA, 23 nt, Homo sapiens
  source 1..23: mol_type = unassigned RNA
tcattggttacttgctgtatgtc

SEQ ID NO: 15426 - DNA, 23 bp, Homo sapiens
  source 1..23: mol_type = unassigned DNA
tcattggttacttgctgtatgtc

SEQ ID NO: 15427 - DNA, 23 bp, Homo sapiens
  source 1..23: mol_type = unassigned DNA
gacatacagcaagtaaccaatga

SEQ ID NO: 15428 - RNA, 30 nt, Homo sapiens
  source 1..30: mol_type = unassigned RNA
ttgtgaattggtgatctgctgtatgttaca

SEQ ID NO: 15429 - DNA, 30 bp, Homo sapiens
  source 1..30: mol_type = unassigned DNA
ttgtgaattggtgatctgctgtatgttaca

SEQ ID NO: 15430 - DNA, 30 bp, Homo sapiens
  source 1..30: mol_type = unassigned DNA
tgtaacatacagcagatcaccaattcacaa

SEQ ID NO: 15431 - RNA, 41 nt, Homo sapiens
  source 1..41: mol_type = unassigned RNA
ctccctttctgattcattgatttgtatatctatctttatgc

SEQ ID NO: 15432 - DNA, 41 bp, Homo sapiens
  source 1..41: mol_type = unassigned DNA
ctccctttctgattcattgatttgtatatctatctttatgc

SEQ ID NO: 15433 - DNA, 41 bp, Homo sapiens
  source 1..41: mol_type = unassigned DNA
gcataaagatagatatacaaatcaatgaatcagaaagggag

SEQ ID NO: 15434 - RNA, 63 nt, Homo sapiens
  source 1..63: mol_type = unassigned RNA
tttgttgaatgaatgaatggacgtattcaccagaattgtttggttttctagatgtaggcttta

SEQ ID NO: 15435 - DNA, 63 bp, Homo sapiens
  source 1..63: mol_type = unassigned DNA
tttgttgaatgaatgaatggacgtattcaccagaattgtttggttttctagatgtaggcttta

SEQ ID NO: 15436 - DNA, 63 bp, Homo sapiens
  source 1..63: mol_type = unassigned DNA
taaagcctacatctagaaaaccaaacaattctggtgaatacgtccattcattcattcaacaaa

SEQ ID NO: 15437 - RNA, 29 nt, Homo sapiens
  source 1..29: mol_type = unassigned RNA
cctttgggttgtagctgtatgatgtgaaa

SEQ ID NO: 15438 - DNA, 29 bp, Homo sapiens
  source 1..29: mol_type = unassigned DNA
cctttgggttgtagctgtatgatgtgaaa

SEQ ID NO: 15439 - DNA, 29 bp, Homo sapiens
  source 1..29: mol_type = unassigned DNA
tttcacatcatacagctacaacccaaagg

SEQ ID NO: 15440 - RNA, 26 nt, Homo sapiens
  source 1..26: mol_type = unassigned RNA
tgagcttcttatattgtctggttatt

SEQ ID NO: 15441 - DNA, 26 bp, Homo sapiens
  source 1..26: mol_type = unassigned DNA
tgagcttcttatattgtctggttatt

SEQ ID NO: 15442 - DNA, 26 bp, Homo sapiens
  source 1..26: mol_type = unassigned DNA
aataaccagacaatataagaagctca

SEQ ID NO: 15443 - RNA, 28 nt, Homo sapiens
  source 1..28: mol_type = unassigned RNA
tctttttttctctctctctatgaaactc

SEQ ID NO: 15444 - DNA, 28 bp, Homo sapiens
  source 1..28: mol_type = unassigned DNA
tctttttttctctctctctatgaaactc

SEQ ID NO: 15445 - DNA, 28 bp, Homo sapiens
  source 1..28: mol_type = unassigned DNA
gagtttcatagagagagagaaaaaaaga

SEQ ID NO: 15446 - RNA, 32 nt, Homo sapiens
  source 1..32: mol_type = unassigned RNA
tgtttgccagaattgtggctgtccatttgagt

SEQ ID NO: 15447 - DNA, 32 bp, Homo sapiens
  source 1..32: mol_type = unassigned DNA
tgtttgccagaattgtggctgtccatttgagt

SEQ ID NO: 15448 - DNA, 32 bp, Homo sapiens
  source 1..32: mol_type = unassigned DNA
actcaaatggacagccacaattctggcaaaca

SEQ ID NO: 15449 - RNA, 54 nt, Homo sapiens
  source 1..54: mol_type = unassigned RNA
ttttttggttataaagctgtattctggccttgagactgtacttgctgatgccca

SEQ ID NO: 15450 - DNA, 54 bp, Homo sapiens
  source 1..54: mol_type = unassigned DNA
ttttttggttataaagctgtattctggccttgagactgtacttgctgatgccca

SEQ ID NO: 15451 - DNA, 54 bp, Homo sapiens
  source 1..54: mol_type = unassigned DNA
tgggcatcagcaagtacagtctcaaggccagaatacagctttataaccaaaaaa

SEQ ID NO: 15452 - RNA, 28 nt, Homo sapiens
  source 1..28: mol_type = unassigned RNA
ctcagctgcagctgcaggactgagccgt

SEQ ID NO: 15453 - DNA, 28 bp, Homo sapiens
  source 1..28: mol_type = unassigned DNA
ctcagctgcagctgcaggactgagccgt

SEQ ID NO: 15454 - DNA, 28 bp, Homo sapiens
  source 1..28: mol_type = unassigned DNA
acggctcagtcctgcagctgcagctgag

SEQ ID NO: 15455 - RNA, 26 nt, Homo sapiens
  source 1..26: mol_type = unassigned RNA
cctctttgtttttctagttttattac

SEQ ID NO: 15456 - DNA, 26 bp, Homo sapiens
  source 1..26: mol_type = unassigned DNA
cctctttgtttttctagttttattac

SEQ ID NO: 15457 - DNA, 26 bp, Homo sapiens
  source 1..26: mol_type = unassigned DNA
gtaataaaactagaaaaacaaagagg

SEQ ID NO: 15458 - RNA, 23 nt, Homo sapiens
  source 1..23: mol_type = unassigned RNA
catttccctttcacagtctgagt

SEQ ID NO: 15459 - DNA, 23 bp, Homo sapiens
  source 1..23: mol_type = unassigned DNA
catttccctttcacagtctgagt

SEQ ID NO: 15460 - DNA, 23 bp, Homo sapiens
  source 1..23: mol_type = unassigned DNA
actcagactgtgaaagggaaatg

SEQ ID NO: 15461 - RNA, 22 nt, Homo sapiens
  source 1..22: mol_type = unassigned RNA
tctttggtaatctgctctatgg

SEQ ID NO: 15462 - DNA, 22 bp, Homo sapiens
  source 1..22: mol_type = unassigned DNA
tctttggtaatctgctctatgg

SEQ ID NO: 15463 - DNA, 22 bp, Homo sapiens
  source 1..22: mol_type = unassigned DNA
ccatagagcagattaccaaaga

SEQ ID NO: 15464 - RNA, 68 nt, Homo sapiens
  source 1..68: mol_type = unassigned RNA
aaaaaatgaaactgaccagatagtccacaggtgatcagttccaaagcctcctctagagtcagccctcc

SEQ ID NO: 15465 - DNA, 68 bp, Homo sapiens
  source 1..68: mol_type = unassigned DNA
aaaaaatgaaactgaccagatagtccacaggtgatcagttccaaagcctcctctagagtcagccctcc

SEQ ID NO: 15466 - DNA, 68 bp, Homo sapiens
  source 1..68: mol_type = unassigned DNA
ggagggctgactctagaggaggctttggaactgatcacctgtggactatctggtcagtttcatttttt

SEQ ID NO: 15467 - RNA, 23 nt, Homo sapiens
  source 1..23: mol_type = unassigned RNA
tgagttatcattttttatagttt

SEQ ID NO: 15468 - DNA, 23 bp, Homo sapiens
  source 1..23: mol_type = unassigned DNA
tgagttatcattttttatagttt

SEQ ID NO: 15469 - DNA, 23 bp, Homo sapiens
  source 1..23: mol_type = unassigned DNA
aaactataaaaaatgataactca

SEQ ID NO: 15470 - RNA, 25 nt, Homo sapiens
  source 1..25: mol_type = unassigned RNA
atgagttattactttttgtgggtgt

SEQ ID NO: 15471 - DNA, 25 bp, Homo sapiens
  source 1..25: mol_type = unassigned DNA
atgagttattactttttgtgggtgt

SEQ ID NO: 15472 - DNA, 25 bp, Homo sapiens
  source 1..25: mol_type = unassigned DNA
acacccacaaaaagtaataactcat

SEQ ID NO: 15473 - RNA, 58 nt, Homo sapiens
  source 1..58: mol_type = unassigned RNA
ctctatgaatgacatgaaactttggttacttgctgtatgtagggtcaaagagcttttg

SEQ ID NO: 15474 - DNA, 58 bp, Homo sapiens
  source 1..58: mol_type = unassigned DNA
ctctatgaatgacatgaaactttggttacttgctgtatgtagggtcaaagagcttttg

SEQ ID NO: 15475 - DNA, 58 bp, Homo sapiens
  source 1..58: mol_type = unassigned DNA
caaaagctctttgaccctacatacagcaagtaaccaaagtttcatgtcattcatagag

SEQ ID NO: 15476 - RNA, 33 nt, Homo sapiens
  source 1..33: mol_type = unassigned RNA
taagacctctatcagtggttattagctttatca

SEQ ID NO: 15477 - DNA, 33 bp, Homo sapiens
  source 1..33: mol_type = unassigned DNA
taagacctctatcagtggttattagctttatca

SEQ ID NO: 15478 - DNA, 33 bp, Homo sapiens
  source 1..33: mol_type = unassigned DNA
tgataaagctaataaccactgatagaggtctta

SEQ ID NO: 15479 - RNA, 45 nt, Homo sapiens
  source 1..45: mol_type = unassigned RNA
atctgtggttatcaaattgtataggttgttcaggagcagaatcct

SEQ ID NO: 15480 - DNA, 45 bp, Homo sapiens
  source 1..45: mol_type = unassigned DNA
atctgtggttatcaaattgtataggttgttcaggagcagaatcct

SEQ ID NO: 15481 - DNA, 45 bp, Homo sapiens
  source 1..45: mol_type = unassigned DNA
aggattctgctcctgaacaacctatacaatttgataaccacagat

SEQ ID NO: 15482 - RNA, 64 nt, Homo sapiens
  source 1..64: mol_type = unassigned RNA
tgcgagctcctgggctctgcatgccagggacctgctctttctttgtttatctactgaatgcagg

SEQ ID NO: 15483 - DNA, 64 bp, Homo sapiens
  source 1..64: mol_type = unassigned DNA
tgcgagctcctgggctctgcatgccagggacctgctctttctttgtttatctactgaatgcagg

SEQ ID NO: 15484 - DNA, 64 bp, Homo sapiens
  source 1..64: mol_type = unassigned DNA
cctgcattcagtagataaacaaagaaagagcaggtccctggcatgcagagcccaggagctcgca

SEQ ID NO: 15485 - RNA, 36 nt, Homo sapiens
  source 1..36: mol_type = unassigned RNA
actattgtggctggacttcaggctacagggtggttc

SEQ ID NO: 15486 - DNA, 36 bp, Homo sapiens
  source 1..36: mol_type = unassigned DNA
actattgtggctggacttcaggctacagggtggttc

SEQ ID NO: 15487 - DNA, 36 bp, Homo sapiens
  source 1..36: mol_type = unassigned DNA
gaaccaccctgtagcctgaagtccagccacaatagt

SEQ ID NO: 15488 - RNA, 36 nt, Homo sapiens
  source 1..36: mol_type = unassigned RNA
aaggccaggttgtcttgggttatctaagttatgaaa

SEQ ID NO: 15489 - DNA, 36 bp, Homo sapiens
  source 1..36: mol_type = unassigned DNA
aaggccaggttgtcttgggttatctaagttatgaaa

SEQ ID NO: 15490 - DNA, 36 bp, Homo sapiens
  source 1..36: mol_type = unassigned DNA
tttcataacttagataacccaagacaacctggcctt

SEQ ID NO: 15491 - RNA, 51 nt, Homo sapiens
  source 1..51: mol_type = unassigned RNA
gctcgagtaatcttcccagctcagcttcctgagtagtcgggattataggtg

SEQ ID NO: 15492 - DNA, 51 bp, Homo sapiens
  source 1..51: mol_type = unassigned DNA
gctcgagtaatcttcccagctcagcttcctgagtagtcgggattataggtg

SEQ ID NO: 15493 - DNA, 51 bp, Homo sapiens
  source 1..51: mol_type = unassigned DNA
cacctataatcccgactactcaggaagctgagctgggaagattactcgagc

SEQ ID NO: 15494 - RNA, 53 nt, Homo sapiens
  source 1..53: mol_type = unassigned RNA
catgtgctcgttgagcatttgtgtatctatctttatgaagtgtctgcaccaat

SEQ ID NO: 15495 - DNA, 53 bp, Homo sapiens
  source 1..53: mol_type = unassigned DNA
catgtgctcgttgagcatttgtgtatctatctttatgaagtgtctgcaccaat

SEQ ID NO: 15496 - DNA, 53 bp, Homo sapiens
  source 1..53: mol_type = unassigned DNA
attggtgcagacacttcataaagatagatacacaaatgctcaacgagcacatg

SEQ ID NO: 15497 - RNA, 25 nt, Homo sapiens
  source 1..25: mol_type = unassigned RNA
cctttagttctctacctttatgagt

SEQ ID NO: 15498 - DNA, 25 bp, Homo sapiens
  source 1..25: mol_type = unassigned DNA
cctttagttctctacctttatgagt

SEQ ID NO: 15499 - DNA, 25 bp, Homo sapiens
  source 1..25: mol_type = unassigned DNA
actcataaaggtagagaactaaagg

SEQ ID NO: 15500 - RNA, 54 nt, Homo sapiens
  source 1..54: mol_type = unassigned RNA
ctctgtgcacgcatctttggtaggttgctggatgagtggagaaatcaaaggcat

SEQ ID NO: 15501 - DNA, 54 bp, Homo sapiens
  source 1..54: mol_type = unassigned DNA
ctctgtgcacgcatctttggtaggttgctggatgagtggagaaatcaaaggcat

SEQ ID NO: 15502 - DNA, 54 bp, Homo sapiens
  source 1..54: mol_type = unassigned DNA
atgcctttgatttctccactcatccagcaacctaccaaagatgcgtgcacagag

SEQ ID NO: 15503 - RNA, 22 nt, Homo sapiens
  source 1..22: mol_type = unassigned RNA
ttattgggtatgtactgtatgc

SEQ ID NO: 15504 - DNA, 22 bp, Homo sapiens
  source 1..22: mol_type = unassigned DNA
ttattgggtatgtactgtatgc

SEQ ID NO: 15505 - DNA, 22 bp, Homo sapiens
  source 1..22: mol_type = unassigned DNA
gcatacagtacatacccaataa

SEQ ID NO: 15506 - RNA, 56 nt, Homo sapiens
  source 1..56: mol_type = unassigned RNA
gacaattcttgtgttagtttgtctagtattagcatttgttccctttctaatttgta

SEQ ID NO: 15507 - DNA, 56 bp, Homo sapiens
  source 1..56: mol_type = unassigned DNA
gacaattcttgtgttagtttgtctagtattagcatttgttccctttctaatttgta

SEQ ID NO: 15508 - DNA, 56 bp, Homo sapiens
  source 1..56: mol_type = unassigned DNA
tacaaattagaaagggaacaaatgctaatactagacaaactaacacaagaattgtc

SEQ ID NO: 15509 - RNA, 25 nt, Homo sapiens
  source 1..25: mol_type = unassigned RNA
taatgtattagtttgtattagttag

SEQ ID NO: 15510 - DNA, 25 bp, Homo sapiens
  source 1..25: mol_type = unassigned DNA
taatgtattagtttgtattagttag

SEQ ID NO: 15511 - DNA, 25 bp, Homo sapiens
  source 1..25: mol_type = unassigned DNA
ctaactaatacaaactaatacatta

SEQ ID NO: 15512 - RNA, 37 nt, Homo sapiens
  source 1..37: mol_type = unassigned RNA
ttcttcattctttttttagttatctagttgtaagaac

SEQ ID NO: 15513 - DNA, 37 bp, Homo sapiens
  source 1..37: mol_type = unassigned DNA
ttcttcattctttttttagttatctagttgtaagaac

SEQ ID NO: 15514 - DNA, 37 bp, Homo sapiens
  source 1..37: mol_type = unassigned DNA
gttcttacaactagataactaaaaaaagaatgaagaa

SEQ ID NO: 15515 - RNA, 24 nt, Homo sapiens
  source 1..24: mol_type = unassigned RNA
tctttgtttatcttgatttcttta

SEQ ID NO: 15516 - DNA, 24 bp, Homo sapiens
  source 1..24: mol_type = unassigned DNA
tctttgtttatcttgatttcttta

SEQ ID NO: 15517 - DNA, 24 bp, Homo sapiens
  source 1..24: mol_type = unassigned DNA
taaagaaatcaagataaacaaaga

SEQ ID NO: 15518 - RNA, 39 nt, Homo sapiens
  source 1..39: mol_type = unassigned RNA
aaaaaataaaactgatggcctgtattaccttaacaatgt

SEQ ID NO: 15519 - DNA, 39 bp, Homo sapiens
  source 1..39: mol_type = unassigned DNA
aaaaaataaaactgatggcctgtattaccttaacaatgt

SEQ ID NO: 15520 - DNA, 39 bp, Homo sapiens
  source 1..39: mol_type = unassigned DNA
acattgttaaggtaatacaggccatcagttttatttttt

SEQ ID NO: 15521 - RNA, 96 nt, Homo sapiens
  source 1..96: mol_type = unassigned RNA
atttctgttcctaacaaagactctggaccatgcagagctcattcttgagcctttacaatgctgtgtgatgggaagtgaatttctatagtaaaaatc

SEQ ID NO: 15522 - DNA, 96 bp, Homo sapiens
  source 1..96: mol_type = unassigned DNA
atttctgttcctaacaaagactctggaccatgcagagctcattcttgagcctttacaatgctgtgtgatgggaagtgaatttctatagtaaaaatc

SEQ ID NO: 15523 - DNA, 96 bp, Homo sapiens
  source 1..96: mol_type = unassigned DNA
gatttttactatagaaattcacttcccatcacacagcattgtaaaggctcaagaatgagctctgcatggtccagagtctttgttaggaacagaaat

SEQ ID NO: 15524 - RNA, 39 nt, Homo sapiens
  source 1..39: mol_type = unassigned RNA
aattgttttctctcctgtttggtcatcttgcagaatgat

SEQ ID NO: 15525 - DNA, 39 bp, Homo sapiens
  source 1..39: mol_type = unassigned DNA
aattgttttctctcctgtttggtcatcttgcagaatgat

SEQ ID NO: 15526 - DNA, 39 bp, Homo sapiens
  source 1..39: mol_type = unassigned DNA
atcattctgcaagatgaccaaacaggagagaaaacaatt

SEQ ID NO: 15527 - RNA, 47 nt, Homo sapiens
  source 1..47: mol_type = unassigned RNA
tagttggttttctatctttatgttggtgtgtgtgaatgtgtgtgtgt

SEQ ID NO: 15528 - DNA, 47 bp, Homo sapiens
  source 1..47: mol_type = unassigned DNA
tagttggttttctatctttatgttggtgtgtgtgaatgtgtgtgtgt

SEQ ID NO: 15529 - DNA, 47 bp, Homo sapiens
  source 1..47: mol_type = unassigned DNA
acacacacacattcacacacaccaacataaagatagaaaaccaacta

SEQ ID NO: 15530 - RNA, 45 nt, Homo sapiens
  source 1..45: mol_type = unassigned RNA
gtctttggtctagctgtatgtttctgggtccctgccaggcttgcg

SEQ ID NO: 15531 - DNA, 45 bp, Homo sapiens
  source 1..45: mol_type = unassigned DNA
gtctttggtctagctgtatgtttctgggtccctgccaggcttgcg

SEQ ID NO: 15532 - DNA, 45 bp, Homo sapiens
  source 1..45: mol_type = unassigned DNA
cgcaagcctggcagggacccagaaacatacagctagaccaaagac

SEQ ID NO: 15533 - RNA, 26 nt, Homo sapiens
  source 1..26: mol_type = unassigned RNA
tcctttttttatatagctttatgaga

SEQ ID NO: 15534 - DNA, 26 bp, Homo sapiens
  source 1..26: mol_type = unassigned DNA
tcctttttttatatagctttatgaga

SEQ ID NO: 15535 - DNA, 26 bp, Homo sapiens
  source 1..26: mol_type = unassigned DNA
tctcataaagctatataaaaaaagga

SEQ ID NO: 15536 - RNA, 112 nt, Homo sapiens
  source 1..112: mol_type = unassigned RNA
caattgccaatatactgtttgccagacataaacatactctggcttaaatatttttttatctttctgtatgttggtaggaagattgattctttaaatatgaaacaccagcaaa

SEQ ID NO: 15537 - DNA, 112 bp, Homo sapiens
  source 1..112: mol_type = unassigned DNA
caattgccaatatactgtttgccagacataaacatactctggcttaaatatttttttatctttctgtatgttggtaggaagattgattctttaaatatgaaacaccagcaaa

SEQ ID NO: 15538 - DNA, 112 bp, Homo sapiens
  source 1..112: mol_type = unassigned DNA
tttgctggtgtttcatatttaaagaatcaatcttcctaccaacatacagaaagataaaaaaatatttaagccagagtatgtttatgtctggcaaacagtatattggcaattg

SEQ ID NO: 15539 - RNA, 51 nt, Homo sapiens
  source 1..51: mol_type = unassigned RNA
ctcgtggtagaattgtgggattctttgattatatggctgtatttcatgaca

SEQ ID NO: 15540 - DNA, 51 bp, Homo sapiens
  source 1..51: mol_type = unassigned DNA
ctcgtggtagaattgtgggattctttgattatatggctgtatttcatgaca

SEQ ID NO: 15541 - DNA, 51 bp, Homo sapiens
  source 1..51: mol_type = unassigned DNA
tgtcatgaaatacagccatataatcaaagaatcccacaattctaccacgag

SEQ ID NO: 15542 - RNA, 83 nt, Homo sapiens
  source 1..83: mol_type = unassigned RNA
tgtaacaaatcagtagtctccaaatcgttttatgtgttagtttgtctccttagttaagtgataagtttttttatctgacaaaa

SEQ ID NO: 15543 - DNA, 83 bp, Homo sapiens
  source 1..83: mol_type = unassigned DNA
tgtaacaaatcagtagtctccaaatcgttttatgtgttagtttgtctccttagttaagtgataagtttttttatctgacaaaa

SEQ ID NO: 15544 - DNA, 83 bp, Homo sapiens
  source 1..83: mol_type = unassigned DNA
ttttgtcagataaaaaaacttatcacttaactaaggagacaaactaacacataaaacgatttggagactactgatttgttaca

SEQ ID NO: 15545 - RNA, 46 nt, Homo sapiens
  source 1..46: mol_type = unassigned RNA
gcgttagttatctggctgtctctactgtgtgttagacagatctgta

SEQ ID NO: 15546 - DNA, 46 bp, Homo sapiens
  source 1..46: mol_type = unassigned DNA
gcgttagttatctggctgtctctactgtgtgttagacagatctgta

SEQ ID NO: 15547 - DNA, 46 bp, Homo sapiens
  source 1..46: mol_type = unassigned DNA
tacagatctgtctaacacacagtagagacagccagataactaacgc

SEQ ID NO: 15548 - RNA, 26 nt, Homo sapiens
  source 1..26: mol_type = unassigned RNA
gttgagttattattttgttgagttgt

SEQ ID NO: 15549 - DNA, 26 bp, Homo sapiens
  source 1..26: mol_type = unassigned DNA
gttgagttattattttgttgagttgt

SEQ ID NO: 15550 - DNA, 26 bp, Homo sapiens
  source 1..26: mol_type = unassigned DNA
acaactcaacaaaataataactcaac

SEQ ID NO: 15551 - RNA, 182 nt, Homo sapiens
  source 1..182: mol_type = unassigned RNA
ccaatccccccaccaagttcttaggctcctgaacagaactgctaggaagttggcagagagaggcaagagggtttcctcagccctcttcagggctggacatcacccaacccctggggacagtgtctttggctgtctggctgtctgctgtcccttgaagccaaaggtaggagcagcagccgtag

SEQ ID NO: 15552 - DNA, 182 bp, Homo sapiens
  source 1..182: mol_type = unassigned DNA
ccaatccccccaccaagttcttaggctcctgaacagaactgctaggaagttggcagagagaggcaagagggtttcctcagccctcttcagggctggacatcacccaacccctggggacagtgtctttggctgtctggctgtctgctgtcccttgaagccaaaggtaggagcagcagccgtag

SEQ ID NO: 15553 - DNA, 182 bp, Homo sapiens
  source 1..182: mol_type = unassigned DNA
ctacggctgctgctcctacctttggcttcaagggacagcagacagccagacagccaaagacactgtccccaggggttgggtgatgtccagccctgaagagggctgaggaaaccctcttgcctctctctgccaacttcctagcagttctgttcaggagcctaagaacttggtggggggattgg

SEQ ID NO: 15554 - RNA, 25 nt, Homo sapiens
  source 1..25: mol_type = unassigned RNA
tttcttggttttgctcgctgtgtga

SEQ ID NO: 15555 - DNA, 25 bp, Homo sapiens
  source 1..25: mol_type = unassigned DNA
tttcttggttttgctcgctgtgtga

SEQ ID NO: 15556 - DNA, 25 bp, Homo sapiens
  source 1..25: mol_type = unassigned DNA
tcacacagcgagcaaaaccaagaaa

SEQ ID NO: 15557 - RNA, 24 nt, Homo sapiens
  source 1..24: mol_type = unassigned RNA
ataaattgatgttataactgaagg

SEQ ID NO: 15558 - DNA, 24 bp, Homo sapiens
  source 1..24: mol_type = unassigned DNA
ataaattgatgttataactgaagg

SEQ ID NO: 15559 - DNA, 24 bp, Homo sapiens
  source 1..24: mol_type = unassigned DNA
ccttcagttataacatcaatttat

SEQ ID NO: 15560 - RNA, 48 nt, Homo sapiens
  source 1..48: mol_type = unassigned RNA
tctcctataagtgaggtattagtttctttagctgctttcaaagtcttt

SEQ ID NO: 15561 - DNA, 48 bp, Homo sapiens
  source 1..48: mol_type = unassigned DNA
tctcctataagtgaggtattagtttctttagctgctttcaaagtcttt

SEQ ID NO: 15562 - DNA, 48 bp, Homo sapiens
  source 1..48: mol_type = unassigned DNA
aaagactttgaaagcagctaaagaaactaatacctcacttataggaga

SEQ ID NO: 15563 - RNA, 23 nt, Homo sapiens
  source 1..23: mol_type = unassigned RNA
gtactttcatgttataactgaaa

SEQ ID NO: 15564 - DNA, 23 bp, Homo sapiens
  source 1..23: mol_type = unassigned DNA
gtactttcatgttataactgaaa

SEQ ID NO: 15565 - DNA, 23 bp, Homo sapiens
  source 1..23: mol_type = unassigned DNA
tttcagttataacatgaaagtac

SEQ ID NO: 15566 - RNA, 37 nt, Homo sapiens
  source 1..37: mol_type = unassigned RNA
tctattatgtttttagtgtatctgtttgtatagtttt

SEQ ID NO: 15567 - DNA, 37 bp, Homo sapiens
  source 1..37: mol_type = unassigned DNA
tctattatgtttttagtgtatctgtttgtatagtttt

SEQ ID NO: 15568 - DNA, 37 bp, Homo sapiens
  source 1..37: mol_type = unassigned DNA
aaaactatacaaacagatacactaaaaacataataga

SEQ ID NO: 15569 - RNA, 42 nt, Homo sapiens
  source 1..42: mol_type = unassigned RNA
acatgtggatactttcttgattatctagctgttttgttttgc

SEQ ID NO: 15570 - DNA, 42 bp, Homo sapiens
  source 1..42: mol_type = unassigned DNA
acatgtggatactttcttgattatctagctgttttgttttgc

SEQ ID NO: 15571 - DNA, 42 bp, Homo sapiens
  source 1..42: mol_type = unassigned DNA
gcaaaacaaaacagctagataatcaagaaagtatccacatgt

SEQ ID NO: 15572 - RNA, 24 nt, Homo sapiens
  source 1..24: mol_type = unassigned RNA
ttatgtataagtttgtatctttat

SEQ ID NO: 15573 - DNA, 24 bp, Homo sapiens
  source 1..24: mol_type = unassigned DNA
ttatgtataagtttgtatctttat

SEQ ID NO: 15574 - DNA, 24 bp, Homo sapiens
  source 1..24: mol_type = unassigned DNA
ataaagatacaaacttatacataa

SEQ ID NO: 15575 - RNA, 28 nt, Homo sapiens
  source 1..28: mol_type = unassigned RNA
tacgatggttatctttctgtatgttctc

SEQ ID NO: 15576 - DNA, 28 bp, Homo sapiens
  source 1..28: mol_type = unassigned DNA
tacgatggttatctttctgtatgttctc

SEQ ID NO: 15577 - DNA, 28 bp, Homo sapiens
  source 1..28: mol_type = unassigned DNA
gagaacatacagaaagataaccatcgta

SEQ ID NO: 15578 - RNA, 25 nt, Homo sapiens
  source 1..25: mol_type = unassigned RNA
tctttgtttctattgctttattaat

SEQ ID NO: 15579 - DNA, 25 bp, Homo sapiens
  source 1..25: mol_type = unassigned DNA
tctttgtttctattgctttattaat

SEQ ID NO: 15580 - DNA, 25 bp, Homo sapiens
  source 1..25: mol_type = unassigned DNA
attaataaagcaatagaaacaaaga

SEQ ID NO: 15581 - RNA, 47 nt, Homo sapiens
  source 1..47: mol_type = unassigned RNA
ctccctaatggacacgtaattcccatttgttatctggttgtctgatt

SEQ ID NO: 15582 - DNA, 47 bp, Homo sapiens
  source 1..47: mol_type = unassigned DNA
ctccctaatggacacgtaattcccatttgttatctggttgtctgatt

SEQ ID NO: 15583 - DNA, 47 bp, Homo sapiens
  source 1..47: mol_type = unassigned DNA
aatcagacaaccagataacaaatgggaattacgtgtccattagggag

SEQ ID NO: 15584 - RNA, 39 nt, Homo sapiens
  source 1..39: mol_type = unassigned RNA
ccttctgggattttctccttgtttatatagctctcttat

SEQ ID NO: 15585 - DNA, 39 bp, Homo sapiens
  source 1..39: mol_type = unassigned DNA
ccttctgggattttctccttgtttatatagctctcttat

SEQ ID NO: 15586 - DNA, 39 bp, Homo sapiens
  source 1..39: mol_type = unassigned DNA
ataagagagctatataaacaaggagaaaatcccagaagg

SEQ ID NO: 15587 - RNA, 24 nt, Homo sapiens
  source 1..24: mol_type = unassigned RNA
gcttttgttatataactgtctgta

SEQ ID NO: 15588 - DNA, 24 bp, Homo sapiens
  source 1..24: mol_type = unassigned DNA
gcttttgttatataactgtctgta

SEQ ID NO: 15589 - DNA, 24 bp, Homo sapiens
  source 1..24: mol_type = unassigned DNA
tacagacagttatataacaaaagc

SEQ ID NO: 15590 - RNA, 24 nt, Homo sapiens
  source 1..24: mol_type = unassigned RNA
cagacttgtgtctggacaactgat

SEQ ID NO: 15591 - DNA, 24 bp, Homo sapiens
  source 1..24: mol_type = unassigned DNA
cagacttgtgtctggacaactgat

SEQ ID NO: 15592 - DNA, 24 bp, Homo sapiens
  source 1..24: mol_type = unassigned DNA
atcagttgtccagacacaagtctg

SEQ ID NO: 15593 - RNA, 25 nt, Homo sapiens
  source 1..25: mol_type = unassigned RNA
gttagttgtggctgggcatctgagt

SEQ ID NO: 15594 - DNA, 25 bp, Homo sapiens
  source 1..25: mol_type = unassigned DNA
gttagttgtggctgggcatctgagt

SEQ ID NO: 15595 - DNA, 25 bp, Homo sapiens
  source 1..25: mol_type = unassigned DNA
actcagatgcccagccacaactaac

SEQ ID NO: 15596 - RNA, 29 nt, Homo sapiens
  source 1..29: mol_type = unassigned RNA
tctttgttgatttatctgtctgagaggtt

SEQ ID NO: 15597 - DNA, 29 bp, Homo sapiens
  source 1..29: mol_type = unassigned DNA
tctttgttgatttatctgtctgagaggtt

SEQ ID NO: 15598 - DNA, 29 bp, Homo sapiens
  source 1..29: mol_type = unassigned DNA
aacctctcagacagataaatcaacaaaga

SEQ ID NO: 15599 - RNA, 83 nt, Homo sapiens
  source 1..83: mol_type = unassigned RNA
ctcaaggtgtcttatttccttgtctatctggttatctgctgcatgctggtcattgtgtctgaacgtgtgtgtgtgtgtgtgtg

SEQ ID NO: 15600 - DNA, 83 bp, Homo sapiens
  source 1..83: mol_type = unassigned DNA
ctcaaggtgtcttatttccttgtctatctggttatctgctgcatgctggtcattgtgtctgaacgtgtgtgtgtgtgtgtgtg

SEQ ID NO: 15601 - DNA, 83 bp, Homo sapiens
  source 1..83: mol_type = unassigned DNA
cacacacacacacacacacgttcagacacaatgaccagcatgcagcagataaccagatagacaaggaaataagacaccttgag

SEQ ID NO: 15602 - RNA, 50 nt, Homo sapiens
  source 1..50: mol_type = unassigned RNA
tgacaccagaaaaagatgagggtcttagagttcttattttatgtggttat

SEQ ID NO: 15603 - DNA, 50 bp, Homo sapiens
  source 1..50: mol_type = unassigned DNA
tgacaccagaaaaagatgagggtcttagagttcttattttatgtggttat

SEQ ID NO: 15604 - DNA, 50 bp, Homo sapiens
  source 1..50: mol_type = unassigned DNA
ataaccacataaaataagaactctaagaccctcatctttttctggtgtca

SEQ ID NO: 15605 - RNA, 25 nt, Homo sapiens
  source 1..25: mol_type = unassigned RNA
aatcagttattattttgtctcatga

SEQ ID NO: 15606 - DNA, 25 bp, Homo sapiens
  source 1..25: mol_type = unassigned DNA
aatcagttattattttgtctcatga

SEQ ID NO: 15607 - DNA, 25 bp, Homo sapiens
  source 1..25: mol_type = unassigned DNA
tcatgagacaaaataataactgatt

SEQ ID NO: 15608 - RNA, 79 nt, Homo sapiens
  source 1..79: mol_type = unassigned RNA
ctatactgaaaatgtgtcttcttttttcctgattgttctacctataagttattaatttttctcgtttttctaaagaatc

SEQ ID NO: 15609 - DNA, 79 bp, Homo sapiens
  source 1..79: mol_type = unassigned DNA
ctatactgaaaatgtgtcttcttttttcctgattgttctacctataagttattaatttttctcgtttttctaaagaatc

SEQ ID NO: 15610 - DNA, 79 bp, Homo sapiens
  source 1..79: mol_type = unassigned DNA
gattctttagaaaaacgagaaaaattaataacttataggtagaacaatcaggaaaaaagaagacacattttcagtatag

SEQ ID NO: 15611 - RNA, 34 nt, Homo sapiens
  source 1..34: mol_type = unassigned RNA
aaaattcttggttatctacctgtttttatttttt

SEQ ID NO: 15612 - DNA, 34 bp, Homo sapiens
  source 1..34: mol_type = unassigned DNA
aaaattcttggttatctacctgtttttatttttt

SEQ ID NO: 15613 - DNA, 34 bp, Homo sapiens
  source 1..34: mol_type = unassigned DNA
aaaaaataaaaacaggtagataaccaagaatttt

SEQ ID NO: 15614 - RNA, 24 nt, Homo sapiens
  source 1..24: mol_type = unassigned RNA
tatttggttttctctttgtatgat

SEQ ID NO: 15615 - DNA, 24 bp, Homo sapiens
  source 1..24: mol_type = unassigned DNA
tatttggttttctctttgtatgat

SEQ ID NO: 15616 - DNA, 24 bp, Homo sapiens
  source 1..24: mol_type = unassigned DNA
atcatacaaagagaaaaccaaata

SEQ ID NO: 15617 - RNA, 25 nt, Homo sapiens
  source 1..25: mol_type = unassigned RNA
tacttttgtatctatctgtatgaga

SEQ ID NO: 15618 - DNA, 25 bp, Homo sapiens
  source 1..25: mol_type = unassigned DNA
tacttttgtatctatctgtatgaga

SEQ ID NO: 15619 - DNA, 25 bp, Homo sapiens
  source 1..25: mol_type = unassigned DNA
tctcatacagatagatacaaaagta

SEQ ID NO: 15620 - RNA, 24 nt, Homo sapiens
  source 1..24: mol_type = unassigned RNA
tatttgtttagctatctgtataat

SEQ ID NO: 15621 - DNA, 24 bp, Homo sapiens
  source 1..24: mol_type = unassigned DNA
tatttgtttagctatctgtataat

SEQ ID NO: 15622 - DNA, 24 bp, Homo sapiens
  source 1..24: mol_type = unassigned DNA
attatacagatagctaaacaaata

SEQ ID NO: 15623 - RNA, 24 nt, Homo sapiens
  source 1..24: mol_type = unassigned RNA
cttatcctattttattctaattaa

SEQ ID NO: 15624 - DNA, 24 bp, Homo sapiens
  source 1..24: mol_type = unassigned DNA
cttatcctattttattctaattaa

SEQ ID NO: 15625 - DNA, 24 bp, Homo sapiens
  source 1..24: mol_type = unassigned DNA
ttaattagaataaaataggataag

SEQ ID NO: 15626 - RNA, 26 nt, Homo sapiens
  source 1..26: mol_type = unassigned RNA
cactagggtcatctagctatatgatt

SEQ ID NO: 15627 - DNA, 26 bp, Homo sapiens
  source 1..26: mol_type = unassigned DNA
cactagggtcatctagctatatgatt

SEQ ID NO: 15628 - DNA, 26 bp, Homo sapiens
  source 1..26: mol_type = unassigned DNA
aatcatatagctagatgaccctagtg

SEQ ID NO: 15629 - RNA, 24 nt, Homo sapiens
  source 1..24: mol_type = unassigned RNA
tctttattaatctagctttattag

SEQ ID NO: 15630 - DNA, 24 bp, Homo sapiens
  source 1..24: mol_type = unassigned DNA
tctttattaatctagctttattag

SEQ ID NO: 15631 - DNA, 24 bp, Homo sapiens
  source 1..24: mol_type = unassigned DNA
ctaataaagctagattaataaaga

SEQ ID NO: 15632 - RNA, 48 nt, Homo sapiens
  source 1..48: mol_type = unassigned RNA
atgggttattattttttctagttggctcagggaagttcagctctgttt

SEQ ID NO: 15633 - DNA, 48 bp, Homo sapiens
  source 1..48: mol_type = unassigned DNA
atgggttattattttttctagttggctcagggaagttcagctctgttt

SEQ ID NO: 15634 - DNA, 48 bp, Homo sapiens
  source 1..48: mol_type = unassigned DNA
aaacagagctgaacttccctgagccaactagaaaaaataataacccat

SEQ ID NO: 15635 - RNA, 39 nt, Homo sapiens
  source 1..39: mol_type = unassigned RNA
tctttttttctctggctttcttagacctgatttgtgacc

SEQ ID NO: 15636 - DNA, 39 bp, Homo sapiens
  source 1..39: mol_type = unassigned DNA
tctttttttctctggctttcttagacctgatttgtgacc

SEQ ID NO: 15637 - DNA, 39 bp, Homo sapiens
  source 1..39: mol_type = unassigned DNA
ggtcacaaatcaggtctaagaaagccagagaaaaaaaga

SEQ ID NO: 15638 - RNA, 31 nt, Homo sapiens
  source 1..31: mol_type = unassigned RNA
tctatgagaactggaaccctgggcagcctga

SEQ ID NO: 15639 - DNA, 31 bp, Homo sapiens
  source 1..31: mol_type = unassigned DNA
tctatgagaactggaaccctgggcagcctga

SEQ ID NO: 15640 - DNA, 31 bp, Homo sapiens
  source 1..31: mol_type = unassigned DNA
tcaggctgcccagggttccagttctcataga

SEQ ID NO: 15641 - RNA, 32 nt, Homo sapiens
  source 1..32: mol_type = unassigned RNA
ctgacagataggactcgggagggggaaactca

SEQ ID NO: 15642 - DNA, 32 bp, Homo sapiens
  source 1..32: mol_type = unassigned DNA
ctgacagataggactcgggagggggaaactca

SEQ ID NO: 15643 - DNA, 32 bp, Homo sapiens
  source 1..32: mol_type = unassigned DNA
tgagtttccccctcccgagtcctatctgtcag

SEQ ID NO: 15644 - RNA, 38 nt, Homo sapiens
  source 1..38: mol_type = unassigned RNA
acctttcattatatagctgtatgactgtgtttatgaca

SEQ ID NO: 15645 - DNA, 38 bp, Homo sapiens
  source 1..38: mol_type = unassigned DNA
acctttcattatatagctgtatgactgtgtttatgaca

SEQ ID NO: 15646 - DNA, 38 bp, Homo sapiens
  source 1..38: mol_type = unassigned DNA
tgtcataaacacagtcatacagctatataatgaaaggt

SEQ ID NO: 15647 - RNA, 24 nt, Homo sapiens
  source 1..24: mol_type = unassigned RNA
ttctttattattttgtgtgttctt

SEQ ID NO: 15648 - DNA, 24 bp, Homo sapiens
  source 1..24: mol_type = unassigned DNA
ttctttattattttgtgtgttctt

SEQ ID NO: 15649 - DNA, 24 bp, Homo sapiens
  source 1..24: mol_type = unassigned DNA
aagaacacacaaaataataaagaa

SEQ ID NO: 15650 - RNA, 24 nt, Homo sapiens
  source 1..24: mol_type = unassigned RNA
gtgtgtggttagctagatctatgt

SEQ ID NO: 15651 - DNA, 24 bp, Homo sapiens
  source 1..24: mol_type = unassigned DNA
gtgtgtggttagctagatctatgt

SEQ ID NO: 15652 - DNA, 24 bp, Homo sapiens
  source 1..24: mol_type = unassigned DNA
acatagatctagctaaccacacac

SEQ ID NO: 15653 - RNA, 37 nt, Homo sapiens
  source 1..37: mol_type = unassigned RNA
tatttgtttctctagccttattacctctgacccttca

SEQ ID NO: 15654 - DNA, 37 bp, Homo sapiens
  source 1..37: mol_type = unassigned DNA
tatttgtttctctagccttattacctctgacccttca

SEQ ID NO: 15655 - DNA, 37 bp, Homo sapiens
  source 1..37: mol_type = unassigned DNA
tgaagggtcagaggtaataaggctagagaaacaaata

SEQ ID NO: 15656 - RNA, 37 nt, Homo sapiens
  source 1..37: mol_type = unassigned RNA
ggtgtatgaattaggtattactattgtctcgttctgt

SEQ ID NO: 15657 - DNA, 37 bp, Homo sapiens
  source 1..37: mol_type = unassigned DNA
ggtgtatgaattaggtattactattgtctcgttctgt

SEQ ID NO: 15658 - DNA, 37 bp, Homo sapiens
  source 1..37: mol_type = unassigned DNA
acagaacgagacaatagtaatacctaattcatacacc

SEQ ID NO: 15659 - RNA, 55 nt, Homo sapiens
  source 1..55: mol_type = unassigned RNA
aaaaagacccaacaggtcttgagtggttacctgctgtgtgaatttgacatctgtc

SEQ ID NO: 15660 - DNA, 55 bp, Homo sapiens
  source 1..55: mol_type = unassigned DNA
aaaaagacccaacaggtcttgagtggttacctgctgtgtgaatttgacatctgtc

SEQ ID NO: 15661 - DNA, 55 bp, Homo sapiens
  source 1..55: mol_type = unassigned DNA
gacagatgtcaaattcacacagcaggtaaccactcaagacctgttgggtcttttt

SEQ ID NO: 15662 - RNA, 28 nt, Homo sapiens
  source 1..28: mol_type = unassigned RNA
tcttttgttttctcgatttatgtctggt

SEQ ID NO: 15663 - DNA, 28 bp, Homo sapiens
  source 1..28: mol_type = unassigned DNA
tcttttgttttctcgatttatgtctggt

SEQ ID NO: 15664 - DNA, 28 bp, Homo sapiens
  source 1..28: mol_type = unassigned DNA
accagacataaatcgagaaaacaaaaga

SEQ ID NO: 15665 - RNA, 32 nt, Homo sapiens
  source 1..32: mol_type = unassigned RNA
gccttgtgttatgtagctgtgtgaaacctctg

SEQ ID NO: 15666 - DNA, 32 bp, Homo sapiens
  source 1..32: mol_type = unassigned DNA
gccttgtgttatgtagctgtgtgaaacctctg

SEQ ID NO: 15667 - DNA, 32 bp, Homo sapiens
  source 1..32: mol_type = unassigned DNA
cagaggtttcacacagctacataacacaaggc

SEQ ID NO: 15668 - RNA, 52 nt, Homo sapiens
  source 1..52: mol_type = unassigned RNA
aatgtaaatgctgtgtaaatagttgttatactgtattattttttatggttgt

SEQ ID NO: 15669 - DNA, 52 bp, Homo sapiens
  source 1..52: mol_type = unassigned DNA
aatgtaaatgctgtgtaaatagttgttatactgtattattttttatggttgt

SEQ ID NO: 15670 - DNA, 52 bp, Homo sapiens
  source 1..52: mol_type = unassigned DNA
acaaccataaaaaataatacagtataacaactatttacacagcatttacatt

SEQ ID NO: 15671 - RNA, 45 nt, Homo sapiens
  source 1..45: mol_type = unassigned RNA
gaggcaggaagattacttgagcccaggagtttgatacctgactag

SEQ ID NO: 15672 - DNA, 45 bp, Homo sapiens
  source 1..45: mol_type = unassigned DNA
gaggcaggaagattacttgagcccaggagtttgatacctgactag

SEQ ID NO: 15673 - DNA, 45 bp, Homo sapiens
  source 1..45: mol_type = unassigned DNA
ctagtcaggtatcaaactcctgggctcaagtaatcttcctgcctc

SEQ ID NO: 15674 - RNA, 31 nt, Homo sapiens
  source 1..31: mol_type = unassigned RNA
atgagttcaggagtggggacatcagggatgt

SEQ ID NO: 15675 - DNA, 31 bp, Homo sapiens
  source 1..31: mol_type = unassigned DNA
atgagttcaggagtggggacatcagggatgt

SEQ ID NO: 15676 - DNA, 31 bp, Homo sapiens
  source 1..31: mol_type = unassigned DNA
acatccctgatgtccccactcctgaactcat

SEQ ID NO: 15677 - RNA, 24 nt, Homo sapiens
  source 1..24: mol_type = unassigned RNA
ttcctgctacccaaacttgtcaaa

SEQ ID NO: 15678 - DNA, 24 bp, Homo sapiens
  source 1..24: mol_type = unassigned DNA
ttcctgctacccaaacttgtcaaa

SEQ ID NO: 15679 - DNA, 24 bp, Homo sapiens
  source 1..24: mol_type = unassigned DNA
tttgacaagtttgggtagcaggaa

SEQ ID NO: 15680 - RNA, 105 nt, Homo sapiens
  source 1..105: mol_type = unassigned RNA
aattattttctagttgttgtgtaggtactttgtttctttatttctcttgctgtcttcctttgtgatttgatggtttcctgtagtggtatgccttgaggcctttct

SEQ ID NO: 15681 - DNA, 105 bp, Homo sapiens
  source 1..105: mol_type = unassigned DNA
aattattttctagttgttgtgtaggtactttgtttctttatttctcttgctgtcttcctttgtgatttgatggtttcctgtagtggtatgccttgaggcctttct

SEQ ID NO: 15682 - DNA, 105 bp, Homo sapiens
  source 1..105: mol_type = unassigned DNA
agaaaggcctcaaggcataccactacaggaaaccatcaaatcacaaaggaagacagcaagagaaataaagaaacaaagtacctacacaacaactagaaaataatt

SEQ ID NO: 15683 - RNA, 80 nt, Homo sapiens
  source 1..80: mol_type = unassigned RNA
tccattagaggatgaggatgaagttctgcctcttggaagcggtggttatctatgtgtattattagaatctgattttacat

SEQ ID NO: 15684 - DNA, 80 bp, Homo sapiens
  source 1..80: mol_type = unassigned DNA
tccattagaggatgaggatgaagttctgcctcttggaagcggtggttatctatgtgtattattagaatctgattttacat

SEQ ID NO: 15685 - DNA, 80 bp, Homo sapiens
  source 1..80: mol_type = unassigned DNA
atgtaaaatcagattctaataatacacatagataaccaccgcttccaagaggcagaacttcatcctcatcctctaatgga

SEQ ID NO: 15686 - RNA, 128 nt, Homo sapiens
  source 1..128: mol_type = unassigned RNA
cttgaagtagctctgttgcctctgcagcatgaaccagatttaagggacaatagagctctgttctcagccacacttcttctgctcaccctcctatttggtcatccagctggatggtatgtaggttgttg

SEQ ID NO: 15687 - DNA, 128 bp, Homo sapiens
  source 1..128: mol_type = unassigned DNA
cttgaagtagctctgttgcctctgcagcatgaaccagatttaagggacaatagagctctgttctcagccacacttcttctgctcaccctcctatttggtcatccagctggatggtatgtaggttgttg

SEQ ID NO: 15688 - DNA, 128 bp, Homo sapiens
  source 1..128: mol_type = unassigned DNA
caacaacctacataccatccagctggatgaccaaataggagggtgagcagaagaagtgtggctgagaacagagctctattgtcccttaaatctggttcatgctgcagaggcaacagagctacttcaag

SEQ ID NO: 15689 - RNA, 98 nt, Homo sapiens
  source 1..98: mol_type = unassigned RNA
tctatgtctctgtctctctaacctttgtctctttcttggtttctctctgtctgagcctctgtgtgtctctgtgggtctctccctccctcccctccatc

SEQ ID NO: 15690 - DNA, 98 bp, Homo sapiens
  source 1..98: mol_type = unassigned DNA
tctatgtctctgtctctctaacctttgtctctttcttggtttctctctgtctgagcctctgtgtgtctctgtgggtctctccctccctcccctccatc

SEQ ID NO: 15691 - DNA, 98 bp, Homo sapiens
  source 1..98: mol_type = unassigned DNA
gatggaggggagggagggagagacccacagagacacacagaggctcagacagagagaaaccaagaaagagacaaaggttagagagacagagacataga

SEQ ID NO: 15692 - RNA, 28 nt, Homo sapiens
  source 1..28: mol_type = unassigned RNA
gttgcttctggcccaatggaccagctct

SEQ ID NO: 15693 - DNA, 28 bp, Homo sapiens
  source 1..28: mol_type = unassigned DNA
gttgcttctggcccaatggaccagctct

SEQ ID NO: 15694 - DNA, 28 bp, Homo sapiens
  source 1..28: mol_type = unassigned DNA
agagctggtccattgggccagaagcaac

SEQ ID NO: 15695 - RNA, 23 nt, Homo sapiens
  source 1..23: mol_type = unassigned RNA
taccttattctacttattttgag

SEQ ID NO: 15696 - DNA, 23 bp, Homo sapiens
  source 1..23: mol_type = unassigned DNA
taccttattctacttattttgag

SEQ ID NO: 15697 - DNA, 23 bp, Homo sapiens
  source 1..23: mol_type = unassigned DNA
ctcaaaataagtagaataaggta

SEQ ID NO: 15698 - RNA, 32 nt, Homo sapiens
  source 1..32: mol_type = unassigned RNA
catattggctatctagctgtaggtgctggtca

SEQ ID NO: 15699 - DNA, 32 bp, Homo sapiens
  source 1..32: mol_type = unassigned DNA
catattggctatctagctgtaggtgctggtca

SEQ ID NO: 15700 - DNA, 32 bp, Homo sapiens
  source 1..32: mol_type = unassigned DNA
tgaccagcacctacagctagatagccaatatg

SEQ ID NO: 15701 - RNA, 83 nt, Homo sapiens
  source 1..83: mol_type = unassigned RNA
gggttttaatgacttgcctggatattggtgtagtatgcatgccaactgatattcaatcaacatctcctgccagcataaaaaag

SEQ ID NO: 15702 - DNA, 83 bp, Homo sapiens
  source 1..83: mol_type = unassigned DNA
gggttttaatgacttgcctggatattggtgtagtatgcatgccaactgatattcaatcaacatctcctgccagcataaaaaag

SEQ ID NO: 15703 - DNA, 83 bp, Homo sapiens
  source 1..83: mol_type = unassigned DNA
cttttttatgctggcaggagatgttgattgaatatcagttggcatgcatactacaccaatatccaggcaagtcattaaaaccc

SEQ ID NO: 15704 - RNA, 62 nt, Homo sapiens
  source 1..62: mol_type = unassigned RNA
tgtttgtttatctatctttcttaaaatgaaagtcttggatgggcttcacaagcctcttccag

SEQ ID NO: 15705 - DNA, 62 bp, Homo sapiens
  source 1..62: mol_type = unassigned DNA
tgtttgtttatctatctttcttaaaatgaaagtcttggatgggcttcacaagcctcttccag

SEQ ID NO: 15706 - DNA, 62 bp, Homo sapiens
  source 1..62: mol_type = unassigned DNA
ctggaagaggcttgtgaagcccatccaagactttcattttaagaaagatagataaacaaaca

SEQ ID NO: 15707 - RNA, 60 nt, Homo sapiens
  source 1..60: mol_type = unassigned RNA
atgattggaagctgcttttaatttcctcccaacttcccttttgttatcttgctgcctgcc

SEQ ID NO: 15708 - DNA, 60 bp, Homo sapiens
  source 1..60: mol_type = unassigned DNA
atgattggaagctgcttttaatttcctcccaacttcccttttgttatcttgctgcctgcc

SEQ ID NO: 15709 - DNA, 60 bp, Homo sapiens
  source 1..60: mol_type = unassigned DNA
ggcaggcagcaagataacaaaagggaagttgggaggaaattaaaagcagcttccaatcat

SEQ ID NO: 15710 - RNA, 28 nt, Homo sapiens
  source 1..28: mol_type = unassigned RNA
tcattttgttctctagccgtttgactcc

SEQ ID NO: 15711 - DNA, 28 bp, Homo sapiens
  source 1..28: mol_type = unassigned DNA
tcattttgttctctagccgtttgactcc

SEQ ID NO: 15712 - DNA, 28 bp, Homo sapiens
  source 1..28: mol_type = unassigned DNA
ggagtcaaacggctagagaacaaaatga

SEQ ID NO: 15713 - RNA, 34 nt, Homo sapiens
  source 1..34: mol_type = unassigned RNA
gatgtcttggggaagctgctgtatgtggaagtgg

SEQ ID NO: 15714 - DNA, 34 bp, Homo sapiens
  source 1..34: mol_type = unassigned DNA
gatgtcttggggaagctgctgtatgtggaagtgg

SEQ ID NO: 15715 - DNA, 34 bp, Homo sapiens
  source 1..34: mol_type = unassigned DNA
ccacttccacatacagcagcttccccaagacatc

SEQ ID NO: 15716 - RNA, 65 nt, Homo sapiens
  source 1..65: mol_type = unassigned RNA
actgttgcttgattttcattggttatctcctttcttacggtggccaatctaatgcagccttcctt

SEQ ID NO: 15717 - DNA, 65 bp, Homo sapiens
  source 1..65: mol_type = unassigned DNA
actgttgcttgattttcattggttatctcctttcttacggtggccaatctaatgcagccttcctt

SEQ ID NO: 15718 - DNA, 65 bp, Homo sapiens
  source 1..65: mol_type = unassigned DNA
aaggaaggctgcattagattggccaccgtaagaaaggagataaccaatgaaaatcaagcaacagt

SEQ ID NO: 15719 - RNA, 42 nt, Homo sapiens
  source 1..42: mol_type = unassigned RNA
tgggtggattcagcactttgaacatgtggcttgacatctgaa

SEQ ID NO: 15720 - DNA, 42 bp, Homo sapiens
  source 1..42: mol_type = unassigned DNA
tgggtggattcagcactttgaacatgtggcttgacatctgaa

SEQ ID NO: 15721 - DNA, 42 bp, Homo sapiens
  source 1..42: mol_type = unassigned DNA
ttcagatgtcaagccacatgttcaaagtgctgaatccaccca

SEQ ID NO: 15722 - RNA, 35 nt, Homo sapiens
  source 1..35: mol_type = unassigned RNA
acacaggttatcagctgtatgaaggatcaatctca

SEQ ID NO: 15723 - DNA, 35 bp, Homo sapiens
  source 1..35: mol_type = unassigned DNA
acacaggttatcagctgtatgaaggatcaatctca

SEQ ID NO: 15724 - DNA, 35 bp, Homo sapiens
  source 1..35: mol_type = unassigned DNA
tgagattgatccttcatacagctgataacctgtgt

SEQ ID NO: 15725 - RNA, 46 nt, Homo sapiens
  source 1..46: mol_type = unassigned RNA
gtgaaggacacagatcttggggtatctagctttagaacaatagaat

SEQ ID NO: 15726 - DNA, 46 bp, Homo sapiens
  source 1..46: mol_type = unassigned DNA
gtgaaggacacagatcttggggtatctagctttagaacaatagaat

SEQ ID NO: 15727 - DNA, 46 bp, Homo sapiens
  source 1..46: mol_type = unassigned DNA
attctattgttctaaagctagataccccaagatctgtgtccttcac

SEQ ID NO: 15728 - RNA, 69 nt, Homo sapiens
  source 1..69: mol_type = unassigned RNA
gatttcaaagattctaaaatatcagagatggcctgtaattctagcactttgggaggccgaggcaggtgg

SEQ ID NO: 15729 - DNA, 69 bp, Homo sapiens
  source 1..69: mol_type = unassigned DNA
gatttcaaagattctaaaatatcagagatggcctgtaattctagcactttgggaggccgaggcaggtgg

SEQ ID NO: 15730 - DNA, 69 bp, Homo sapiens
  source 1..69: mol_type = unassigned DNA
ccacctgcctcggcctcccaaagtgctagaattacaggccatctctgatattttagaatctttgaaatc

SEQ ID NO: 15731 - RNA, 82 nt, Homo sapiens
  source 1..82: mol_type = unassigned RNA
tgaggtattgtttgtcaggtttctccacgccgaagtcactattttccccgatttccatgctgtactctggaagaactcacta

SEQ ID NO: 15732 - DNA, 82 bp, Homo sapiens
  source 1..82: mol_type = unassigned DNA
tgaggtattgtttgtcaggtttctccacgccgaagtcactattttccccgatttccatgctgtactctggaagaactcacta

SEQ ID NO: 15733 - DNA, 82 bp, Homo sapiens
  source 1..82: mol_type = unassigned DNA
tagtgagttcttccagagtacagcatggaaatcggggaaaatagtgacttcggcgtggagaaacctgacaaacaatacctca

SEQ ID NO: 15734 - RNA, 43 nt, Homo sapiens
  source 1..43: mol_type = unassigned RNA
aaaaaattccttctttgacccattggttatttagcagtatgtt

SEQ ID NO: 15735 - DNA, 43 bp, Homo sapiens
  source 1..43: mol_type = unassigned DNA
aaaaaattccttctttgacccattggttatttagcagtatgtt

SEQ ID NO: 15736 - DNA, 43 bp, Homo sapiens
  source 1..43: mol_type = unassigned DNA
aacatactgctaaataaccaatgggtcaaagaaggaatttttt

SEQ ID NO: 15737 - RNA, 30 nt, Homo sapiens
  source 1..30: mol_type = unassigned RNA
tctttgtttagctatcagtctgacaatctt

SEQ ID NO: 15738 - DNA, 30 bp, Homo sapiens
  source 1..30: mol_type = unassigned DNA
tctttgtttagctatcagtctgacaatctt

SEQ ID NO: 15739 - DNA, 30 bp, Homo sapiens
  source 1..30: mol_type = unassigned DNA
aagattgtcagactgatagctaaacaaaga

SEQ ID NO: 15740 - RNA, 53 nt, Homo sapiens
  source 1..53: mol_type = unassigned RNA
ccctctagtggctgctaccctaattgtgatgttgttggttctcaaggctgccg

SEQ ID NO: 15741 - DNA, 53 bp, Homo sapiens
  source 1..53: mol_type = unassigned DNA
ccctctagtggctgctaccctaattgtgatgttgttggttctcaaggctgccg

SEQ ID NO: 15742 - DNA, 53 bp, Homo sapiens
  source 1..53: mol_type = unassigned DNA
cggcagccttgagaaccaacaacatcacaattagggtagcagccactagaggg

SEQ ID NO: 15743 - RNA, 99 nt, Homo sapiens
  source 1..99: mol_type = unassigned RNA
tttctctttcttcaaagccagggactctacttgtaacatgcccacctcattcttaaacctttggatatcttgctgtaagtcttcttctagatatgcttt

SEQ ID NO: 15744 - DNA, 99 bp, Homo sapiens
  source 1..99: mol_type = unassigned DNA
tttctctttcttcaaagccagggactctacttgtaacatgcccacctcattcttaaacctttggatatcttgctgtaagtcttcttctagatatgcttt

SEQ ID NO: 15745 - DNA, 99 bp, Homo sapiens
  source 1..99: mol_type = unassigned DNA
aaagcatatctagaagaagacttacagcaagatatccaaaggtttaagaatgaggtgggcatgttacaagtagagtccctggctttgaagaaagagaaa

SEQ ID NO: 15746 - RNA, 33 nt, Homo sapiens
  source 1..33: mol_type = unassigned RNA
tcttggggtaggttgctgtgtacctgggactca

SEQ ID NO: 15747 - DNA, 33 bp, Homo sapiens
  source 1..33: mol_type = unassigned DNA
tcttggggtaggttgctgtgtacctgggactca

SEQ ID NO: 15748 - DNA, 33 bp, Homo sapiens
  source 1..33: mol_type = unassigned DNA
tgagtcccaggtacacagcaacctaccccaaga

SEQ ID NO: 15749 - RNA, 31 nt, Homo sapiens
  source 1..31: mol_type = unassigned RNA
acactagcctgacagcctcgcttccaatcct

SEQ ID NO: 15750 - DNA, 31 bp, Homo sapiens
  source 1..31: mol_type = unassigned DNA
acactagcctgacagcctcgcttccaatcct

SEQ ID NO: 15751 - DNA, 31 bp, Homo sapiens
  source 1..31: mol_type = unassigned DNA
aggattggaagcgaggctgtcaggctagtgt

SEQ ID NO: 15752 - RNA, 45 nt, Homo sapiens
  source 1..45: mol_type = unassigned RNA
aattaaaatccccctccttggttatctggttacctagctgcatat

SEQ ID NO: 15753 - DNA, 45 bp, Homo sapiens
  source 1..45: mol_type = unassigned DNA
aattaaaatccccctccttggttatctggttacctagctgcatat

SEQ ID NO: 15754 - DNA, 45 bp, Homo sapiens
  source 1..45: mol_type = unassigned DNA
atatgcagctaggtaaccagataaccaaggagggggattttaatt

SEQ ID NO: 15755 - RNA, 32 nt, Homo sapiens
  source 1..32: mol_type = unassigned RNA
aaaattgtgtctgaacatctgagtctgaatcc

SEQ ID NO: 15756 - DNA, 32 bp, Homo sapiens
  source 1..32: mol_type = unassigned DNA
aaaattgtgtctgaacatctgagtctgaatcc

SEQ ID NO: 15757 - DNA, 32 bp, Homo sapiens
  source 1..32: mol_type = unassigned DNA
ggattcagactcagatgttcagacacaatttt

SEQ ID NO: 15758 - RNA, 21 nt, Homo sapiens
  source 1..21: mol_type = unassigned RNA
aggtttatcagtctggcctcc

SEQ ID NO: 15759 - DNA, 21 bp, Homo sapiens
  source 1..21: mol_type = unassigned DNA
aggtttatcagtctggcctcc

SEQ ID NO: 15760 - DNA, 21 bp, Homo sapiens
  source 1..21: mol_type = unassigned DNA
ggaggccagactgataaacct

SEQ ID NO: 15761 - RNA, 23 nt, Homo sapiens
  source 1..23: mol_type = unassigned RNA
tgagttattatttggtctttttc

SEQ ID NO: 15762 - DNA, 23 bp, Homo sapiens
  source 1..23: mol_type = unassigned DNA
tgagttattatttggtctttttc

SEQ ID NO: 15763 - DNA, 23 bp, Homo sapiens
  source 1..23: mol_type = unassigned DNA
gaaaaagaccaaataataactca

SEQ ID NO: 15764 - RNA, 24 nt, Homo sapiens
  source 1..24: mol_type = unassigned RNA
atcttttgttctctgatgtatgct

SEQ ID NO: 15765 - DNA, 24 bp, Homo sapiens
  source 1..24: mol_type = unassigned DNA
atcttttgttctctgatgtatgct

SEQ ID NO: 15766 - DNA, 24 bp, Homo sapiens
  source 1..24: mol_type = unassigned DNA
agcatacatcagagaacaaaagat

SEQ ID NO: 15767 - RNA, 39 nt, Homo sapiens
  source 1..39: mol_type = unassigned RNA
tgaggtcctattttgtctctttagagttttgacttcaag

SEQ ID NO: 15768 - DNA, 39 bp, Homo sapiens
  source 1..39: mol_type = unassigned DNA
tgaggtcctattttgtctctttagagttttgacttcaag

SEQ ID NO: 15769 - DNA, 39 bp, Homo sapiens
  source 1..39: mol_type = unassigned DNA
cttgaagtcaaaactctaaagagacaaaataggacctca

SEQ ID NO: 15770 - RNA, 24 nt, Homo sapiens
  source 1..24: mol_type = unassigned RNA
tcattgtttctctcagctgtatgt

SEQ ID NO: 15771 - DNA, 24 bp, Homo sapiens
  source 1..24: mol_type = unassigned DNA
tcattgtttctctcagctgtatgt

SEQ ID NO: 15772 - DNA, 24 bp, Homo sapiens
  source 1..24: mol_type = unassigned DNA
acatacagctgagagaaacaatga

SEQ ID NO: 15773 - RNA, 61 nt, Homo sapiens
  source 1..61: mol_type = unassigned RNA
tctttgtttctctctctttatatttatctatctatttacttctatctctatctacctatct

SEQ ID NO: 15774 - DNA, 61 bp, Homo sapiens
  source 1..61: mol_type = unassigned DNA
tctttgtttctctctctttatatttatctatctatttacttctatctctatctacctatct

SEQ ID NO: 15775 - DNA, 61 bp, Homo sapiens
  source 1..61: mol_type = unassigned DNA
agataggtagatagagatagaagtaaatagatagataaatataaagagagagaaacaaaga

SEQ ID NO: 15776 - RNA, 32 nt, Homo sapiens
  source 1..32: mol_type = unassigned RNA
gggggctcagagccaaggggaagctgacctct

SEQ ID NO: 15777 - DNA, 32 bp, Homo sapiens
  source 1..32: mol_type = unassigned DNA
gggggctcagagccaaggggaagctgacctct

SEQ ID NO: 15778 - DNA, 32 bp, Homo sapiens
  source 1..32: mol_type = unassigned DNA
agaggtcagcttccccttggctctgagccccc

SEQ ID NO: 15779 - RNA, 92 nt, Homo sapiens
  source 1..92: mol_type = unassigned RNA
agagtccttccccatactctggaggaaagattgctgcacagaaagaccaagaagaatctgaacagacaggtctcttgctgggcttagatctt

SEQ ID NO: 15780 - DNA, 92 bp, Homo sapiens
  source 1..92: mol_type = unassigned DNA
agagtccttccccatactctggaggaaagattgctgcacagaaagaccaagaagaatctgaacagacaggtctcttgctgggcttagatctt

SEQ ID NO: 15781 - DNA, 92 bp, Homo sapiens
  source 1..92: mol_type = unassigned DNA
aagatctaagcccagcaagagacctgtctgttcagattcttcttggtctttctgtgcagcaatctttcctccagagtatggggaaggactct

SEQ ID NO: 15782 - RNA, 59 nt, Homo sapiens
  source 1..59: mol_type = unassigned RNA
cacccttagtaactaacttgcatgtgacttggcaatcctaggctatggcccagtgacag

SEQ ID NO: 15783 - DNA, 59 bp, Homo sapiens
  source 1..59: mol_type = unassigned DNA
cacccttagtaactaacttgcatgtgacttggcaatcctaggctatggcccagtgacag

SEQ ID NO: 15784 - DNA, 59 bp, Homo sapiens
  source 1..59: mol_type = unassigned DNA
ctgtcactgggccatagcctaggattgccaagtcacatgcaagttagttactaagggtg

SEQ ID NO: 15785 - RNA, 24 nt, Homo sapiens
  source 1..24: mol_type = unassigned RNA
ttccagttaaatggtctcttttaa

SEQ ID NO: 15786 - DNA, 24 bp, Homo sapiens
  source 1..24: mol_type = unassigned DNA
ttccagttaaatggtctcttttaa

SEQ ID NO: 15787 - DNA, 24 bp, Homo sapiens
  source 1..24: mol_type = unassigned DNA
ttaaaagagaccatttaactggaa

SEQ ID NO: 15788 - RNA, 55 nt, Homo sapiens
  source 1..55: mol_type = unassigned RNA
ctaaccaattgttagtattttgttatctctctgtctcttcctctctctctctctt

SEQ ID NO: 15789 - DNA, 55 bp, Homo sapiens
  source 1..55: mol_type = unassigned DNA
ctaaccaattgttagtattttgttatctctctgtctcttcctctctctctctctt

SEQ ID NO: 15790 - DNA, 55 bp, Homo sapiens
  source 1..55: mol_type = unassigned DNA
aagagagagagagaggaagagacagagagataacaaaatactaacaattggttag

SEQ ID NO: 15791 - RNA, 50 nt, Homo sapiens
  source 1..50: mol_type = unassigned RNA
caaggcacttactctctctgaacctcattccatcatcttaaatgggtttt

SEQ ID NO: 15792 - DNA, 50 bp, Homo sapiens
  source 1..50: mol_type = unassigned DNA
caaggcacttactctctctgaacctcattccatcatcttaaatgggtttt

SEQ ID NO: 15793 - DNA, 50 bp, Homo sapiens
  source 1..50: mol_type = unassigned DNA
aaaacccatttaagatgatggaatgaggttcagagagagtaagtgccttg

SEQ ID NO: 15794 - RNA, 39 nt, Homo sapiens
  source 1..39: mol_type = unassigned RNA
cttcacctctttgaatcttggtttctttatctgtatgat

SEQ ID NO: 15795 - DNA, 39 bp, Homo sapiens
  source 1..39: mol_type = unassigned DNA
cttcacctctttgaatcttggtttctttatctgtatgat

SEQ ID NO: 15796 - DNA, 39 bp, Homo sapiens
  source 1..39: mol_type = unassigned DNA
atcatacagataaagaaaccaagattcaaagaggtgaag

SEQ ID NO: 15797 - RNA, 27 nt, Homo sapiens
  source 1..27: mol_type = unassigned RNA
agtggtggctgactgtagagatgccag

SEQ ID NO: 15798 - DNA, 27 bp, Homo sapiens
  source 1..27: mol_type = unassigned DNA
agtggtggctgactgtagagatgccag

SEQ ID NO: 15799 - DNA, 27 bp, Homo sapiens
  source 1..27: mol_type = unassigned DNA
ctggcatctctacagtcagccaccact

SEQ ID NO: 15800 - RNA, 34 nt, Homo sapiens
  source 1..34: mol_type = unassigned RNA
tactttatttgtttttctagctgtctccctcctt

SEQ ID NO: 15801 - DNA, 34 bp, Homo sapiens
  source 1..34: mol_type = unassigned DNA
tactttatttgtttttctagctgtctccctcctt

SEQ ID NO: 15802 - DNA, 34 bp, Homo sapiens
  source 1..34: mol_type = unassigned DNA
aaggagggagacagctagaaaaacaaataaagta

SEQ ID NO: 15803 - RNA, 34 nt, Homo sapiens
  source 1..34: mol_type = unassigned RNA
ttcactctcccttagtttgttttctcgtgtctta

SEQ ID NO: 15804 - DNA, 34 bp, Homo sapiens
  source 1..34: mol_type = unassigned DNA
ttcactctcccttagtttgttttctcgtgtctta

SEQ ID NO: 15805 - DNA, 34 bp, Homo sapiens
  source 1..34: mol_type = unassigned DNA
taagacacgagaaaacaaactaagggagagtgaa

SEQ ID NO: 15806 - RNA, 33 nt, Homo sapiens
  source 1..33: mol_type = unassigned RNA
tcagaagacctattgtattattttgtctatttt

SEQ ID NO: 15807 - DNA, 33 bp, Homo sapiens
  source 1..33: mol_type = unassigned DNA
tcagaagacctattgtattattttgtctatttt

SEQ ID NO: 15808 - DNA, 33 bp, Homo sapiens
  source 1..33: mol_type = unassigned DNA
aaaatagacaaaataatacaataggtcttctga

SEQ ID NO: 15809 - RNA, 24 nt, Homo sapiens
  source 1..24: mol_type = unassigned RNA
tctttgtttctctatctttctacc

SEQ ID NO: 15810 - DNA, 24 bp, Homo sapiens
  source 1..24: mol_type = unassigned DNA
tctttgtttctctatctttctacc

SEQ ID NO: 15811 - DNA, 24 bp, Homo sapiens
  source 1..24: mol_type = unassigned DNA
ggtagaaagatagagaaacaaaga

SEQ ID NO: 15812 - RNA, 39 nt, Homo sapiens
  source 1..39: mol_type = unassigned RNA
tacttgtttatctacctgaatgcctgaagaattctgtct

SEQ ID NO: 15813 - DNA, 39 bp, Homo sapiens
  source 1..39: mol_type = unassigned DNA
tacttgtttatctacctgaatgcctgaagaattctgtct

SEQ ID NO: 15814 - DNA, 39 bp, Homo sapiens
  source 1..39: mol_type = unassigned DNA
agacagaattcttcaggcattcaggtagataaacaagta

SEQ ID NO: 15815 - RNA, 28 nt, Homo sapiens
  source 1..28: mol_type = unassigned RNA
tgatgtcttagttgttatagtttctctg

SEQ ID NO: 15816 - DNA, 28 bp, Homo sapiens
  source 1..28: mol_type = unassigned DNA
tgatgtcttagttgttatagtttctctg

SEQ ID NO: 15817 - DNA, 28 bp, Homo sapiens
  source 1..28: mol_type = unassigned DNA
cagagaaactataacaactaagacatca

SEQ ID NO: 15818 - RNA, 22 nt, Homo sapiens
  source 1..22: mol_type = unassigned RNA
tcttggggtttgagcagtatga

SEQ ID NO: 15819 - DNA, 22 bp, Homo sapiens
  source 1..22: mol_type = unassigned DNA
tcttggggtttgagcagtatga

SEQ ID NO: 15820 - DNA, 22 bp, Homo sapiens
  source 1..22: mol_type = unassigned DNA
tcatactgctcaaaccccaaga

SEQ ID NO: 15821 - RNA, 37 nt, Homo sapiens
  source 1..37: mol_type = unassigned RNA
gggtattgtaaattgtttagttagctagctgtgtgtc

SEQ ID NO: 15822 - DNA, 37 bp, Homo sapiens
  source 1..37: mol_type = unassigned DNA
gggtattgtaaattgtttagttagctagctgtgtgtc

SEQ ID NO: 15823 - DNA, 37 bp, Homo sapiens
  source 1..37: mol_type = unassigned DNA
gacacacagctagctaactaaacaatttacaataccc

SEQ ID NO: 15824 - RNA, 46 nt, Homo sapiens
  source 1..46: mol_type = unassigned RNA
ttttgtggttagcttgctgtgtgccaggcgctgagcctgtaatggt

SEQ ID NO: 15825 - DNA, 46 bp, Homo sapiens
  source 1..46: mol_type = unassigned DNA
ttttgtggttagcttgctgtgtgccaggcgctgagcctgtaatggt

SEQ ID NO: 15826 - DNA, 46 bp, Homo sapiens
  source 1..46: mol_type = unassigned DNA
accattacaggctcagcgcctggcacacagcaagctaaccacaaaa

SEQ ID NO: 15827 - RNA, 31 nt, Homo sapiens
  source 1..31: mol_type = unassigned RNA
tgcagagccgcgtggactgactctggtcacc

SEQ ID NO: 15828 - DNA, 31 bp, Homo sapiens
  source 1..31: mol_type = unassigned DNA
tgcagagccgcgtggactgactctggtcacc

SEQ ID NO: 15829 - DNA, 31 bp, Homo sapiens
  source 1..31: mol_type = unassigned DNA
ggtgaccagagtcagtccacgcggctctgca

SEQ ID NO: 15830 - RNA, 31 nt, Homo sapiens
  source 1..31: mol_type = unassigned RNA
acaattgtaaaactgaggcacgagcaaagtg

SEQ ID NO: 15831 - DNA, 31 bp, Homo sapiens
  source 1..31: mol_type = unassigned DNA
acaattgtaaaactgaggcacgagcaaagtg

SEQ ID NO: 15832 - DNA, 31 bp, Homo sapiens
  source 1..31: mol_type = unassigned DNA
cactttgctcgtgcctcagttttacaattgt

SEQ ID NO: 15833 - RNA, 106 nt, Homo sapiens
  source 1..106: mol_type = unassigned RNA
tttttggttattagctctcttaacatttcctgcctccctggccgtttttcagctcctgaaacacattccatgttttctccagccacagagcttttcagcatatgcc

SEQ ID NO: 15834 - DNA, 106 bp, Homo sapiens
  source 1..106: mol_type = unassigned DNA
tttttggttattagctctcttaacatttcctgcctccctggccgtttttcagctcctgaaacacattccatgttttctccagccacagagcttttcagcatatgcc

SEQ ID NO: 15835 - DNA, 106 bp, Homo sapiens
  source 1..106: mol_type = unassigned DNA
ggcatatgctgaaaagctctgtggctggagaaaacatggaatgtgtttcaggagctgaaaaacggccagggaggcaggaaatgttaagagagctaataaccaaaaa

SEQ ID NO: 15836 - RNA, 40 nt, Homo sapiens
  source 1..40: mol_type = unassigned RNA
aaatccatcaccattactgtggttctcaagctggatgaat

SEQ ID NO: 15837 - DNA, 40 bp, Homo sapiens
  source 1..40: mol_type = unassigned DNA
aaatccatcaccattactgtggttctcaagctggatgaat

SEQ ID NO: 15838 - DNA, 40 bp, Homo sapiens
  source 1..40: mol_type = unassigned DNA
attcatccagcttgagaaccacagtaatggtgatggattt

SEQ ID NO: 15839 - RNA, 25 nt, Homo sapiens
  source 1..25: mol_type = unassigned RNA
gatagtattttagtttgtatagttt

SEQ ID NO: 15840 - DNA, 25 bp, Homo sapiens
  source 1..25: mol_type = unassigned DNA
gatagtattttagtttgtatagttt

SEQ ID NO: 15841 - DNA, 25 bp, Homo sapiens
  source 1..25: mol_type = unassigned DNA
aaactatacaaactaaaatactatc

SEQ ID NO: 15842 - RNA, 24 nt, Homo sapiens
  source 1..24: mol_type = unassigned RNA
tctttttttccctagctttattaa

SEQ ID NO: 15843 - DNA, 24 bp, Homo sapiens
  source 1..24: mol_type = unassigned DNA
tctttttttccctagctttattaa

SEQ ID NO: 15844 - DNA, 24 bp, Homo sapiens
  source 1..24: mol_type = unassigned DNA
ttaataaagctagggaaaaaaaga

SEQ ID NO: 15845 - RNA, 27 nt, Homo sapiens
  source 1..27: mol_type = unassigned RNA
tttaggttcttagtttgtatggttaat

SEQ ID NO: 15846 - DNA, 27 bp, Homo sapiens
  source 1..27: mol_type = unassigned DNA
tttaggttcttagtttgtatggttaat

SEQ ID NO: 15847 - DNA, 27 bp, Homo sapiens
  source 1..27: mol_type = unassigned DNA
attaaccatacaaactaagaacctaaa

SEQ ID NO: 15848 - RNA, 23 nt, Homo sapiens
  source 1..23: mol_type = unassigned RNA
acttaggttatctaggttatgta

SEQ ID NO: 15849 - DNA, 23 bp, Homo sapiens
  source 1..23: mol_type = unassigned DNA
acttaggttatctaggttatgta

SEQ ID NO: 15850 - DNA, 23 bp, Homo sapiens
  source 1..23: mol_type = unassigned DNA
tacataacctagataacctaagt

SEQ ID NO: 15851 - RNA, 60 nt, Homo sapiens
  source 1..60: mol_type = unassigned RNA
ttctgagagttttcagcagcagactgatgagatccttttcttggggtagcagctgtctgg

SEQ ID NO: 15852 - DNA, 60 bp, Homo sapiens
  source 1..60: mol_type = unassigned DNA
ttctgagagttttcagcagcagactgatgagatccttttcttggggtagcagctgtctgg

SEQ ID NO: 15853 - DNA, 60 bp, Homo sapiens
  source 1..60: mol_type = unassigned DNA
ccagacagctgctaccccaagaaaaggatctcatcagtctgctgctgaaaactctcagaa

SEQ ID NO: 15854 - RNA, 30 nt, Homo sapiens
  source 1..30: mol_type = unassigned RNA
aagcatgttatctagctgtttgactgggtt

SEQ ID NO: 15855 - DNA, 30 bp, Homo sapiens
  source 1..30: mol_type = unassigned DNA
aagcatgttatctagctgtttgactgggtt

SEQ ID NO: 15856 - DNA, 30 bp, Homo sapiens
  source 1..30: mol_type = unassigned DNA
aacccagtcaaacagctagataacatgctt

SEQ ID NO: 15857 - RNA, 74 nt, Homo sapiens
  source 1..74: mol_type = unassigned RNA
tccttccttccttgatccctctctccctcccttgttctttccttctcctttctttttttctctctctttattcc

SEQ ID NO: 15858 - DNA, 74 bp, Homo sapiens
  source 1..74: mol_type = unassigned DNA
tccttccttccttgatccctctctccctcccttgttctttccttctcctttctttttttctctctctttattcc

SEQ ID NO: 15859 - DNA, 74 bp, Homo sapiens
  source 1..74: mol_type = unassigned DNA
ggaataaagagagagaaaaaaagaaaggagaaggaaagaacaagggagggagagagggatcaaggaaggaagga

SEQ ID NO: 15860 - RNA, 63 nt, Homo sapiens
  source 1..63: mol_type = unassigned RNA
tgtttccagttagcctgtctcttttgatcaacatcctagccagcacctgagagttgtgtgtgt

SEQ ID NO: 15861 - DNA, 63 bp, Homo sapiens
  source 1..63: mol_type = unassigned DNA
tgtttccagttagcctgtctcttttgatcaacatcctagccagcacctgagagttgtgtgtgt

SEQ ID NO: 15862 - DNA, 63 bp, Homo sapiens
  source 1..63: mol_type = unassigned DNA
acacacacaactctcaggtgctggctaggatgttgatcaaaagagacaggctaactggaaaca

SEQ ID NO: 15863 - RNA, 26 nt, Homo sapiens
  source 1..26: mol_type = unassigned RNA
gctttttgttatttagctgtatcaca

SEQ ID NO: 15864 - DNA, 26 bp, Homo sapiens
  source 1..26: mol_type = unassigned DNA
gctttttgttatttagctgtatcaca

SEQ ID NO: 15865 - DNA, 26 bp, Homo sapiens
  source 1..26: mol_type = unassigned DNA
tgtgatacagctaaataacaaaaagc

SEQ ID NO: 15866 - RNA, 25 nt, Homo sapiens
  source 1..25: mol_type = unassigned RNA
tctttcgttattattgtgtggttat

SEQ ID NO: 15867 - DNA, 25 bp, Homo sapiens
  source 1..25: mol_type = unassigned DNA
tctttcgttattattgtgtggttat

SEQ ID NO: 15868 - DNA, 25 bp, Homo sapiens
  source 1..25: mol_type = unassigned DNA
ataaccacacaataataacgaaaga

SEQ ID NO: 15869 - RNA, 26 nt, Homo sapiens
  source 1..26: mol_type = unassigned RNA
tgaggtaattattgtgtgtggttaga

SEQ ID NO: 15870 - DNA, 26 bp, Homo sapiens
  source 1..26: mol_type = unassigned DNA
tgaggtaattattgtgtgtggttaga

SEQ ID NO: 15871 - DNA, 26 bp, Homo sapiens
  source 1..26: mol_type = unassigned DNA
tctaaccacacacaataattacctca

SEQ ID NO: 15872 - RNA, 34 nt, Homo sapiens
  source 1..34: mol_type = unassigned RNA
tacctgaatatctagctgtattatttataaacca

SEQ ID NO: 15873 - DNA, 34 bp, Homo sapiens
  source 1..34: mol_type = unassigned DNA
tacctgaatatctagctgtattatttataaacca

SEQ ID NO: 15874 - DNA, 34 bp, Homo sapiens
  source 1..34: mol_type = unassigned DNA
tggtttataaataatacagctagatattcaggta

SEQ ID NO: 15875 - RNA, 24 nt, Homo sapiens
  source 1..24: mol_type = unassigned RNA
atcttgcggttggtagcagtatgt

SEQ ID NO: 15876 - DNA, 24 bp, Homo sapiens
  source 1..24: mol_type = unassigned DNA
atcttgcggttggtagcagtatgt

SEQ ID NO: 15877 - DNA, 24 bp, Homo sapiens
  source 1..24: mol_type = unassigned DNA
acatactgctaccaaccgcaagat

SEQ ID NO: 15878 - RNA, 31 nt, Homo sapiens
  source 1..31: mol_type = unassigned RNA
tactgtattagtttgtttgttctcatgctgc

SEQ ID NO: 15879 - DNA, 31 bp, Homo sapiens
  source 1..31: mol_type = unassigned DNA
tactgtattagtttgtttgttctcatgctgc

SEQ ID NO: 15880 - DNA, 31 bp, Homo sapiens
  source 1..31: mol_type = unassigned DNA
gcagcatgagaacaaacaaactaatacagta

SEQ ID NO: 15881 - RNA, 23 nt, Homo sapiens
  source 1..23: mol_type = unassigned RNA
gttttggttatctagctctgagc

SEQ ID NO: 15882 - DNA, 23 bp, Homo sapiens
  source 1..23: mol_type = unassigned DNA
gttttggttatctagctctgagc

SEQ ID NO: 15883 - DNA, 23 bp, Homo sapiens
  source 1..23: mol_type = unassigned DNA
gctcagagctagataaccaaaac

SEQ ID NO: 15884 - RNA, 71 nt, Homo sapiens
  source 1..71: mol_type = unassigned RNA
taaatggttatctgctgtctgctccagggagtgcaggcagatggagagctgggctggggtagaccagttgt

SEQ ID NO: 15885 - DNA, 71 bp, Homo sapiens
  source 1..71: mol_type = unassigned DNA
taaatggttatctgctgtctgctccagggagtgcaggcagatggagagctgggctggggtagaccagttgt

SEQ ID NO: 15886 - DNA, 71 bp, Homo sapiens
  source 1..71: mol_type = unassigned DNA
acaactggtctaccccagcccagctctccatctgcctgcactccctggagcagacagcagataaccattta

SEQ ID NO: 15887 - RNA, 24 nt, Homo sapiens
  source 1..24: mol_type = unassigned RNA
tcatttgttctctatctgtattta

SEQ ID NO: 15888 - DNA, 24 bp, Homo sapiens
  source 1..24: mol_type = unassigned DNA
tcatttgttctctatctgtattta

SEQ ID NO: 15889 - DNA, 24 bp, Homo sapiens
  source 1..24: mol_type = unassigned DNA
taaatacagatagagaacaaatga

SEQ ID NO: 15890 - RNA, 24 nt, Homo sapiens
  source 1..24: mol_type = unassigned RNA
tgagttgtgtagctagctgtatta

SEQ ID NO: 15891 - DNA, 24 bp, Homo sapiens
  source 1..24: mol_type = unassigned DNA
tgagttgtgtagctagctgtatta

SEQ ID NO: 15892 - DNA, 24 bp, Homo sapiens
  source 1..24: mol_type = unassigned DNA
taatacagctagctacacaactca

SEQ ID NO: 15893 - RNA, 41 nt, Homo sapiens
  source 1..41: mol_type = unassigned RNA
actttggagacagtagtggaaccctgatctctcgggcactt

SEQ ID NO: 15894 - DNA, 41 bp, Homo sapiens
  source 1..41: mol_type = unassigned DNA
actttggagacagtagtggaaccctgatctctcgggcactt

SEQ ID NO: 15895 - DNA, 41 bp, Homo sapiens
  source 1..41: mol_type = unassigned DNA
aagtgcccgagagatcagggttccactactgtctccaaagt

SEQ ID NO: 15896 - RNA, 30 nt, Homo sapiens
  source 1..30: mol_type = unassigned RNA
cttgaagacccctggacccagcagacacac

SEQ ID NO: 15897 - DNA, 30 bp, Homo sapiens
  source 1..30: mol_type = unassigned DNA
cttgaagacccctggacccagcagacacac

SEQ ID NO: 15898 - DNA, 30 bp, Homo sapiens
  source 1..30: mol_type = unassigned DNA
gtgtgtctgctgggtccaggggtcttcaag

SEQ ID NO: 15899 - RNA, 72 nt, Homo sapiens
  source 1..72: mol_type = unassigned RNA
aactcaaactctgggggcagtagggacttcctttagacactgatctgtaggtaaccccaccttttgctctgc

SEQ ID NO: 15900 - DNA, 72 bp, Homo sapiens
  source 1..72: mol_type = unassigned DNA
aactcaaactctgggggcagtagggacttcctttagacactgatctgtaggtaaccccaccttttgctctgc

SEQ ID NO: 15901 - DNA, 72 bp, Homo sapiens
  source 1..72: mol_type = unassigned DNA
gcagagcaaaaggtggggttacctacagatcagtgtctaaaggaagtccctactgcccccagagtttgagtt

SEQ ID NO: 15902 - RNA, 49 nt, Homo sapiens
  source 1..49: mol_type = unassigned RNA
aggatcgcttgagcccgggaggttgatgctacacttgagtctgagcaac

SEQ ID NO: 15903 - DNA, 49 bp, Homo sapiens
  source 1..49: mol_type = unassigned DNA
aggatcgcttgagcccgggaggttgatgctacacttgagtctgagcaac

SEQ ID NO: 15904 - DNA, 49 bp, Homo sapiens
  source 1..49: mol_type = unassigned DNA
gttgctcagactcaagtgtagcatcaacctcccgggctcaagcgatcct

SEQ ID NO: 15905 - RNA, 36 nt, Homo sapiens
  source 1..36: mol_type = unassigned RNA
cgtagttattagtttgtaaagtttccaccctatcag

SEQ ID NO: 15906 - DNA, 36 bp, Homo sapiens
  source 1..36: mol_type = unassigned DNA
cgtagttattagtttgtaaagtttccaccctatcag

SEQ ID NO: 15907 - DNA, 36 bp, Homo sapiens
  source 1..36: mol_type = unassigned DNA
ctgatagggtggaaactttacaaactaataactacg

SEQ ID NO: 15908 - RNA, 27 nt, Homo sapiens
  source 1..27: mol_type = unassigned RNA
aattcattctgacactggtgtttgtat

SEQ ID NO: 15909 - DNA, 27 bp, Homo sapiens
  source 1..27: mol_type = unassigned DNA
aattcattctgacactggtgtttgtat

SEQ ID NO: 15910 - DNA, 27 bp, Homo sapiens
  source 1..27: mol_type = unassigned DNA
atacaaacaccagtgtcagaatgaatt

SEQ ID NO: 15911 - RNA, 48 nt, Homo sapiens
  source 1..48: mol_type = unassigned RNA
tagcaaagtctggctcaacagtctgtggtttgtggtgaagtacataga

SEQ ID NO: 15912 - DNA, 48 bp, Homo sapiens
  source 1..48: mol_type = unassigned DNA
tagcaaagtctggctcaacagtctgtggtttgtggtgaagtacataga

SEQ ID NO: 15913 - DNA, 48 bp, Homo sapiens
  source 1..48: mol_type = unassigned DNA
tctatgtacttcaccacaaaccacagactgttgagccagactttgcta

SEQ ID NO: 15914 - RNA, 22 nt, Homo sapiens
  source 1..22: mol_type = unassigned RNA
ttctgtgtgacaattgtctttc

SEQ ID NO: 15915 - DNA, 22 bp, Homo sapiens
  source 1..22: mol_type = unassigned DNA
ttctgtgtgacaattgtctttc

SEQ ID NO: 15916 - DNA, 22 bp, Homo sapiens
  source 1..22: mol_type = unassigned DNA
gaaagacaattgtcacacagaa

SEQ ID NO: 15917 - RNA, 23 nt, Homo sapiens
  source 1..23: mol_type = unassigned RNA
tagagtttgaaaatggtttttcc

SEQ ID NO: 15918 - DNA, 23 bp, Homo sapiens
  source 1..23: mol_type = unassigned DNA
tagagtttgaaaatggtttttcc

SEQ ID NO: 15919 - DNA, 23 bp, Homo sapiens
  source 1..23: mol_type = unassigned DNA
ggaaaaaccattttcaaactcta

SEQ ID NO: 15920 - RNA, 64 nt, Homo sapiens
  source 1..64: mol_type = unassigned RNA
gctataagacaaggacactcaaactttggggcgcactagaatcacctggggaatcacttttttt

SEQ ID NO: 15921 - DNA, 64 bp, Homo sapiens
  source 1..64: mol_type = unassigned DNA
gctataagacaaggacactcaaactttggggcgcactagaatcacctggggaatcacttttttt

SEQ ID NO: 15922 - DNA, 64 bp, Homo sapiens
  source 1..64: mol_type = unassigned DNA
aaaaaaagtgattccccaggtgattctagtgcgccccaaagtttgagtgtccttgtcttatagc

SEQ ID NO: 15923 - RNA, 111 nt, Homo sapiens
  source 1..111: mol_type = unassigned RNA
gcccctaagagactccagggaacaactagggctcctggaagtagagtttgagaatggtgtgtctagtcaacatcctcgttgtgccagtaaatgaggaattgcagtctggag

SEQ ID NO: 15924 - DNA, 111 bp, Homo sapiens
  source 1..111: mol_type = unassigned DNA
gcccctaagagactccagggaacaactagggctcctggaagtagagtttgagaatggtgtgtctagtcaacatcctcgttgtgccagtaaatgaggaattgcagtctggag

SEQ ID NO: 15925 - DNA, 111 bp, Homo sapiens
  source 1..111: mol_type = unassigned DNA
ctccagactgcaattcctcatttactggcacaacgaggatgttgactagacacaccattctcaaactctacttccaggagccctagttgttccctggagtctcttaggggc

SEQ ID NO: 15926 - RNA, 25 nt, Homo sapiens
  source 1..25: mol_type = unassigned RNA
aactcacaccgtgggggcaaagaga

SEQ ID NO: 15927 - DNA, 25 bp, Homo sapiens
  source 1..25: mol_type = unassigned DNA
aactcacaccgtgggggcaaagaga

SEQ ID NO: 15928 - DNA, 25 bp, Homo sapiens
  source 1..25: mol_type = unassigned DNA
tctctttgcccccacggtgtgagtt

SEQ ID NO: 15929 - RNA, 27 nt, Homo sapiens
  source 1..27: mol_type = unassigned RNA
tcagtgccctcccttcctttgtatagt

SEQ ID NO: 15930 - DNA, 27 bp, Homo sapiens
  source 1..27: mol_type = unassigned DNA
tcagtgccctcccttcctttgtatagt

SEQ ID NO: 15931 - DNA, 27 bp, Homo sapiens
  source 1..27: mol_type = unassigned DNA
actatacaaaggaagggagggcactga

SEQ ID NO: 15932 - RNA, 23 nt, Homo sapiens
  source 1..23: mol_type = unassigned RNA
tataccatcaatctatgtggaaa

SEQ ID NO: 15933 - DNA, 23 bp, Homo sapiens
  source 1..23: mol_type = unassigned DNA
tataccatcaatctatgtggaaa

SEQ ID NO: 15934 - DNA, 23 bp, Homo sapiens
  source 1..23: mol_type = unassigned DNA
tttccacatagattgatggtata

SEQ ID NO: 15935 - RNA, 36 nt, Homo sapiens
  source 1..36: mol_type = unassigned RNA
tcttaccatcacctccatgttgagtgaagtgtccag

SEQ ID NO: 15936 - DNA, 36 bp, Homo sapiens
  source 1..36: mol_type = unassigned DNA
tcttaccatcacctccatgttgagtgaagtgtccag

SEQ ID NO: 15937 - DNA, 36 bp, Homo sapiens
  source 1..36: mol_type = unassigned DNA
ctggacacttcactcaacatggaggtgatggtaaga

SEQ ID NO: 15938 - RNA, 40 nt, Homo sapiens
  source 1..40: mol_type = unassigned RNA
ttgtgggactccttataccaagaactccacgtggaaggga

SEQ ID NO: 15939 - DNA, 40 bp, Homo sapiens
  source 1..40: mol_type = unassigned DNA
ttgtgggactccttataccaagaactccacgtggaaggga

SEQ ID NO: 15940 - DNA, 40 bp, Homo sapiens
  source 1..40: mol_type = unassigned DNA
tcccttccacgtggagttcttggtataaggagtcccacaa

SEQ ID NO: 15941 - RNA, 36 nt, Homo sapiens
  source 1..36: mol_type = unassigned RNA
gtgccctatgtctttaagccagtggaaatcagtttt

SEQ ID NO: 15942 - DNA, 36 bp, Homo sapiens
  source 1..36: mol_type = unassigned DNA
gtgccctatgtctttaagccagtggaaatcagtttt

SEQ ID NO: 15943 - DNA, 36 bp, Homo sapiens
  source 1..36: mol_type = unassigned DNA
aaaactgatttccactggcttaaagacatagggcac

SEQ ID NO: 15944 - RNA, 39 nt, Homo sapiens
  source 1..39: mol_type = unassigned RNA
ctctgtcttgatactgctaaggtattagatttattgttt

SEQ ID NO: 15945 - DNA, 39 bp, Homo sapiens
  source 1..39: mol_type = unassigned DNA
ctctgtcttgatactgctaaggtattagatttattgttt

SEQ ID NO: 15946 - DNA, 39 bp, Homo sapiens
  source 1..39: mol_type = unassigned DNA
aaacaataaatctaataccttagcagtatcaagacagag

SEQ ID NO: 15947 - RNA, 44 nt, Homo sapiens
  source 1..44: mol_type = unassigned RNA
atgtgaattcggtctgtggattgttgtgtgacaaagttgtttgg

SEQ ID NO: 15948 - DNA, 44 bp, Homo sapiens
  source 1..44: mol_type = unassigned DNA
atgtgaattcggtctgtggattgttgtgtgacaaagttgtttgg

SEQ ID NO: 15949 - DNA, 44 bp, Homo sapiens
  source 1..44: mol_type = unassigned DNA
ccaaacaactttgtcacacaacaatccacagaccgaattcacat

SEQ ID NO: 15950 - RNA, 29 nt, Homo sapiens
  source 1..29: mol_type = unassigned RNA
gttctaccttggccgctttgtccaagaag

SEQ ID NO: 15951 - DNA, 29 bp, Homo sapiens
  source 1..29: mol_type = unassigned DNA
gttctaccttggccgctttgtccaagaag

SEQ ID NO: 15952 - DNA, 29 bp, Homo sapiens
  source 1..29: mol_type = unassigned DNA
cttcttggacaaagcggccaaggtagaac

SEQ ID NO: 15953 - RNA, 33 nt, Homo sapiens
  source 1..33: mol_type = unassigned RNA
ttccttctccagactgatgtttatattttgttc

SEQ ID NO: 15954 - DNA, 33 bp, Homo sapiens
  source 1..33: mol_type = unassigned DNA
ttccttctccagactgatgtttatattttgttc

SEQ ID NO: 15955 - DNA, 33 bp, Homo sapiens
  source 1..33: mol_type = unassigned DNA
gaacaaaatataaacatcagtctggagaaggaa

SEQ ID NO: 15956 - RNA, 30 nt, Homo sapiens
  source 1..30: mol_type = unassigned RNA
cccaggtttgcagctctcccctgggccact

SEQ ID NO: 15957 - DNA, 30 bp, Homo sapiens
  source 1..30: mol_type = unassigned DNA
cccaggtttgcagctctcccctgggccact

SEQ ID NO: 15958 - DNA, 30 bp, Homo sapiens
  source 1..30: mol_type = unassigned DNA
agtggcccaggggagagctgcaaacctggg

SEQ ID NO: 15959 - RNA, 24 nt, Homo sapiens
  source 1..24: mol_type = unassigned RNA
cttgggtattattttgtatggtag

SEQ ID NO: 15960 - DNA, 24 bp, Homo sapiens
  source 1..24: mol_type = unassigned DNA
cttgggtattattttgtatggtag

SEQ ID NO: 15961 - DNA, 24 bp, Homo sapiens
  source 1..24: mol_type = unassigned DNA
ctaccatacaaaataatacccaag

SEQ ID NO: 15962 - RNA, 37 nt, Homo sapiens
  source 1..37: mol_type = unassigned RNA
ccctaggcttacgctccttgcgtgttgcctcatcaat

SEQ ID NO: 15963 - DNA, 37 bp, Homo sapiens
  source 1..37: mol_type = unassigned DNA
ccctaggcttacgctccttgcgtgttgcctcatcaat

SEQ ID NO: 15964 - DNA, 37 bp, Homo sapiens
  source 1..37: mol_type = unassigned DNA
attgatgaggcaacacgcaaggagcgtaagcctaggg

SEQ ID NO: 15965 - RNA, 52 nt, Homo sapiens
  source 1..52: mol_type = unassigned RNA
cataaatgccttatcacaaggctccatctgtcttgcaggccttcatttattt

SEQ ID NO: 15966 - DNA, 52 bp, Homo sapiens
  source 1..52: mol_type = unassigned DNA
cataaatgccttatcacaaggctccatctgtcttgcaggccttcatttattt

SEQ ID NO: 15967 - DNA, 52 bp, Homo sapiens
  source 1..52: mol_type = unassigned DNA
aaataaatgaaggcctgcaagacagatggagccttgtgataaggcatttatg

SEQ ID NO: 15968 - RNA, 35 nt, Homo sapiens
  source 1..35: mol_type = unassigned RNA
taaagacagcctgactggaagtctgagtgtgcagg

SEQ ID NO: 15969 - DNA, 35 bp, Homo sapiens
  source 1..35: mol_type = unassigned DNA
taaagacagcctgactggaagtctgagtgtgcagg

SEQ ID NO: 15970 - DNA, 35 bp, Homo sapiens
  source 1..35: mol_type = unassigned DNA
cctgcacactcagacttccagtcaggctgtcttta

SEQ ID NO: 15971 - RNA, 97 nt, Homo sapiens
  source 1..97: mol_type = unassigned RNA
ttatgggctcttcttccaccagatgccctaggttgtcactctgatgttcaaacttccacagatccctaggacatgaacagaatgcaccaagcttttt

SEQ ID NO: 15972 - DNA, 97 bp, Homo sapiens
  source 1..97: mol_type = unassigned DNA
ttatgggctcttcttccaccagatgccctaggttgtcactctgatgttcaaacttccacagatccctaggacatgaacagaatgcaccaagcttttt

SEQ ID NO: 15973 - DNA, 97 bp, Homo sapiens
  source 1..97: mol_type = unassigned DNA
aaaaagcttggtgcattctgttcatgtcctagggatctgtggaagtttgaacatcagagtgacaacctagggcatctggtggaagaagagcccataa

SEQ ID NO: 15974 - RNA, 40 nt, Homo sapiens
  source 1..40: mol_type = unassigned RNA
tagctgcactaggtgctataggcttgaattgctgaggctc

SEQ ID NO: 15975 - DNA, 40 bp, Homo sapiens
  source 1..40: mol_type = unassigned DNA
tagctgcactaggtgctataggcttgaattgctgaggctc

SEQ ID NO: 15976 - DNA, 40 bp, Homo sapiens
  source 1..40: mol_type = unassigned DNA
gagcctcagcaattcaagcctatagcacctagtgcagcta

SEQ ID NO: 15977 - RNA, 24 nt, Homo sapiens
  source 1..24: mol_type = unassigned RNA
ttctccatggtggactgagcatgt

SEQ ID NO: 15978 - DNA, 24 bp, Homo sapiens
  source 1..24: mol_type = unassigned DNA
ttctccatggtggactgagcatgt

SEQ ID NO: 15979 - DNA, 24 bp, Homo sapiens
  source 1..24: mol_type = unassigned DNA
acatgctcagtccaccatggagaa

SEQ ID NO: 15980 - RNA, 49 nt, Homo sapiens
  source 1..49: mol_type = unassigned RNA
aaatctttgttttggtctcagtaggttgtatatttccatttatattgta

SEQ ID NO: 15981 - DNA, 49 bp, Homo sapiens
  source 1..49: mol_type = unassigned DNA
aaatctttgttttggtctcagtaggttgtatatttccatttatattgta

SEQ ID NO: 15982 - DNA, 49 bp, Homo sapiens
  source 1..49: mol_type = unassigned DNA
tacaatataaatggaaatatacaacctactgagaccaaaacaaagattt

SEQ ID NO: 15983 - RNA, 41 nt, Homo sapiens
  source 1..41: mol_type = unassigned RNA
tcatgcattggtcattttggtgtattagtttgtggagttat

SEQ ID NO: 15984 - DNA, 41 bp, Homo sapiens
  source 1..41: mol_type = unassigned DNA
tcatgcattggtcattttggtgtattagtttgtggagttat

SEQ ID NO: 15985 - DNA, 41 bp, Homo sapiens
  source 1..41: mol_type = unassigned DNA
ataactccacaaactaatacaccaaaatgaccaatgcatga

SEQ ID NO: 15986 - RNA, 43 nt, Homo sapiens
  source 1..43: mol_type = unassigned RNA
cagtaccttggccactctgagcagtcatgtctccctgaagtct

SEQ ID NO: 15987 - DNA, 43 bp, Homo sapiens
  source 1..43: mol_type = unassigned DNA
cagtaccttggccactctgagcagtcatgtctccctgaagtct

SEQ ID NO: 15988 - DNA, 43 bp, Homo sapiens
  source 1..43: mol_type = unassigned DNA
agacttcagggagacatgactgctcagagtggccaaggtactg

SEQ ID NO: 15989 - RNA, 32 nt, Homo sapiens
  source 1..32: mol_type = unassigned RNA
gaggaatactgggacctgcaggacatgctgac

SEQ ID NO: 15990 - DNA, 32 bp, Homo sapiens
  source 1..32: mol_type = unassigned DNA
gaggaatactgggacctgcaggacatgctgac

SEQ ID NO: 15991 - DNA, 32 bp, Homo sapiens
  source 1..32: mol_type = unassigned DNA
gtcagcatgtcctgcaggtcccagtattcctc

SEQ ID NO: 15992 - RNA, 94 nt, Homo sapiens
  source 1..94: mol_type = unassigned RNA
gaaaagcagggctgggcctggctgggtcttggataggggaccccctgtgaagaccaggggctgaaggcttttggcttctcactcccttcccact

SEQ ID NO: 15993 - DNA, 94 bp, Homo sapiens
  source 1..94: mol_type = unassigned DNA
gaaaagcagggctgggcctggctgggtcttggataggggaccccctgtgaagaccaggggctgaaggcttttggcttctcactcccttcccact

SEQ ID NO: 15994 - DNA, 94 bp, Homo sapiens
  source 1..94: mol_type = unassigned DNA
agtgggaagggagtgagaagccaaaagccttcagcccctggtcttcacagggggtcccctatccaagacccagccaggcccagccctgcttttc

SEQ ID NO: 15995 - RNA, 70 nt, Homo sapiens
  source 1..70: mol_type = unassigned RNA
ctagcaaaggtgcagtcccagtaatggtgaaagtgctgtgttggcgaaaggggtcctcaaagtccagctc

SEQ ID NO: 15996 - DNA, 70 bp, Homo sapiens
  source 1..70: mol_type = unassigned DNA
ctagcaaaggtgcagtcccagtaatggtgaaagtgctgtgttggcgaaaggggtcctcaaagtccagctc

SEQ ID NO: 15997 - DNA, 70 bp, Homo sapiens
  source 1..70: mol_type = unassigned DNA
gagctggactttgaggacccctttcgccaacacagcactttcaccattactgggactgcacctttgctag

SEQ ID NO: 15998 - RNA, 40 nt, Homo sapiens
  source 1..40: mol_type = unassigned RNA
ggtcacaataaggaagaacatgggtccctttagagtgaca

SEQ ID NO: 15999 - DNA, 40 bp, Homo sapiens
  source 1..40: mol_type = unassigned DNA
ggtcacaataaggaagaacatgggtccctttagagtgaca

SEQ ID NO: 16000 - DNA, 40 bp, Homo sapiens
  source 1..40: mol_type = unassigned DNA
tgtcactctaaagggacccatgttcttccttattgtgacc

SEQ ID NO: 16001 - RNA, 25 nt, Homo sapiens
  source 1..25: mol_type = unassigned RNA
ttggtctcagtaggttgtatatttc

SEQ ID NO: 16002 - DNA, 25 bp, Homo sapiens
  source 1..25: mol_type = unassigned DNA
ttggtctcagtaggttgtatatttc

SEQ ID NO: 16003 - DNA, 25 bp, Homo sapiens
  source 1..25: mol_type = unassigned DNA
gaaatatacaacctactgagaccaa

SEQ ID NO: 16004 - RNA, 33 nt, Homo sapiens
  source 1..33: mol_type = unassigned RNA
acctaacgatgttgttgctgttgtgcaatggat

SEQ ID NO: 16005 - DNA, 33 bp, Homo sapiens
  source 1..33: mol_type = unassigned DNA
acctaacgatgttgttgctgttgtgcaatggat

SEQ ID NO: 16006 - DNA, 33 bp, Homo sapiens
  source 1..33: mol_type = unassigned DNA
atccattgcacaacagcaacaacatcgttaggt

SEQ ID NO: 16007 - RNA, 23 nt, Homo sapiens
  source 1..23: mol_type = unassigned RNA
ttatgtattagtatgtatctttt

SEQ ID NO: 16008 - DNA, 23 bp, Homo sapiens
  source 1..23: mol_type = unassigned DNA
ttatgtattagtatgtatctttt

SEQ ID NO: 16009 - DNA, 23 bp, Homo sapiens
  source 1..23: mol_type = unassigned DNA
aaaagatacatactaatacataa

SEQ ID NO: 16010 - RNA, 23 nt, Homo sapiens
  source 1..23: mol_type = unassigned RNA
ggcacatggttctgtaggctgca

SEQ ID NO: 16011 - DNA, 23 bp, Homo sapiens
  source 1..23: mol_type = unassigned DNA
ggcacatggttctgtaggctgca

SEQ ID NO: 16012 - DNA, 23 bp, Homo sapiens
  source 1..23: mol_type = unassigned DNA
tgcagcctacagaaccatgtgcc

SEQ ID NO: 16013 - RNA, 21 nt, Homo sapiens
  source 1..21: mol_type = unassigned RNA
agtgattctgacttacatgga

SEQ ID NO: 16014 - DNA, 21 bp, Homo sapiens
  source 1..21: mol_type = unassigned DNA
agtgattctgacttacatgga

SEQ ID NO: 16015 - DNA, 21 bp, Homo sapiens
  source 1..21: mol_type = unassigned DNA
tccatgtaagtcagaatcact

SEQ ID NO: 16016 - RNA, 30 nt, Homo sapiens
  source 1..30: mol_type = unassigned RNA
cattatttcttggtacgtctgtgagagtgt

SEQ ID NO: 16017 - DNA, 30 bp, Homo sapiens
  source 1..30: mol_type = unassigned DNA
cattatttcttggtacgtctgtgagagtgt

SEQ ID NO: 16018 - DNA, 30 bp, Homo sapiens
  source 1..30: mol_type = unassigned DNA
acactctcacagacgtaccaagaaataatg

SEQ ID NO: 16019 - RNA, 34 nt, Homo sapiens
  source 1..34: mol_type = unassigned RNA
ctgttttttttttctgctcgtgtgtgtgtgcgtg

SEQ ID NO: 16020 - DNA, 34 bp, Homo sapiens
  source 1..34: mol_type = unassigned DNA
ctgttttttttttctgctcgtgtgtgtgtgcgtg

SEQ ID NO: 16021 - DNA, 34 bp, Homo sapiens
  source 1..34: mol_type = unassigned DNA
cacgcacacacacacgagcagaaaaaaaaaacag

SEQ ID NO: 16022 - RNA, 31 nt, Homo sapiens
  source 1..31: mol_type = unassigned RNA
ccctctccttgtagcctttttgtgtagtctc

SEQ ID NO: 16023 - DNA, 31 bp, Homo sapiens
  source 1..31: mol_type = unassigned DNA
ccctctccttgtagcctttttgtgtagtctc

SEQ ID NO: 16024 - DNA, 31 bp, Homo sapiens
  source 1..31: mol_type = unassigned DNA
gagactacacaaaaaggctacaaggagaggg

SEQ ID NO: 16025 - RNA, 48 nt, Homo sapiens
  source 1..48: mol_type = unassigned RNA
gaggctatgagtgtgaccgtttggagtagaatcctcactgcagcctgc

SEQ ID NO: 16026 - DNA, 48 bp, Homo sapiens
  source 1..48: mol_type = unassigned DNA
gaggctatgagtgtgaccgtttggagtagaatcctcactgcagcctgc

SEQ ID NO: 16027 - DNA, 48 bp, Homo sapiens
  source 1..48: mol_type = unassigned DNA
gcaggctgcagtgaggattctactccaaacggtcacactcatagcctc

SEQ ID NO: 16028 - RNA, 28 nt, Homo sapiens
  source 1..28: mol_type = unassigned RNA
tattttctttctgcccacgtgaggaggg

SEQ ID NO: 16029 - DNA, 28 bp, Homo sapiens
  source 1..28: mol_type = unassigned DNA
tattttctttctgcccacgtgaggaggg

SEQ ID NO: 16030 - DNA, 28 bp, Homo sapiens
  source 1..28: mol_type = unassigned DNA
ccctcctcacgtgggcagaaagaaaata

SEQ ID NO: 16031 - RNA, 34 nt, Homo sapiens
  source 1..34: mol_type = unassigned RNA
ctgagtcagaattcttggagccttttggagagtt

SEQ ID NO: 16032 - DNA, 34 bp, Homo sapiens
  source 1..34: mol_type = unassigned DNA
ctgagtcagaattcttggagccttttggagagtt

SEQ ID NO: 16033 - DNA, 34 bp, Homo sapiens
  source 1..34: mol_type = unassigned DNA
aactctccaaaaggctccaagaattctgactcag

SEQ ID NO: 16034 - RNA, 23 nt, Homo sapiens
  source 1..23: mol_type = unassigned RNA
atcttgacacttcagtgattaga

SEQ ID NO: 16035 - DNA, 23 bp, Homo sapiens
  source 1..23: mol_type = unassigned DNA
atcttgacacttcagtgattaga

SEQ ID NO: 16036 - DNA, 23 bp, Homo sapiens
  source 1..23: mol_type = unassigned DNA
tctaatcactgaagtgtcaagat

SEQ ID NO: 16037 - RNA, 33 nt, Homo sapiens
  source 1..33: mol_type = unassigned RNA
tgctttgtatgtctgtgggtaaaagctggctag

SEQ ID NO: 16038 - DNA, 33 bp, Homo sapiens
  source 1..33: mol_type = unassigned DNA
tgctttgtatgtctgtgggtaaaagctggctag

SEQ ID NO: 16039 - DNA, 33 bp, Homo sapiens
  source 1..33: mol_type = unassigned DNA
ctagccagcttttacccacagacatacaaagca

SEQ ID NO: 16040 - RNA, 137 nt, Homo sapiens
  source 1..137: mol_type = unassigned RNA
ctgggatttgcttcaaacttatcttggagaggaggcaagggtggaacacagataacacaagatgggctgagagttgaactgcaggagtgggtgacagggcaagcagctcaggatgtcatctttttgcttttgcatat

SEQ ID NO: 16041 - DNA, 137 bp, Homo sapiens
  source 1..137: mol_type = unassigned DNA
ctgggatttgcttcaaacttatcttggagaggaggcaagggtggaacacagataacacaagatgggctgagagttgaactgcaggagtgggtgacagggcaagcagctcaggatgtcatctttttgcttttgcatat

SEQ ID NO: 16042 - DNA, 137 bp, Homo sapiens
  source 1..137: mol_type = unassigned DNA
atatgcaaaagcaaaaagatgacatcctgagctgcttgccctgtcacccactcctgcagttcaactctcagcccatcttgtgttatctgtgttccacccttgcctcctctccaagataagtttgaagcaaatcccag

SEQ ID NO: 16043 - RNA, 36 nt, Homo sapiens
  source 1..36: mol_type = unassigned RNA
gttatttcttttggctcccgtgccagcctgtatctc

SEQ ID NO: 16044 - DNA, 36 bp, Homo sapiens
  source 1..36: mol_type = unassigned DNA
gttatttcttttggctcccgtgccagcctgtatctc

SEQ ID NO: 16045 - DNA, 36 bp, Homo sapiens
  source 1..36: mol_type = unassigned DNA
gagatacaggctggcacgggagccaaaagaaataac

SEQ ID NO: 16046 - RNA, 182 nt, Homo sapiens
  source 1..182: mol_type = unassigned RNA
ggagatgtcagatgagaccccagctagtacaaaaaagcacctgaactaagactacaagggcccccaacctggctgttgggctggttgatttaaaaactgaagtgcctccagctcagacacagggctctgtgctgagactggaagaactcctaactcaggacctggggaactgcgctgagacc

SEQ ID NO: 16047 - DNA, 182 bp, Homo sapiens
  source 1..182: mol_type = unassigned DNA
ggagatgtcagatgagaccccagctagtacaaaaaagcacctgaactaagactacaagggcccccaacctggctgttgggctggttgatttaaaaactgaagtgcctccagctcagacacagggctctgtgctgagactggaagaactcctaactcaggacctggggaactgcgctgagacc

SEQ ID NO: 16048 - DNA, 182 bp, Homo sapiens
  source 1..182: mol_type = unassigned DNA
ggtctcagcgcagttccccaggtcctgagttaggagttcttccagtctcagcacagagccctgtgtctgagctggaggcacttcagtttttaaatcaaccagcccaacagccaggttgggggcccttgtagtcttagttcaggtgcttttttgtactagctggggtctcatctgacatctcc

SEQ ID NO: 16049 - RNA, 23 nt, Homo sapiens
  source 1..23: mol_type = unassigned RNA
ctcttgtagcctttttgagcagt

SEQ ID NO: 16050 - DNA, 23 bp, Homo sapiens
  source 1..23: mol_type = unassigned DNA
ctcttgtagcctttttgagcagt

SEQ ID NO: 16051 - DNA, 23 bp, Homo sapiens
  source 1..23: mol_type = unassigned DNA
actgctcaaaaaggctacaagag

SEQ ID NO: 16052 - RNA, 33 nt, Homo sapiens
  source 1..33: mol_type = unassigned RNA
tgtttgttttacttgtagtctttttgagtattt

SEQ ID NO: 16053 - DNA, 33 bp, Homo sapiens
  source 1..33: mol_type = unassigned DNA
tgtttgttttacttgtagtctttttgagtattt

SEQ ID NO: 16054 - DNA, 33 bp, Homo sapiens
  source 1..33: mol_type = unassigned DNA
aaatactcaaaaagactacaagtaaaacaaaca

SEQ ID NO: 16055 - RNA, 50 nt, Homo sapiens
  source 1..50: mol_type = unassigned RNA
tgtaaagttgtctggcttttcagattattttgagctaagtatttgacata

SEQ ID NO: 16056 - DNA, 50 bp, Homo sapiens
  source 1..50: mol_type = unassigned DNA
tgtaaagttgtctggcttttcagattattttgagctaagtatttgacata

SEQ ID NO: 16057 - DNA, 50 bp, Homo sapiens
  source 1..50: mol_type = unassigned DNA
tatgtcaaatacttagctcaaaataatctgaaaagccagacaactttaca

SEQ ID NO: 16058 - RNA, 23 nt, Homo sapiens
  source 1..23: mol_type = unassigned RNA
attttactttctgctcccgtgag

SEQ ID NO: 16059 - DNA, 23 bp, Homo sapiens
  source 1..23: mol_type = unassigned DNA
attttactttctgctcccgtgag

SEQ ID NO: 16060 - DNA, 23 bp, Homo sapiens
  source 1..23: mol_type = unassigned DNA
ctcacgggagcagaaagtaaaat

SEQ ID NO: 16061 - RNA, 31 nt, Homo sapiens
  source 1..31: mol_type = unassigned RNA
ctcaacacaggtggcctgaagaactcacttt

SEQ ID NO: 16062 - DNA, 31 bp, Homo sapiens
  source 1..31: mol_type = unassigned DNA
ctcaacacaggtggcctgaagaactcacttt

SEQ ID NO: 16063 - DNA, 31 bp, Homo sapiens
  source 1..31: mol_type = unassigned DNA
aaagtgagttcttcaggccacctgtgttgag

SEQ ID NO: 16064 - RNA, 33 nt, Homo sapiens
  source 1..33: mol_type = unassigned RNA
actcaaactgtttgggcaaagaatttaatccag

SEQ ID NO: 16065 - DNA, 33 bp, Homo sapiens
  source 1..33: mol_type = unassigned DNA
actcaaactgtttgggcaaagaatttaatccag

SEQ ID NO: 16066 - DNA, 33 bp, Homo sapiens
  source 1..33: mol_type = unassigned DNA
ctggattaaattctttgcccaaacagtttgagt

SEQ ID NO: 16067 - RNA, 28 nt, Homo sapiens
  source 1..28: mol_type = unassigned RNA
cacaacttttgggtgactagctgaatgt

SEQ ID NO: 16068 - DNA, 28 bp, Homo sapiens
  source 1..28: mol_type = unassigned DNA
cacaacttttgggtgactagctgaatgt

SEQ ID NO: 16069 - DNA, 28 bp, Homo sapiens
  source 1..28: mol_type = unassigned DNA
acattcagctagtcacccaaaagttgtg

SEQ ID NO: 16070 - RNA, 27 nt, Homo sapiens
  source 1..27: mol_type = unassigned RNA
cactcaaactgtggggctatatcagat

SEQ ID NO: 16071 - DNA, 27 bp, Homo sapiens
  source 1..27: mol_type = unassigned DNA
cactcaaactgtggggctatatcagat

SEQ ID NO: 16072 - DNA, 27 bp, Homo sapiens
  source 1..27: mol_type = unassigned DNA
atctgatatagccccacagtttgagtg

SEQ ID NO: 16073 - RNA, 47 nt, Homo sapiens
  source 1..47: mol_type = unassigned RNA
aaagtggaaattggacttgttataaagctggttgtctagctgcaggt

SEQ ID NO: 16074 - DNA, 47 bp, Homo sapiens
  source 1..47: mol_type = unassigned DNA
aaagtggaaattggacttgttataaagctggttgtctagctgcaggt

SEQ ID NO: 16075 - DNA, 47 bp, Homo sapiens
  source 1..47: mol_type = unassigned DNA
acctgcagctagacaaccagctttataacaagtccaatttccacttt

SEQ ID NO: 16076 - RNA, 86 nt, Homo sapiens
  source 1..86: mol_type = unassigned RNA
cagctgagattttaattggaattcctttgaatctgtagaccaatctgagaggaattggtatcttaacagcattattttgatcagca

SEQ ID NO: 16077 - DNA, 86 bp, Homo sapiens
  source 1..86: mol_type = unassigned DNA
cagctgagattttaattggaattcctttgaatctgtagaccaatctgagaggaattggtatcttaacagcattattttgatcagca

SEQ ID NO: 16078 - DNA, 86 bp, Homo sapiens
  source 1..86: mol_type = unassigned DNA
tgctgatcaaaataatgctgttaagataccaattcctctcagattggtctacagattcaaaggaattccaattaaaatctcagctg

SEQ ID NO: 16079 - RNA, 24 nt, Homo sapiens
  source 1..24: mol_type = unassigned RNA
tttgtgggtatataggtgtatgta

SEQ ID NO: 16080 - DNA, 24 bp, Homo sapiens
  source 1..24: mol_type = unassigned DNA
tttgtgggtatataggtgtatgta

SEQ ID NO: 16081 - DNA, 24 bp, Homo sapiens
  source 1..24: mol_type = unassigned DNA
tacatacacctatatacccacaaa

SEQ ID NO: 16082 - RNA, 36 nt, Homo sapiens
  source 1..36: mol_type = unassigned RNA
cctctatagtccagtttccagatttcatcttcaaaa

SEQ ID NO: 16083 - DNA, 36 bp, Homo sapiens
  source 1..36: mol_type = unassigned DNA
cctctatagtccagtttccagatttcatcttcaaaa

SEQ ID NO: 16084 - DNA, 36 bp, Homo sapiens
  source 1..36: mol_type = unassigned DNA
ttttgaagatgaaatctggaaactggactatagagg

SEQ ID NO: 16085 - RNA, 40 nt, Homo sapiens
  source 1..40: mol_type = unassigned RNA
tctcttcactccagaactattgagttggctgtgagatcat

SEQ ID NO: 16086 - DNA, 40 bp, Homo sapiens
  source 1..40: mol_type = unassigned DNA
tctcttcactccagaactattgagttggctgtgagatcat

SEQ ID NO: 16087 - DNA, 40 bp, Homo sapiens
  source 1..40: mol_type = unassigned DNA
atgatctcacagccaactcaatagttctggagtgaagaga

SEQ ID NO: 16088 - RNA, 47 nt, Homo sapiens
  source 1..47: mol_type = unassigned RNA
acaaaaccaatcaatagccatggagtgggctgtcctgggcagactgg

SEQ ID NO: 16089 - DNA, 47 bp, Homo sapiens
  source 1..47: mol_type = unassigned DNA
acaaaaccaatcaatagccatggagtgggctgtcctgggcagactgg

SEQ ID NO: 16090 - DNA, 47 bp, Homo sapiens
  source 1..47: mol_type = unassigned DNA
ccagtctgcccaggacagcccactccatggctattgattggttttgt

SEQ ID NO: 16091 - RNA, 57 nt, Homo sapiens
  source 1..57: mol_type = unassigned RNA
tggaacaaccagagtccagtgtcctgggaaggagccctgctcctcctactctccagg

SEQ ID NO: 16092 - DNA, 57 bp, Homo sapiens
  source 1..57: mol_type = unassigned DNA
tggaacaaccagagtccagtgtcctgggaaggagccctgctcctcctactctccagg

SEQ ID NO: 16093 - DNA, 57 bp, Homo sapiens
  source 1..57: mol_type = unassigned DNA
cctggagagtaggaggagcagggctccttcccaggacactggactctggttgttcca

SEQ ID NO: 16094 - RNA, 77 nt, Homo sapiens
  source 1..77: mol_type = unassigned RNA
tttgaaaatatttgaatgtgcttgttatttggtaatctagttgaatgtagtgactgtgctgtcaccttttcttcccc

SEQ ID NO: 16095 - DNA, 77 bp, Homo sapiens
  source 1..77: mol_type = unassigned DNA
tttgaaaatatttgaatgtgcttgttatttggtaatctagttgaatgtagtgactgtgctgtcaccttttcttcccc

SEQ ID NO: 16096 - DNA, 77 bp, Homo sapiens
  source 1..77: mol_type = unassigned DNA
ggggaagaaaaggtgacagcacagtcactacattcaactagattaccaaataacaagcacattcaaatattttcaaa

SEQ ID NO: 16097 - RNA, 140 nt, Homo sapiens
  source 1..140: mol_type = unassigned RNA
gtttatgaggtcatctaagcactgcacactggaagtgggagcctctgtgtatgtgggagtgagcatggggcagaggagaaagcaagaggcagtaaaaggaactgtaggccgggagcagtggctcacgcctgtaatcccag

SEQ ID NO: 16098 - DNA, 140 bp, Homo sapiens
  source 1..140: mol_type = unassigned DNA
gtttatgaggtcatctaagcactgcacactggaagtgggagcctctgtgtatgtgggagtgagcatggggcagaggagaaagcaagaggcagtaaaaggaactgtaggccgggagcagtggctcacgcctgtaatcccag

SEQ ID NO: 16099 - DNA, 140 bp, Homo sapiens
  source 1..140: mol_type = unassigned DNA
ctgggattacaggcgtgagccactgctcccggcctacagttccttttactgcctcttgctttctcctctgccccatgctcactcccacatacacagaggctcccacttccagtgtgcagtgcttagatgacctcataaac

SEQ ID NO: 16100 - RNA, 27 nt, Homo sapiens
  source 1..27: mol_type = unassigned RNA
aaaatctttgtttatctaactgtacct

SEQ ID NO: 16101 - DNA, 27 bp, Homo sapiens
  source 1..27: mol_type = unassigned DNA
aaaatctttgtttatctaactgtacct

SEQ ID NO: 16102 - DNA, 27 bp, Homo sapiens
  source 1..27: mol_type = unassigned DNA
aggtacagttagataaacaaagatttt

SEQ ID NO: 16103 - RNA, 25 nt, Homo sapiens
  source 1..25: mol_type = unassigned RNA
atttctctttctctagctgtatgta

SEQ ID NO: 16104 - DNA, 25 bp, Homo sapiens
  source 1..25: mol_type = unassigned DNA
atttctctttctctagctgtatgta

SEQ ID NO: 16105 - DNA, 25 bp, Homo sapiens
  source 1..25: mol_type = unassigned DNA
tacatacagctagagaaagagaaat

SEQ ID NO: 16106 - RNA, 34 nt, Homo sapiens
  source 1..34: mol_type = unassigned RNA
ttcacctctgggctgctggagaggactgagagat

SEQ ID NO: 16107 - DNA, 34 bp, Homo sapiens
  source 1..34: mol_type = unassigned DNA
ttcacctctgggctgctggagaggactgagagat

SEQ ID NO: 16108 - DNA, 34 bp, Homo sapiens
  source 1..34: mol_type = unassigned DNA
atctctcagtcctctccagcagcccagaggtgaa

SEQ ID NO: 16109 - RNA, 40 nt, Homo sapiens
  source 1..40: mol_type = unassigned RNA
ccagatatgccccttctcctgggatatctatctttatgac

SEQ ID NO: 16110 - DNA, 40 bp, Homo sapiens
  source 1..40: mol_type = unassigned DNA
ccagatatgccccttctcctgggatatctatctttatgac

SEQ ID NO: 16111 - DNA, 40 bp, Homo sapiens
  source 1..40: mol_type = unassigned DNA
gtcataaagatagatatcccaggagaaggggcatatctgg

SEQ ID NO: 16112 - RNA, 24 nt, Homo sapiens
  source 1..24: mol_type = unassigned RNA
gagtctgtggctgaatggacaaaa

SEQ ID NO: 16113 - DNA, 24 bp, Homo sapiens
  source 1..24: mol_type = unassigned DNA
gagtctgtggctgaatggacaaaa

SEQ ID NO: 16114 - DNA, 24 bp, Homo sapiens
  source 1..24: mol_type = unassigned DNA
ttttgtccattcagccacagactc

SEQ ID NO: 16115 - RNA, 61 nt, Homo sapiens
  source 1..61: mol_type = unassigned RNA
gtattttcaattccatgcttgctgtctgtagtgcagccatacaactgactattttacacac

SEQ ID NO: 16116 - DNA, 61 bp, Homo sapiens
  source 1..61: mol_type = unassigned DNA
gtattttcaattccatgcttgctgtctgtagtgcagccatacaactgactattttacacac

SEQ ID NO: 16117 - DNA, 61 bp, Homo sapiens
  source 1..61: mol_type = unassigned DNA
gtgtgtaaaatagtcagttgtatggctgcactacagacagcaagcatggaattgaaaatac

SEQ ID NO: 16118 - RNA, 23 nt, Homo sapiens
  source 1..23: mol_type = unassigned RNA
cgagcaatgccagggtttccacc

SEQ ID NO: 16119 - DNA, 23 bp, Homo sapiens
  source 1..23: mol_type = unassigned DNA
cgagcaatgccagggtttccacc

SEQ ID NO: 16120 - DNA, 23 bp, Homo sapiens
  source 1..23: mol_type = unassigned DNA
ggtggaaaccctggcattgctcg

SEQ ID NO: 16121 - RNA, 95 nt, Homo sapiens
  source 1..95: mol_type = unassigned RNA
gcatccagaaaggagagaacgcagaggaagaccttgtagtttccggccctcctggtccaagtcataattacctctgtggatttccagctgtatgg

SEQ ID NO: 16122 - DNA, 95 bp, Homo sapiens
  source 1..95: mol_type = unassigned DNA
gcatccagaaaggagagaacgcagaggaagaccttgtagtttccggccctcctggtccaagtcataattacctctgtggatttccagctgtatgg

SEQ ID NO: 16123 - DNA, 95 bp, Homo sapiens
  source 1..95: mol_type = unassigned DNA
ccatacagctggaaatccacagaggtaattatgacttggaccaggagggccggaaactacaaggtcttcctctgcgttctctcctttctggatgc

SEQ ID NO: 16124 - RNA, 25 nt, Homo sapiens
  source 1..25: mol_type = unassigned RNA
tactgccagtgatgggctgtcactt

SEQ ID NO: 16125 - DNA, 25 bp, Homo sapiens
  source 1..25: mol_type = unassigned DNA
tactgccagtgatgggctgtcactt

SEQ ID NO: 16126 - DNA, 25 bp, Homo sapiens
  source 1..25: mol_type = unassigned DNA
aagtgacagcccatcactggcagta

SEQ ID NO: 16127 - RNA, 140 nt, Homo sapiens
  source 1..140: mol_type = unassigned RNA
ggcatggaggagtgacggcaggaactttctgtgctctgacaacccttatgcaccaactagaaaaagaaaattccgtggatgtttaccaggtagccaagatgatcaatctgatgaggccaggagtctttgctgacattgta

SEQ ID NO: 16128 - DNA, 140 bp, Homo sapiens
  source 1..140: mol_type = unassigned DNA
ggcatggaggagtgacggcaggaactttctgtgctctgacaacccttatgcaccaactagaaaaagaaaattccgtggatgtttaccaggtagccaagatgatcaatctgatgaggccaggagtctttgctgacattgta

SEQ ID NO: 16129 - DNA, 140 bp, Homo sapiens
  source 1..140: mol_type = unassigned DNA
tacaatgtcagcaaagactcctggcctcatcagattgatcatcttggctacctggtaaacatccacggaattttctttttctagttggtgcataagggttgtcagagcacagaaagttcctgccgtcactcctccatgcc

SEQ ID NO: 16130 - RNA, 73 nt, Homo sapiens
  source 1..73: mol_type = unassigned RNA
cctttgaataccctgctgtaggccattatgatgactggcattgtgcattaccaccacaaaggctgaagaaagc

SEQ ID NO: 16131 - DNA, 73 bp, Homo sapiens
  source 1..73: mol_type = unassigned DNA
cctttgaataccctgctgtaggccattatgatgactggcattgtgcattaccaccacaaaggctgaagaaagc

SEQ ID NO: 16132 - DNA, 73 bp, Homo sapiens
  source 1..73: mol_type = unassigned DNA
gctttcttcagcctttgtggtggtaatgcacaatgccagtcatcataatggcctacagcagggtattcaaagg

SEQ ID NO: 16133 - RNA, 30 nt, Homo sapiens
  source 1..30: mol_type = unassigned RNA
tcttctgtgtccagcggaggagcaactctg

SEQ ID NO: 16134 - DNA, 30 bp, Homo sapiens
  source 1..30: mol_type = unassigned DNA
tcttctgtgtccagcggaggagcaactctg

SEQ ID NO: 16135 - DNA, 30 bp, Homo sapiens
  source 1..30: mol_type = unassigned DNA
cagagttgctcctccgctggacacagaaga

SEQ ID NO: 16136 - RNA, 34 nt, Homo sapiens
  source 1..34: mol_type = unassigned RNA
tgctctgtaattatctagttgtatggccctgggc

SEQ ID NO: 16137 - DNA, 34 bp, Homo sapiens
  source 1..34: mol_type = unassigned DNA
tgctctgtaattatctagttgtatggccctgggc

SEQ ID NO: 16138 - DNA, 34 bp, Homo sapiens
  source 1..34: mol_type = unassigned DNA
gcccagggccatacaactagataattacagagca

SEQ ID NO: 16139 - RNA, 48 nt, Homo sapiens
  source 1..48: mol_type = unassigned RNA
atcgcctttgcttggttttctagctgtgaggctggaccatattctggc

SEQ ID NO: 16140 - DNA, 48 bp, Homo sapiens
  source 1..48: mol_type = unassigned DNA
atcgcctttgcttggttttctagctgtgaggctggaccatattctggc

SEQ ID NO: 16141 - DNA, 48 bp, Homo sapiens
  source 1..48: mol_type = unassigned DNA
gccagaatatggtccagcctcacagctagaaaaccaagcaaaggcgat

SEQ ID NO: 16142 - RNA, 30 nt, Homo sapiens
  source 1..30: mol_type = unassigned RNA
gcatggggtattagctgtatgactttcagg

SEQ ID NO: 16143 - DNA, 30 bp, Homo sapiens
  source 1..30: mol_type = unassigned DNA
gcatggggtattagctgtatgactttcagg

SEQ ID NO: 16144 - DNA, 30 bp, Homo sapiens
  source 1..30: mol_type = unassigned DNA
cctgaaagtcatacagctaataccccatgc

SEQ ID NO: 16145 - RNA, 33 nt, Homo sapiens
  source 1..33: mol_type = unassigned RNA
ggtatgactgtagattgttcacgacgtttccag

SEQ ID NO: 16146 - DNA, 33 bp, Homo sapiens
  source 1..33: mol_type = unassigned DNA
ggtatgactgtagattgttcacgacgtttccag

SEQ ID NO: 16147 - DNA, 33 bp, Homo sapiens
  source 1..33: mol_type = unassigned DNA
ctggaaacgtcgtgaacaatctacagtcatacc

SEQ ID NO: 16148 - RNA, 68 nt, Homo sapiens
  source 1..68: mol_type = unassigned RNA
ctttattttggctgtttcctggttatctgagctctatgtggcacaaaaatttatttctacctctgaag

SEQ ID NO: 16149 - DNA, 68 bp, Homo sapiens
  source 1..68: mol_type = unassigned DNA
ctttattttggctgtttcctggttatctgagctctatgtggcacaaaaatttatttctacctctgaag

SEQ ID NO: 16150 - DNA, 68 bp, Homo sapiens
  source 1..68: mol_type = unassigned DNA
cttcagaggtagaaataaatttttgtgccacatagagctcagataaccaggaaacagccaaaataaag

SEQ ID NO: 16151 - RNA, 94 nt, Homo sapiens
  source 1..94: mol_type = unassigned RNA
ttctgtgggattggttgtgatgtcatctttattatttctgattgtgtttattggatcttctctcttttttctttgttaatctagctggatcact

SEQ ID NO: 16152 - DNA, 94 bp, Homo sapiens
  source 1..94: mol_type = unassigned DNA
ttctgtgggattggttgtgatgtcatctttattatttctgattgtgtttattggatcttctctcttttttctttgttaatctagctggatcact

SEQ ID NO: 16153 - DNA, 94 bp, Homo sapiens
  source 1..94: mol_type = unassigned DNA
agtgatccagctagattaacaaagaaaaaagagagaagatccaataaacacaatcagaaataataaagatgacatcacaaccaatcccacagaa

SEQ ID NO: 16154 - RNA, 28 nt, Homo sapiens
  source 1..28: mol_type = unassigned RNA
ctgctctcggagcgctcagaccgcggcc

SEQ ID NO: 16155 - DNA, 28 bp, Homo sapiens
  source 1..28: mol_type = unassigned DNA
ctgctctcggagcgctcagaccgcggcc

SEQ ID NO: 16156 - DNA, 28 bp, Homo sapiens
  source 1..28: mol_type = unassigned DNA
ggccgcggtctgagcgctccgagagcag

SEQ ID NO: 16157 - RNA, 30 nt, Homo sapiens
  source 1..30: mol_type = unassigned RNA
caatagggcttgagactctgagggccaatg

SEQ ID NO: 16158 - DNA, 30 bp, Homo sapiens
  source 1..30: mol_type = unassigned DNA
caatagggcttgagactctgagggccaatg

SEQ ID NO: 16159 - DNA, 30 bp, Homo sapiens
  source 1..30: mol_type = unassigned DNA
cattggccctcagagtctcaagccctattg

SEQ ID NO: 16160 - RNA, 43 nt, Homo sapiens
  source 1..43: mol_type = unassigned RNA
gaagattttcacactgatgttcatgatggatatcggcctgaag

SEQ ID NO: 16161 - DNA, 43 bp, Homo sapiens
  source 1..43: mol_type = unassigned DNA
gaagattttcacactgatgttcatgatggatatcggcctgaag

SEQ ID NO: 16162 - DNA, 43 bp, Homo sapiens
  source 1..43: mol_type = unassigned DNA
cttcaggccgatatccatcatgaacatcagtgtgaaaatcttc

SEQ ID NO: 16163 - RNA, 25 nt, Homo sapiens
  source 1..25: mol_type = unassigned RNA
tctgtgattacccagctgtatggac

SEQ ID NO: 16164 - DNA, 25 bp, Homo sapiens
  source 1..25: mol_type = unassigned DNA
tctgtgattacccagctgtatggac

SEQ ID NO: 16165 - DNA, 25 bp, Homo sapiens
  source 1..25: mol_type = unassigned DNA
gtccatacagctgggtaatcacaga

SEQ ID NO: 16166 - RNA, 23 nt, Homo sapiens
  source 1..23: mol_type = unassigned RNA
gaacatttcaactgatgttgaca

SEQ ID NO: 16167 - DNA, 23 bp, Homo sapiens
  source 1..23: mol_type = unassigned DNA
gaacatttcaactgatgttgaca

SEQ ID NO: 16168 - DNA, 23 bp, Homo sapiens
  source 1..23: mol_type = unassigned DNA
tgtcaacatcagttgaaatgttc

SEQ ID NO: 16169 - RNA, 24 nt, Homo sapiens
  source 1..24: mol_type = unassigned RNA
ttctggtagctttttgggtagatt

SEQ ID NO: 16170 - DNA, 24 bp, Homo sapiens
  source 1..24: mol_type = unassigned DNA
ttctggtagctttttgggtagatt

SEQ ID NO: 16171 - DNA, 24 bp, Homo sapiens
  source 1..24: mol_type = unassigned DNA
aatctacccaaaaagctaccagaa

SEQ ID NO: 16172 - RNA, 39 nt, Homo sapiens
  source 1..39: mol_type = unassigned RNA
tgaattttagcgttttggtgtagaattctcctgtaaaca

SEQ ID NO: 16173 - DNA, 39 bp, Homo sapiens
  source 1..39: mol_type = unassigned DNA
tgaattttagcgttttggtgtagaattctcctgtaaaca

SEQ ID NO: 16174 - DNA, 39 bp, Homo sapiens
  source 1..39: mol_type = unassigned DNA
tgtttacaggagaattctacaccaaaacgctaaaattca

SEQ ID NO: 16175 - RNA, 27 nt, Homo sapiens
  source 1..27: mol_type = unassigned RNA
tttcatttctttgatgactgacattga

SEQ ID NO: 16176 - DNA, 27 bp, Homo sapiens
  source 1..27: mol_type = unassigned DNA
tttcatttctttgatgactgacattga

SEQ ID NO: 16177 - DNA, 27 bp, Homo sapiens
  source 1..27: mol_type = unassigned DNA
tcaatgtcagtcatcaaagaaatgaaa

SEQ ID NO: 16178 - RNA, 27 nt, Homo sapiens
  source 1..27: mol_type = unassigned RNA
ctaagataacagttggactcttggaaa

SEQ ID NO: 16179 - DNA, 27 bp, Homo sapiens
  source 1..27: mol_type = unassigned DNA
ctaagataacagttggactcttggaaa

SEQ ID NO: 16180 - DNA, 27 bp, Homo sapiens
  source 1..27: mol_type = unassigned DNA
tttccaagagtccaactgttatcttag

SEQ ID NO: 16181 - RNA, 27 nt, Homo sapiens
  source 1..27: mol_type = unassigned RNA
tttgtcatggatatgggacagagaagc

SEQ ID NO: 16182 - DNA, 27 bp, Homo sapiens
  source 1..27: mol_type = unassigned DNA
tttgtcatggatatgggacagagaagc

SEQ ID NO: 16183 - DNA, 27 bp, Homo sapiens
  source 1..27: mol_type = unassigned DNA
gcttctctgtcccatatccatgacaaa

SEQ ID NO: 16184 - RNA, 40 nt, Homo sapiens
  source 1..40: mol_type = unassigned RNA
attatataggcaaatctagaggtattctttttctcgttaa

SEQ ID NO: 16185 - DNA, 40 bp, Homo sapiens
  source 1..40: mol_type = unassigned DNA
attatataggcaaatctagaggtattctttttctcgttaa

SEQ ID NO: 16186 - DNA, 40 bp, Homo sapiens
  source 1..40: mol_type = unassigned DNA
ttaacgagaaaaagaatacctctagatttgcctatataat

SEQ ID NO: 16187 - RNA, 26 nt, Homo sapiens
  source 1..26: mol_type = unassigned RNA
ggggagttagtagtttttgttgttgt

SEQ ID NO: 16188 - DNA, 26 bp, Homo sapiens
  source 1..26: mol_type = unassigned DNA
ggggagttagtagtttttgttgttgt

SEQ ID NO: 16189 - DNA, 26 bp, Homo sapiens
  source 1..26: mol_type = unassigned DNA
acaacaacaaaaactactaactcccc

SEQ ID NO: 16190 - RNA, 133 nt, Homo sapiens
  source 1..133: mol_type = unassigned RNA
gccactctccgagccactctctgtcactaaacacgtcttactgggcatctcatgcatcagacgcgatcccagggaggcaccagtgttgaactgactgtcaaaggaggccccacagagaaggtggcatttgggc

SEQ ID NO: 16191 - DNA, 133 bp, Homo sapiens
  source 1..133: mol_type = unassigned DNA
gccactctccgagccactctctgtcactaaacacgtcttactgggcatctcatgcatcagacgcgatcccagggaggcaccagtgttgaactgactgtcaaaggaggccccacagagaaggtggcatttgggc

SEQ ID NO: 16192 - DNA, 133 bp, Homo sapiens
  source 1..133: mol_type = unassigned DNA
gcccaaatgccaccttctctgtggggcctcctttgacagtcagttcaacactggtgcctccctgggatcgcgtctgatgcatgagatgcccagtaagacgtgtttagtgacagagagtggctcggagagtggc

SEQ ID NO: 16193 - RNA, 24 nt, Homo sapiens
  source 1..24: mol_type = unassigned RNA
taattgtaacctttttgagtaagt

SEQ ID NO: 16194 - DNA, 24 bp, Homo sapiens
  source 1..24: mol_type = unassigned DNA
taattgtaacctttttgagtaagt

SEQ ID NO: 16195 - DNA, 24 bp, Homo sapiens
  source 1..24: mol_type = unassigned DNA
acttactcaaaaaggttacaatta

SEQ ID NO: 16196 - RNA, 72 nt, Homo sapiens
  source 1..72: mol_type = unassigned RNA
aaaagaggttataatttggaggtagaactcccaagacctgctgatgaatttgatatgggagtgagaaagacg

SEQ ID NO: 16197 - DNA, 72 bp, Homo sapiens
  source 1..72: mol_type = unassigned DNA
aaaagaggttataatttggaggtagaactcccaagacctgctgatgaatttgatatgggagtgagaaagacg

SEQ ID NO: 16198 - DNA, 72 bp, Homo sapiens
  source 1..72: mol_type = unassigned DNA
cgtctttctcactcccatatcaaattcatcagcaggtcttgggagttctacctccaaattataacctctttt

SEQ ID NO: 16199 - RNA, 24 nt, Homo sapiens
  source 1..24: mol_type = unassigned RNA
aatatactgccatataatgatggt

SEQ ID NO: 16200 - DNA, 24 bp, Homo sapiens
  source 1..24: mol_type = unassigned DNA
aatatactgccatataatgatggt

SEQ ID NO: 16201 - DNA, 24 bp, Homo sapiens
  source 1..24: mol_type = unassigned DNA
accatcattatatggcagtatatt

SEQ ID NO: 16202 - RNA, 59 nt, Homo sapiens
  source 1..59: mol_type = unassigned RNA
tgatatctttcccatttttctctgtttatcttttataggtatagggcatggtaaaacaa

SEQ ID NO: 16203 - DNA, 59 bp, Homo sapiens
  source 1..59: mol_type = unassigned DNA
tgatatctttcccatttttctctgtttatcttttataggtatagggcatggtaaaacaa

SEQ ID NO: 16204 - DNA, 59 bp, Homo sapiens
  source 1..59: mol_type = unassigned DNA
ttgttttaccatgccctatacctataaaagataaacagagaaaaatgggaaagatatca

SEQ ID NO: 16205 - RNA, 43 nt, Homo sapiens
  source 1..43: mol_type = unassigned RNA
tgatgtattagtttttgggattatcctaggaagaactcccact

SEQ ID NO: 16206 - DNA, 43 bp, Homo sapiens
  source 1..43: mol_type = unassigned DNA
tgatgtattagtttttgggattatcctaggaagaactcccact

SEQ ID NO: 16207 - DNA, 43 bp, Homo sapiens
  source 1..43: mol_type = unassigned DNA
agtgggagttcttcctaggataatcccaaaaactaatacatca

SEQ ID NO: 16208 - RNA, 28 nt, Homo sapiens
  source 1..28: mol_type = unassigned RNA
acaccagaagctatggagttatgcagaa

SEQ ID NO: 16209 - DNA, 28 bp, Homo sapiens
  source 1..28: mol_type = unassigned DNA
acaccagaagctatggagttatgcagaa

SEQ ID NO: 16210 - DNA, 28 bp, Homo sapiens
  source 1..28: mol_type = unassigned DNA
ttctgcataactccatagcttctggtgt

SEQ ID NO: 16211 - RNA, 25 nt, Homo sapiens
  source 1..25: mol_type = unassigned RNA
agggtttgtagtttgtgtgggtaga

SEQ ID NO: 16212 - DNA, 25 bp, Homo sapiens
  source 1..25: mol_type = unassigned DNA
agggtttgtagtttgtgtgggtaga

SEQ ID NO: 16213 - DNA, 25 bp, Homo sapiens
  source 1..25: mol_type = unassigned DNA
tctacccacacaaactacaaaccct

SEQ ID NO: 16214 - RNA, 27 nt, Homo sapiens
  source 1..27: mol_type = unassigned RNA
tacttatttgtactctgtgggtaatat

SEQ ID NO: 16215 - DNA, 27 bp, Homo sapiens
  source 1..27: mol_type = unassigned DNA
tacttatttgtactctgtgggtaatat

SEQ ID NO: 16216 - DNA, 27 bp, Homo sapiens
  source 1..27: mol_type = unassigned DNA
atattacccacagagtacaaataagta

SEQ ID NO: 16217 - RNA, 49 nt, Homo sapiens
  source 1..49: mol_type = unassigned RNA
gctgtctcatgattttaattggtatttctctgatgacttacgttgagta

SEQ ID NO: 16218 - DNA, 49 bp, Homo sapiens
  source 1..49: mol_type = unassigned DNA
gctgtctcatgattttaattggtatttctctgatgacttacgttgagta

SEQ ID NO: 16219 - DNA, 49 bp, Homo sapiens
  source 1..49: mol_type = unassigned DNA
tactcaacgtaagtcatcagagaaataccaattaaaatcatgagacagc

SEQ ID NO: 16220 - RNA, 24 nt, Homo sapiens
  source 1..24: mol_type = unassigned RNA
ttatggtatccttttgcagtagca

SEQ ID NO: 16221 - DNA, 24 bp, Homo sapiens
  source 1..24: mol_type = unassigned DNA
ttatggtatccttttgcagtagca

SEQ ID NO: 16222 - DNA, 24 bp, Homo sapiens
  source 1..24: mol_type = unassigned DNA
tgctactgcaaaaggataccataa

SEQ ID NO: 16223 - RNA, 28 nt, Homo sapiens
  source 1..28: mol_type = unassigned RNA
acatgagttttgatgacttacactgagt

SEQ ID NO: 16224 - DNA, 28 bp, Homo sapiens
  source 1..28: mol_type = unassigned DNA
acatgagttttgatgacttacactgagt

SEQ ID NO: 16225 - DNA, 28 bp, Homo sapiens
  source 1..28: mol_type = unassigned DNA
actcagtgtaagtcatcaaaactcatgt

SEQ ID NO: 16226 - RNA, 48 nt, Homo sapiens
  source 1..48: mol_type = unassigned RNA
tgagttattctttattgtgtttcctgaccaccgatggccagagacctg

SEQ ID NO: 16227 - DNA, 48 bp, Homo sapiens
  source 1..48: mol_type = unassigned DNA
tgagttattctttattgtgtttcctgaccaccgatggccagagacctg

SEQ ID NO: 16228 - DNA, 48 bp, Homo sapiens
  source 1..48: mol_type = unassigned DNA
caggtctctggccatcggtggtcaggaaacacaataaagaataactca

SEQ ID NO: 16229 - RNA, 23 nt, Homo sapiens
  source 1..23: mol_type = unassigned RNA
atttttatgtctgtgggttgaat

SEQ ID NO: 16230 - DNA, 23 bp, Homo sapiens
  source 1..23: mol_type = unassigned DNA
atttttatgtctgtgggttgaat

SEQ ID NO: 16231 - DNA, 23 bp, Homo sapiens
  source 1..23: mol_type = unassigned DNA
attcaacccacagacataaaaat

SEQ ID NO: 16232 - RNA, 24 nt, Homo sapiens
  source 1..24: mol_type = unassigned RNA
atgaggtatttggttttctattta

SEQ ID NO: 16233 - DNA, 24 bp, Homo sapiens
  source 1..24: mol_type = unassigned DNA
atgaggtatttggttttctattta

SEQ ID NO: 16234 - DNA, 24 bp, Homo sapiens
  source 1..24: mol_type = unassigned DNA
taaatagaaaaccaaatacctcat

SEQ ID NO: 16235 - RNA, 50 nt, Homo sapiens
  source 1..50: mol_type = unassigned RNA
ttttggatttaagagtgtggactctggaggtggcatgtgtgagtttaaaa

SEQ ID NO: 16236 - DNA, 50 bp, Homo sapiens
  source 1..50: mol_type = unassigned DNA
ttttggatttaagagtgtggactctggaggtggcatgtgtgagtttaaaa

SEQ ID NO: 16237 - DNA, 50 bp, Homo sapiens
  source 1..50: mol_type = unassigned DNA
ttttaaactcacacatgccacctccagagtccacactcttaaatccaaaa

SEQ ID NO: 16238 - RNA, 29 nt, Homo sapiens
  source 1..29: mol_type = unassigned RNA
ttaggtattcgtttttgtgcttttttttt

SEQ ID NO: 16239 - DNA, 29 bp, Homo sapiens
  source 1..29: mol_type = unassigned DNA
ttaggtattcgtttttgtgcttttttttt

SEQ ID NO: 16240 - DNA, 29 bp, Homo sapiens
  source 1..29: mol_type = unassigned DNA
aaaaaaaaagcacaaaaacgaatacctaa

SEQ ID NO: 16241 - RNA, 74 nt, Homo sapiens
  source 1..74: mol_type = unassigned RNA
gcaagagaaactggcagctaaagccttgcagcttttctgaactaacgctctgaccaagaaccagaatggaatat

SEQ ID NO: 16242 - DNA, 74 bp, Homo sapiens
  source 1..74: mol_type = unassigned DNA
gcaagagaaactggcagctaaagccttgcagcttttctgaactaacgctctgaccaagaaccagaatggaatat

SEQ ID NO: 16243 - DNA, 74 bp, Homo sapiens
  source 1..74: mol_type = unassigned DNA
atattccattctggttcttggtcagagcgttagttcagaaaagctgcaaggctttagctgccagtttctcttgc

SEQ ID NO: 16244 - RNA, 24 nt, Homo sapiens
  source 1..24: mol_type = unassigned RNA
gaaatactgcagtgtattgatgat

SEQ ID NO: 16245 - DNA, 24 bp, Homo sapiens
  source 1..24: mol_type = unassigned DNA
gaaatactgcagtgtattgatgat

SEQ ID NO: 16246 - DNA, 24 bp, Homo sapiens
  source 1..24: mol_type = unassigned DNA
atcatcaatacactgcagtatttc

SEQ ID NO: 16247 - RNA, 33 nt, Homo sapiens
  source 1..33: mol_type = unassigned RNA
tctagatgagttagtgtagcctttttgagttca

SEQ ID NO: 16248 - DNA, 33 bp, Homo sapiens
  source 1..33: mol_type = unassigned DNA
tctagatgagttagtgtagcctttttgagttca

SEQ ID NO: 16249 - DNA, 33 bp, Homo sapiens
  source 1..33: mol_type = unassigned DNA
tgaactcaaaaaggctacactaactcatctaga

SEQ ID NO: 16250 - RNA, 28 nt, Homo sapiens
  source 1..28: mol_type = unassigned RNA
ttgcgtgacgggcgagggggcggccacc

SEQ ID NO: 16251 - DNA, 28 bp, Homo sapiens
  source 1..28: mol_type = unassigned DNA
ttgcgtgacgggcgagggggcggccacc

SEQ ID NO: 16252 - DNA, 28 bp, Homo sapiens
  source 1..28: mol_type = unassigned DNA
ggtggccgccccctcgcccgtcacgcaa

SEQ ID NO: 16253 - RNA, 51 nt, Homo sapiens
  source 1..51: mol_type = unassigned RNA
gtaaacctggttctgtggtctttcagttatgcccgctgacttatgaggatt

SEQ ID NO: 16254 - DNA, 51 bp, Homo sapiens
  source 1..51: mol_type = unassigned DNA
gtaaacctggttctgtggtctttcagttatgcccgctgacttatgaggatt

SEQ ID NO: 16255 - DNA, 51 bp, Homo sapiens
  source 1..51: mol_type = unassigned DNA
aatcctcataagtcagcgggcataactgaaagaccacagaaccaggtttac

SEQ ID NO: 16256 - RNA, 100 nt, Homo sapiens
  source 1..100: mol_type = unassigned RNA
ataaattcagatgggacagctccaggtcaaaggcagaggaaagagctgggctttgcgttgattgtaccctattggagaatgagattctgcatttagttat

SEQ ID NO: 16257 - DNA, 100 bp, Homo sapiens
  source 1..100: mol_type = unassigned DNA
ataaattcagatgggacagctccaggtcaaaggcagaggaaagagctgggctttgcgttgattgtaccctattggagaatgagattctgcatttagttat

SEQ ID NO: 16258 - DNA, 100 bp, Homo sapiens
  source 1..100: mol_type = unassigned DNA
ataactaaatgcagaatctcattctccaatagggtacaatcaacgcaaagcccagctctttcctctgcctttgacctggagctgtcccatctgaatttat

SEQ ID NO: 16259 - RNA, 26 nt, Homo sapiens
  source 1..26: mol_type = unassigned RNA
ttgagtgtagcctttggaggaataat

SEQ ID NO: 16260 - DNA, 26 bp, Homo sapiens
  source 1..26: mol_type = unassigned DNA
ttgagtgtagcctttggaggaataat

SEQ ID NO: 16261 - DNA, 26 bp, Homo sapiens
  source 1..26: mol_type = unassigned DNA
attattcctccaaaggctacactcaa

SEQ ID NO: 16262 - RNA, 32 nt, Homo sapiens
  source 1..32: mol_type = unassigned RNA
cgcaagttttctgttttcttttttctcgttat

SEQ ID NO: 16263 - DNA, 32 bp, Homo sapiens
  source 1..32: mol_type = unassigned DNA
cgcaagttttctgttttcttttttctcgttat

SEQ ID NO: 16264 - DNA, 32 bp, Homo sapiens
  source 1..32: mol_type = unassigned DNA
ataacgagaaaaaagaaaacagaaaacttgcg

SEQ ID NO: 16265 - RNA, 29 nt, Homo sapiens
  source 1..29: mol_type = unassigned RNA
ccaggtcggtcggaggctctggctgtgga

SEQ ID NO: 16266 - DNA, 29 bp, Homo sapiens
  source 1..29: mol_type = unassigned DNA
ccaggtcggtcggaggctctggctgtgga

SEQ ID NO: 16267 - DNA, 29 bp, Homo sapiens
  source 1..29: mol_type = unassigned DNA
tccacagccagagcctccgaccgacctgg

SEQ ID NO: 16268 - RNA, 37 nt, Homo sapiens
  source 1..37: mol_type = unassigned RNA
gccccttctcaggccaggtcttctggcagggaaaagg

SEQ ID NO: 16269 - DNA, 37 bp, Homo sapiens
  source 1..37: mol_type = unassigned DNA
gccccttctcaggccaggtcttctggcagggaaaagg

SEQ ID NO: 16270 - DNA, 37 bp, Homo sapiens
  source 1..37: mol_type = unassigned DNA
ccttttccctgccagaagacctggcctgagaaggggc

SEQ ID NO: 16271 - RNA, 64 nt, Homo sapiens
  source 1..64: mol_type = unassigned RNA
ttgtcaaattcctctagatttcatagtttgtgtggcatagaggtgtttataatagtctctgagg

SEQ ID NO: 16272 - DNA, 64 bp, Homo sapiens
  source 1..64: mol_type = unassigned DNA
ttgtcaaattcctctagatttcatagtttgtgtggcatagaggtgtttataatagtctctgagg

SEQ ID NO: 16273 - DNA, 64 bp, Homo sapiens
  source 1..64: mol_type = unassigned DNA
cctcagagactattataaacacctctatgccacacaaactatgaaatctagaggaatttgacaa

SEQ ID NO: 16274 - RNA, 49 nt, Homo sapiens
  source 1..49: mol_type = unassigned RNA
ttgtgttggtagtttgtgttgaccagctcacttagaccctctaccttgt

SEQ ID NO: 16275 - DNA, 49 bp, Homo sapiens
  source 1..49: mol_type = unassigned DNA
ttgtgttggtagtttgtgttgaccagctcacttagaccctctaccttgt

SEQ ID NO: 16276 - DNA, 49 bp, Homo sapiens
  source 1..49: mol_type = unassigned DNA
acaaggtagagggtctaagtgagctggtcaacacaaactaccaacacaa

SEQ ID NO: 16277 - RNA, 25 nt, Homo sapiens
  source 1..25: mol_type = unassigned RNA
tattactgctttgtaatgctggata

SEQ ID NO: 16278 - DNA, 25 bp, Homo sapiens
  source 1..25: mol_type = unassigned DNA
tattactgctttgtaatgctggata

SEQ ID NO: 16279 - DNA, 25 bp, Homo sapiens
  source 1..25: mol_type = unassigned DNA
tatccagcattacaaagcagtaata

SEQ ID NO: 16280 - RNA, 82 nt, Homo sapiens
  source 1..82: mol_type = unassigned RNA
atggccttaaactctgggattatcaatactgattgttccctttggagtagattgttaatattttctgaacgataaaatgaac

SEQ ID NO: 16281 - DNA, 82 bp, Homo sapiens
  source 1..82: mol_type = unassigned DNA
atggccttaaactctgggattatcaatactgattgttccctttggagtagattgttaatattttctgaacgataaaatgaac

SEQ ID NO: 16282 - DNA, 82 bp, Homo sapiens
  source 1..82: mol_type = unassigned DNA
gttcattttatcgttcagaaaatattaacaatctactccaaagggaacaatcagtattgataatcccagagtttaaggccat

SEQ ID NO: 16283 - RNA, 45 nt, Homo sapiens
  source 1..45: mol_type = unassigned RNA
ccccattttcagtttgtataatgtttttgatgattacattgaagt

SEQ ID NO: 16284 - DNA, 45 bp, Homo sapiens
  source 1..45: mol_type = unassigned DNA
ccccattttcagtttgtataatgtttttgatgattacattgaagt

SEQ ID NO: 16285 - DNA, 45 bp, Homo sapiens
  source 1..45: mol_type = unassigned DNA
acttcaatgtaatcatcaaaaacattatacaaactgaaaatgggg

SEQ ID NO: 16286 - RNA, 113 nt, Homo sapiens
  source 1..113: mol_type = unassigned RNA
ttctcaaagtcagcccctagttaatccacatcagaaggacctggggactaaatgcaatcttttagcccctgtcctattaaaactgaatctcaaggggtagagcccaggaactt

SEQ ID NO: 16287 - DNA, 113 bp, Homo sapiens
  source 1..113: mol_type = unassigned DNA
ttctcaaagtcagcccctagttaatccacatcagaaggacctggggactaaatgcaatcttttagcccctgtcctattaaaactgaatctcaaggggtagagcccaggaactt

SEQ ID NO: 16288 - DNA, 113 bp, Homo sapiens
  source 1..113: mol_type = unassigned DNA
aagttcctgggctctaccccttgagattcagttttaataggacaggggctaaaagattgcatttagtccccaggtccttctgatgtggattaactaggggctgactttgagaa

SEQ ID NO: 16289 - RNA, 54 nt, Homo sapiens
  source 1..54: mol_type = unassigned RNA
taaagagggatagggcatgggaagcagccccccagtgctgcccagagaggatgc

SEQ ID NO: 16290 - DNA, 54 bp, Homo sapiens
  source 1..54: mol_type = unassigned DNA
taaagagggatagggcatgggaagcagccccccagtgctgcccagagaggatgc

SEQ ID NO: 16291 - DNA, 54 bp, Homo sapiens
  source 1..54: mol_type = unassigned DNA
gcatcctctctgggcagcactggggggctgcttcccatgccctatccctcttta

SEQ ID NO: 16292 - RNA, 43 nt, Homo sapiens
  source 1..43: mol_type = unassigned RNA
aggctgaagcaggagaatggtgggaactcgggaggtggagctt

SEQ ID NO: 16293 - DNA, 43 bp, Homo sapiens
  source 1..43: mol_type = unassigned DNA
aggctgaagcaggagaatggtgggaactcgggaggtggagctt

SEQ ID NO: 16294 - DNA, 43 bp, Homo sapiens
  source 1..43: mol_type = unassigned DNA
aagctccacctcccgagttcccaccattctcctgcttcagcct

SEQ ID NO: 16295 - RNA, 29 nt, Homo sapiens
  source 1..29: mol_type = unassigned RNA
gtcaccacagttatgacctcagacatctc

SEQ ID NO: 16296 - DNA, 29 bp, Homo sapiens
  source 1..29: mol_type = unassigned DNA
gtcaccacagttatgacctcagacatctc

SEQ ID NO: 16297 - DNA, 29 bp, Homo sapiens
  source 1..29: mol_type = unassigned DNA
gagatgtctgaggtcataactgtggtgac

SEQ ID NO: 16298 - RNA, 58 nt, Homo sapiens
  source 1..58: mol_type = unassigned RNA
gtctgtgggagcccctcccagcccgagtcctcatcgtatcctcggagctgggcagggc

SEQ ID NO: 16299 - DNA, 58 bp, Homo sapiens
  source 1..58: mol_type = unassigned DNA
gtctgtgggagcccctcccagcccgagtcctcatcgtatcctcggagctgggcagggc

SEQ ID NO: 16300 - DNA, 58 bp, Homo sapiens
  source 1..58: mol_type = unassigned DNA
gccctgcccagctccgaggatacgatgaggactcgggctgggaggggctcccacagac

SEQ ID NO: 16301 - RNA, 31 nt, Homo sapiens
  source 1..31: mol_type = unassigned RNA
gctaggagagcagggtcggctgcaggcttga

SEQ ID NO: 16302 - DNA, 31 bp, Homo sapiens
  source 1..31: mol_type = unassigned DNA
gctaggagagcagggtcggctgcaggcttga

SEQ ID NO: 16303 - DNA, 31 bp, Homo sapiens
  source 1..31: mol_type = unassigned DNA
tcaagcctgcagccgaccctgctctcctagc

SEQ ID NO: 16304 - RNA, 28 nt, Homo sapiens
  source 1..28: mol_type = unassigned RNA
ctgtttccttgtccctgcctgtctccca

SEQ ID NO: 16305 - DNA, 28 bp, Homo sapiens
  source 1..28: mol_type = unassigned DNA
ctgtttccttgtccctgcctgtctccca

SEQ ID NO: 16306 - DNA, 28 bp, Homo sapiens
  source 1..28: mol_type = unassigned DNA
tgggagacaggcagggacaaggaaacag

SEQ ID NO: 16307 - RNA, 36 nt, Homo sapiens
  source 1..36: mol_type = unassigned RNA
gcacagagtgtttggggagcacagaatctggccatt

SEQ ID NO: 16308 - DNA, 36 bp, Homo sapiens
  source 1..36: mol_type = unassigned DNA
gcacagagtgtttggggagcacagaatctggccatt

SEQ ID NO: 16309 - DNA, 36 bp, Homo sapiens
  source 1..36: mol_type = unassigned DNA
aatggccagattctgtgctccccaaacactctgtgc

SEQ ID NO: 16310 - RNA, 23 nt, Homo sapiens
  source 1..23: mol_type = unassigned RNA
gagtttgtgattactaagatgga

SEQ ID NO: 16311 - DNA, 23 bp, Homo sapiens
  source 1..23: mol_type = unassigned DNA
gagtttgtgattactaagatgga

SEQ ID NO: 16312 - DNA, 23 bp, Homo sapiens
  source 1..23: mol_type = unassigned DNA
tccatcttagtaatcacaaactc

SEQ ID NO: 16313 - RNA, 34 nt, Homo sapiens
  source 1..34: mol_type = unassigned RNA
tgacaccttgattgtagtcttttagaggagaact

SEQ ID NO: 16314 - DNA, 34 bp, Homo sapiens
  source 1..34: mol_type = unassigned DNA
tgacaccttgattgtagtcttttagaggagaact

SEQ ID NO: 16315 - DNA, 34 bp, Homo sapiens
  source 1..34: mol_type = unassigned DNA
agttctcctctaaaagactacaatcaaggtgtca

SEQ ID NO: 16316 - RNA, 30 nt, Homo sapiens
  source 1..30: mol_type = unassigned RNA
cagccgagccttgtctccctgcaggtgttc

SEQ ID NO: 16317 - DNA, 30 bp, Homo sapiens
  source 1..30: mol_type = unassigned DNA
cagccgagccttgtctccctgcaggtgttc

SEQ ID NO: 16318 - DNA, 30 bp, Homo sapiens
  source 1..30: mol_type = unassigned DNA
gaacacctgcagggagacaaggctcggctg

SEQ ID NO: 16319 - RNA, 26 nt, Homo sapiens
  source 1..26: mol_type = unassigned RNA
gggtttggagccttttggagtggata

SEQ ID NO: 16320 - DNA, 26 bp, Homo sapiens
  source 1..26: mol_type = unassigned DNA
gggtttggagccttttggagtggata

SEQ ID NO: 16321 - DNA, 26 bp, Homo sapiens
  source 1..26: mol_type = unassigned DNA
tatccactccaaaaggctccaaaccc

SEQ ID NO: 16322 - RNA, 29 nt, Homo sapiens
  source 1..29: mol_type = unassigned RNA
aaatttcccttgtcacggtctttataact

SEQ ID NO: 16323 - DNA, 29 bp, Homo sapiens
  source 1..29: mol_type = unassigned DNA
aaatttcccttgtcacggtctttataact

SEQ ID NO: 16324 - DNA, 29 bp, Homo sapiens
  source 1..29: mol_type = unassigned DNA
agttataaagaccgtgacaagggaaattt

SEQ ID NO: 16325 - RNA, 46 nt, Homo sapiens
  source 1..46: mol_type = unassigned RNA
tcagcccatcctccatgggagttttacctctgtgggtagagggggg

SEQ ID NO: 16326 - DNA, 46 bp, Homo sapiens
  source 1..46: mol_type = unassigned DNA
tcagcccatcctccatgggagttttacctctgtgggtagagggggg

SEQ ID NO: 16327 - DNA, 46 bp, Homo sapiens
  source 1..46: mol_type = unassigned DNA
cccccctctacccacagaggtaaaactcccatggaggatgggctga

SEQ ID NO: 16328 - RNA, 50 nt, Homo sapiens
  source 1..50: mol_type = unassigned RNA
ggaggtcttagtcttgtctcgttctcaccccagtgctggctcccagggcc

SEQ ID NO: 16329 - DNA, 50 bp, Homo sapiens
  source 1..50: mol_type = unassigned DNA
ggaggtcttagtcttgtctcgttctcaccccagtgctggctcccagggcc

SEQ ID NO: 16330 - DNA, 50 bp, Homo sapiens
  source 1..50: mol_type = unassigned DNA
ggccctgggagccagcactggggtgagaacgagacaagactaagacctcc

SEQ ID NO: 16331 - RNA, 24 nt, Homo sapiens
  source 1..24: mol_type = unassigned RNA
ttagttcttattttgtatatttat

SEQ ID NO: 16332 - DNA, 24 bp, Homo sapiens
  source 1..24: mol_type = unassigned DNA
ttagttcttattttgtatatttat

SEQ ID NO: 16333 - DNA, 24 bp, Homo sapiens
  source 1..24: mol_type = unassigned DNA
ataaatatacaaaataagaactaa

SEQ ID NO: 16334 - RNA, 23 nt, Homo sapiens
  source 1..23: mol_type = unassigned RNA
tgttgtagtggttttatagttat

SEQ ID NO: 16335 - DNA, 23 bp, Homo sapiens
  source 1..23: mol_type = unassigned DNA
tgttgtagtggttttatagttat

SEQ ID NO: 16336 - DNA, 23 bp, Homo sapiens
  source 1..23: mol_type = unassigned DNA
ataactataaaaccactacaaca

SEQ ID NO: 16337 - RNA, 36 nt, Homo sapiens
  source 1..36: mol_type = unassigned RNA
acgccagtgacgaccagagccagacccagagcgcgc

SEQ ID NO: 16338 - DNA, 36 bp, Homo sapiens
  source 1..36: mol_type = unassigned DNA
acgccagtgacgaccagagccagacccagagcgcgc

SEQ ID NO: 16339 - DNA, 36 bp, Homo sapiens
  source 1..36: mol_type = unassigned DNA
gcgcgctctgggtctggctctggtcgtcactggcgt

SEQ ID NO: 16340 - RNA, 42 nt, Homo sapiens
  source 1..42: mol_type = unassigned RNA
tctttgagttggttgtttgtgttggctttccaggtggcttgg

SEQ ID NO: 16341 - DNA, 42 bp, Homo sapiens
  source 1..42: mol_type = unassigned DNA
tctttgagttggttgtttgtgttggctttccaggtggcttgg

SEQ ID NO: 16342 - DNA, 42 bp, Homo sapiens
  source 1..42: mol_type = unassigned DNA
ccaagccacctggaaagccaacacaaacaaccaactcaaaga

SEQ ID NO: 16343 - RNA, 34 nt, Homo sapiens
  source 1..34: mol_type = unassigned RNA
ctttcttggagtccctgctgccctagcttgtgca

SEQ ID NO: 16344 - DNA, 34 bp, Homo sapiens
  source 1..34: mol_type = unassigned DNA
ctttcttggagtccctgctgccctagcttgtgca

SEQ ID NO: 16345 - DNA, 34 bp, Homo sapiens
  source 1..34: mol_type = unassigned DNA
tgcacaagctagggcagcagggactccaagaaag

SEQ ID NO: 16346 - RNA, 24 nt, Homo sapiens
  source 1..24: mol_type = unassigned RNA
ttatttattattttgtgtgcttta

SEQ ID NO: 16347 - DNA, 24 bp, Homo sapiens
  source 1..24: mol_type = unassigned DNA
ttatttattattttgtgtgcttta

SEQ ID NO: 16348 - DNA, 24 bp, Homo sapiens
  source 1..24: mol_type = unassigned DNA
taaagcacacaaaataataaataa

SEQ ID NO: 16349 - RNA, 25 nt, Homo sapiens
  source 1..25: mol_type = unassigned RNA
tgtcagtattagtttttctcgttat

SEQ ID NO: 16350 - DNA, 25 bp, Homo sapiens
  source 1..25: mol_type = unassigned DNA
tgtcagtattagtttttctcgttat

SEQ ID NO: 16351 - DNA, 25 bp, Homo sapiens
  source 1..25: mol_type = unassigned DNA
ataacgagaaaaactaatactgaca

SEQ ID NO: 16352 - RNA, 25 nt, Homo sapiens
  source 1..25: mol_type = unassigned RNA
ttatttggtaggttttataggtaga

SEQ ID NO: 16353 - DNA, 25 bp, Homo sapiens
  source 1..25: mol_type = unassigned DNA
ttatttggtaggttttataggtaga

SEQ ID NO: 16354 - DNA, 25 bp, Homo sapiens
  source 1..25: mol_type = unassigned DNA
tctacctataaaacctaccaaataa

SEQ ID NO: 16355 - RNA, 27 nt, Homo sapiens
  source 1..27: mol_type = unassigned RNA
ttatttagaggttatatagttgatagg

SEQ ID NO: 16356 - DNA, 27 bp, Homo sapiens
  source 1..27: mol_type = unassigned DNA
ttatttagaggttatatagttgatagg

SEQ ID NO: 16357 - DNA, 27 bp, Homo sapiens
  source 1..27: mol_type = unassigned DNA
cctatcaactatataacctctaaataa

SEQ ID NO: 16358 - RNA, 34 nt, Homo sapiens
  source 1..34: mol_type = unassigned RNA
ctatacgatcttcttcctctcttgttctatcacc

SEQ ID NO: 16359 - DNA, 34 bp, Homo sapiens
  source 1..34: mol_type = unassigned DNA
ctatacgatcttcttcctctcttgttctatcacc

SEQ ID NO: 16360 - DNA, 34 bp, Homo sapiens
  source 1..34: mol_type = unassigned DNA
ggtgatagaacaagagaggaagaagatcgtatag

SEQ ID NO: 16361 - RNA, 25 nt, Homo sapiens
  source 1..25: mol_type = unassigned RNA
taattgaagcattttggagtattta

SEQ ID NO: 16362 - DNA, 25 bp, Homo sapiens
  source 1..25: mol_type = unassigned DNA
taattgaagcattttggagtattta

SEQ ID NO: 16363 - DNA, 25 bp, Homo sapiens
  source 1..25: mol_type = unassigned DNA
taaatactccaaaatgcttcaatta

SEQ ID NO: 16364 - RNA, 39 nt, Homo sapiens
  source 1..39: mol_type = unassigned RNA
tcatttattagtttgaatagtttgctgtttggggatctt

SEQ ID NO: 16365 - DNA, 39 bp, Homo sapiens
  source 1..39: mol_type = unassigned DNA
tcatttattagtttgaatagtttgctgtttggggatctt

SEQ ID NO: 16366 - DNA, 39 bp, Homo sapiens
  source 1..39: mol_type = unassigned DNA
aagatccccaaacagcaaactattcaaactaataaatga

SEQ ID NO: 16367 - RNA, 52 nt, Homo sapiens
  source 1..52: mol_type = unassigned RNA
attgtttttcatgactgacatggcagattttacgtaaagtgcactttgccac

SEQ ID NO: 16368 - DNA, 52 bp, Homo sapiens
  source 1..52: mol_type = unassigned DNA
attgtttttcatgactgacatggcagattttacgtaaagtgcactttgccac

SEQ ID NO: 16369 - DNA, 52 bp, Homo sapiens
  source 1..52: mol_type = unassigned DNA
gtggcaaagtgcactttacgtaaaatctgccatgtcagtcatgaaaaacaat

SEQ ID NO: 16370 - RNA, 89 nt, Homo sapiens
  source 1..89: mol_type = unassigned RNA
tataaaagtataattgatattttaatattaaccttgtatcctgtgaccttgttcaattgatgtattagttgtaatagttgtttcttgca

SEQ ID NO: 16371 - DNA, 89 bp, Homo sapiens
  source 1..89: mol_type = unassigned DNA
tataaaagtataattgatattttaatattaaccttgtatcctgtgaccttgttcaattgatgtattagttgtaatagttgtttcttgca

SEQ ID NO: 16372 - DNA, 89 bp, Homo sapiens
  source 1..89: mol_type = unassigned DNA
tgcaagaaacaactattacaactaatacatcaattgaacaaggtcacaggatacaaggttaatattaaaatatcaattatacttttata

SEQ ID NO: 16373 - RNA, 25 nt, Homo sapiens
  source 1..25: mol_type = unassigned RNA
ttgtggtattaatttttgtggtaag

SEQ ID NO: 16374 - DNA, 25 bp, Homo sapiens
  source 1..25: mol_type = unassigned DNA
ttgtggtattaatttttgtggtaag

SEQ ID NO: 16375 - DNA, 25 bp, Homo sapiens
  source 1..25: mol_type = unassigned DNA
cttaccacaaaaattaataccacaa

SEQ ID NO: 16376 - RNA, 29 nt, Homo sapiens
  source 1..29: mol_type = unassigned RNA
ggaatagctttggattaaattagagatct

SEQ ID NO: 16377 - DNA, 29 bp, Homo sapiens
  source 1..29: mol_type = unassigned DNA
ggaatagctttggattaaattagagatct

SEQ ID NO: 16378 - DNA, 29 bp, Homo sapiens
  source 1..29: mol_type = unassigned DNA
agatctctaatttaatccaaagctattcc

SEQ ID NO: 16379 - RNA, 140 nt, Homo sapiens
  source 1..140: mol_type = unassigned RNA
ttctactgcctccccttcccacaaaccactgtattactctaaagaaatttattatctcaatctgctattcatctaacaaactccaactgcctgctagtaccaggccctgaggaaatacaatactgaacaagactcattta

SEQ ID NO: 16380 - DNA, 140 bp, Homo sapiens
  source 1..140: mol_type = unassigned DNA
ttctactgcctccccttcccacaaaccactgtattactctaaagaaatttattatctcaatctgctattcatctaacaaactccaactgcctgctagtaccaggccctgaggaaatacaatactgaacaagactcattta

SEQ ID NO: 16381 - DNA, 140 bp, Homo sapiens
  source 1..140: mol_type = unassigned DNA
taaatgagtcttgttcagtattgtatttcctcagggcctggtactagcaggcagttggagtttgttagatgaatagcagattgagataataaatttctttagagtaatacagtggtttgtgggaaggggaggcagtagaa

SEQ ID NO: 16382 - RNA, 31 nt, Homo sapiens
  source 1..31: mol_type = unassigned RNA
caagatcccgggagccgtcggccagagcatc

SEQ ID NO: 16383 - DNA, 31 bp, Homo sapiens
  source 1..31: mol_type = unassigned DNA
caagatcccgggagccgtcggccagagcatc

SEQ ID NO: 16384 - DNA, 31 bp, Homo sapiens
  source 1..31: mol_type = unassigned DNA
gatgctctggccgacggctcccgggatcttg

SEQ ID NO: 16385 - RNA, 23 nt, Homo sapiens
  source 1..23: mol_type = unassigned RNA
tgaggtatcattttgtatcattc

SEQ ID NO: 16386 - DNA, 23 bp, Homo sapiens
  source 1..23: mol_type = unassigned DNA
tgaggtatcattttgtatcattc

SEQ ID NO: 16387 - DNA, 23 bp, Homo sapiens
  source 1..23: mol_type = unassigned DNA
gaatgatacaaaatgatacctca

SEQ ID NO: 16388 - RNA, 25 nt, Homo sapiens
  source 1..25: mol_type = unassigned RNA
cacttgagtggagtcagaatgcatt

SEQ ID NO: 16389 - DNA, 25 bp, Homo sapiens
  source 1..25: mol_type = unassigned DNA
cacttgagtggagtcagaatgcatt

SEQ ID NO: 16390 - DNA, 25 bp, Homo sapiens
  source 1..25: mol_type = unassigned DNA
aatgcattctgactccactcaagtg

SEQ ID NO: 16391 - RNA, 30 nt, Homo sapiens
  source 1..30: mol_type = unassigned RNA
cttatctccattgatccagttgatttatct

SEQ ID NO: 16392 - DNA, 30 bp, Homo sapiens
  source 1..30: mol_type = unassigned DNA
cttatctccattgatccagttgatttatct

SEQ ID NO: 16393 - DNA, 30 bp, Homo sapiens
  source 1..30: mol_type = unassigned DNA
agataaatcaactggatcaatggagataag

SEQ ID NO: 16394 - RNA, 33 nt, Homo sapiens
  source 1..33: mol_type = unassigned RNA
atgaggtctaatttgtctagtttttctttggtt

SEQ ID NO: 16395 - DNA, 33 bp, Homo sapiens
  source 1..33: mol_type = unassigned DNA
atgaggtctaatttgtctagtttttctttggtt

SEQ ID NO: 16396 - DNA, 33 bp, Homo sapiens
  source 1..33: mol_type = unassigned DNA
aaccaaagaaaaactagacaaattagacctcat

SEQ ID NO: 16397 - RNA, 26 nt, Homo sapiens
  source 1..26: mol_type = unassigned RNA
tatcatttagccttttggagtattaa

SEQ ID NO: 16398 - DNA, 26 bp, Homo sapiens
  source 1..26: mol_type = unassigned DNA
tatcatttagccttttggagtattaa

SEQ ID NO: 16399 - DNA, 26 bp, Homo sapiens
  source 1..26: mol_type = unassigned DNA
ttaatactccaaaaggctaaatgata

SEQ ID NO: 16400 - RNA, 49 nt, Homo sapiens
  source 1..49: mol_type = unassigned RNA
gtgagtcactgctcccggcctgtatctatttattctgagaagtgatata

SEQ ID NO: 16401 - DNA, 49 bp, Homo sapiens
  source 1..49: mol_type = unassigned DNA
gtgagtcactgctcccggcctgtatctatttattctgagaagtgatata

SEQ ID NO: 16402 - DNA, 49 bp, Homo sapiens
  source 1..49: mol_type = unassigned DNA
tatatcacttctcagaataaatagatacaggccgggagcagtgactcac

SEQ ID NO: 16403 - RNA, 51 nt, Homo sapiens
  source 1..51: mol_type = unassigned RNA
taattctagccttttggagattattaacccaactcccagattctacagatg

SEQ ID NO: 16404 - DNA, 51 bp, Homo sapiens
  source 1..51: mol_type = unassigned DNA
taattctagccttttggagattattaacccaactcccagattctacagatg

SEQ ID NO: 16405 - DNA, 51 bp, Homo sapiens
  source 1..51: mol_type = unassigned DNA
catctgtagaatctgggagttgggttaataatctccaaaaggctagaatta

SEQ ID NO: 16406 - RNA, 154 nt, Homo sapiens
  source 1..154: mol_type = unassigned RNA
aaatggaggcttgctcagaaacggagctgtccttggctttccaggccccctccttcctctccctgccccccacccccgccttctcccgccttctcaggtgagttccctgcagggtgctgaccttgctggctgcgtgtctctgctccgcctggtg

SEQ ID NO: 16407 - DNA, 154 bp, Homo sapiens
  source 1..154: mol_type = unassigned DNA
aaatggaggcttgctcagaaacggagctgtccttggctttccaggccccctccttcctctccctgccccccacccccgccttctcccgccttctcaggtgagttccctgcagggtgctgaccttgctggctgcgtgtctctgctccgcctggtg

SEQ ID NO: 16408 - DNA, 154 bp, Homo sapiens
  source 1..154: mol_type = unassigned DNA
caccaggcggagcagagacacgcagccagcaaggtcagcaccctgcagggaactcacctgagaaggcgggagaaggcgggggtggggggcagggagaggaaggagggggcctggaaagccaaggacagctccgtttctgagcaagcctccattt

SEQ ID NO: 16409 - RNA, 26 nt, Homo sapiens
  source 1..26: mol_type = unassigned RNA
tctctggagggaagcactctcttttg

SEQ ID NO: 16410 - DNA, 26 bp, Homo sapiens
  source 1..26: mol_type = unassigned DNA
tctctggagggaagcactctcttttg

SEQ ID NO: 16411 - DNA, 26 bp, Homo sapiens
  source 1..26: mol_type = unassigned DNA
caaaagagagtgcttccctccagaga

SEQ ID NO: 16412 - RNA, 27 nt, Homo sapiens
  source 1..27: mol_type = unassigned RNA
tctttttgatgacttacttgaaatccc

SEQ ID NO: 16413 - DNA, 27 bp, Homo sapiens
  source 1..27: mol_type = unassigned DNA
tctttttgatgacttacttgaaatccc

SEQ ID NO: 16414 - DNA, 27 bp, Homo sapiens
  source 1..27: mol_type = unassigned DNA
gggatttcaagtaagtcatcaaaaaga

SEQ ID NO: 16415 - RNA, 39 nt, Homo sapiens
  source 1..39: mol_type = unassigned RNA
taccctaatgggatttttggaactgggaactctgctttc

SEQ ID NO: 16416 - DNA, 39 bp, Homo sapiens
  source 1..39: mol_type = unassigned DNA
taccctaatgggatttttggaactgggaactctgctttc

SEQ ID NO: 16417 - DNA, 39 bp, Homo sapiens
  source 1..39: mol_type = unassigned DNA
gaaagcagagttcccagttccaaaaatcccattagggta

SEQ ID NO: 16418 - RNA, 29 nt, Homo sapiens
  source 1..29: mol_type = unassigned RNA
tatggttgagagagtgctgttggcttttc

SEQ ID NO: 16419 - DNA, 29 bp, Homo sapiens
  source 1..29: mol_type = unassigned DNA
tatggttgagagagtgctgttggcttttc

SEQ ID NO: 16420 - DNA, 29 bp, Homo sapiens
  source 1..29: mol_type = unassigned DNA
gaaaagccaacagcactctctcaaccata

SEQ ID NO: 16421 - RNA, 26 nt, Homo sapiens
  source 1..26: mol_type = unassigned RNA
atctcccctctcctcccgtctcaagg

SEQ ID NO: 16422 - DNA, 26 bp, Homo sapiens
  source 1..26: mol_type = unassigned DNA
atctcccctctcctcccgtctcaagg

SEQ ID NO: 16423 - DNA, 26 bp, Homo sapiens
  source 1..26: mol_type = unassigned DNA
ccttgagacgggaggagaggggagat

SEQ ID NO: 16424 - RNA, 31 nt, Homo sapiens
  source 1..31: mol_type = unassigned RNA
aggcccctgaggacctggagtgggagcgcta

SEQ ID NO: 16425 - DNA, 31 bp, Homo sapiens
  source 1..31: mol_type = unassigned DNA
aggcccctgaggacctggagtgggagcgcta

SEQ ID NO: 16426 - DNA, 31 bp, Homo sapiens
  source 1..31: mol_type = unassigned DNA
tagcgctcccactccaggtcctcaggggcct

SEQ ID NO: 16427 - RNA, 24 nt, Homo sapiens
  source 1..24: mol_type = unassigned RNA
tgagttcttatttatgtggttaaa

SEQ ID NO: 16428 - DNA, 24 bp, Homo sapiens
  source 1..24: mol_type = unassigned DNA
tgagttcttatttatgtggttaaa

SEQ ID NO: 16429 - DNA, 24 bp, Homo sapiens
  source 1..24: mol_type = unassigned DNA
tttaaccacataaataagaactca

SEQ ID NO: 16430 - RNA, 26 nt, Homo sapiens
  source 1..26: mol_type = unassigned RNA
gactttgttctttaggctttctggct

SEQ ID NO: 16431 - DNA, 26 bp, Homo sapiens
  source 1..26: mol_type = unassigned DNA
gactttgttctttaggctttctggct

SEQ ID NO: 16432 - DNA, 26 bp, Homo sapiens
  source 1..26: mol_type = unassigned DNA
agccagaaagcctaaagaacaaagtc

SEQ ID NO: 16433 - RNA, 23 nt, Homo sapiens
  source 1..23: mol_type = unassigned RNA
tgctttattaggttgtttatttg

SEQ ID NO: 16434 - DNA, 23 bp, Homo sapiens
  source 1..23: mol_type = unassigned DNA
tgctttattaggttgtttatttg

SEQ ID NO: 16435 - DNA, 23 bp, Homo sapiens
  source 1..23: mol_type = unassigned DNA
caaataaacaacctaataaagca

SEQ ID NO: 16436 - RNA, 26 nt, Homo sapiens
  source 1..26: mol_type = unassigned RNA
tttcaagtcttcttgcagggctattt

SEQ ID NO: 16437 - DNA, 26 bp, Homo sapiens
  source 1..26: mol_type = unassigned DNA
tttcaagtcttcttgcagggctattt

SEQ ID NO: 16438 - DNA, 26 bp, Homo sapiens
  source 1..26: mol_type = unassigned DNA
aaatagccctgcaagaagacttgaaa

SEQ ID NO: 16439 - RNA, 23 nt, Homo sapiens
  source 1..23: mol_type = unassigned RNA
tgatgtatttctttttatagttg

SEQ ID NO: 16440 - DNA, 23 bp, Homo sapiens
  source 1..23: mol_type = unassigned DNA
tgatgtatttctttttatagttg

SEQ ID NO: 16441 - DNA, 23 bp, Homo sapiens
  source 1..23: mol_type = unassigned DNA
caactataaaaagaaatacatca

SEQ ID NO: 16442 - RNA, 30 nt, Homo sapiens
  source 1..30: mol_type = unassigned RNA
cctgaaatgatcagggctttggagtacata

SEQ ID NO: 16443 - DNA, 30 bp, Homo sapiens
  source 1..30: mol_type = unassigned DNA
cctgaaatgatcagggctttggagtacata

SEQ ID NO: 16444 - DNA, 30 bp, Homo sapiens
  source 1..30: mol_type = unassigned DNA
tatgtactccaaagccctgatcatttcagg

SEQ ID NO: 16445 - RNA, 142 nt, Homo sapiens
  source 1..142: mol_type = unassigned RNA
aaatgcccagctgtagccaatccagctgtttctgtcctcacttccgttgtatggcactttcctttttctgtgaataccgggagtcgctctgaacctattctggttctgagagctgcccaattcacgaatctttctttgccca

SEQ ID NO: 16446 - DNA, 142 bp, Homo sapiens
  source 1..142: mol_type = unassigned DNA
aaatgcccagctgtagccaatccagctgtttctgtcctcacttccgttgtatggcactttcctttttctgtgaataccgggagtcgctctgaacctattctggttctgagagctgcccaattcacgaatctttctttgccca

SEQ ID NO: 16447 - DNA, 142 bp, Homo sapiens
  source 1..142: mol_type = unassigned DNA
tgggcaaagaaagattcgtgaattgggcagctctcagaaccagaataggttcagagcgactcccggtattcacagaaaaaggaaagtgccatacaacggaagtgaggacagaaacagctggattggctacagctgggcattt

SEQ ID NO: 16448 - RNA, 23 nt, Homo sapiens
  source 1..23: mol_type = unassigned RNA
tgattgtacctttttggagtttt

SEQ ID NO: 16449 - DNA, 23 bp, Homo sapiens
  source 1..23: mol_type = unassigned DNA
tgattgtacctttttggagtttt

SEQ ID NO: 16450 - DNA, 23 bp, Homo sapiens
  source 1..23: mol_type = unassigned DNA
aaaactccaaaaaggtacaatca

SEQ ID NO: 16451 - RNA, 23 nt, Homo sapiens
  source 1..23: mol_type = unassigned RNA
gtagttcttagtttttatagttt

SEQ ID NO: 16452 - DNA, 23 bp, Homo sapiens
  source 1..23: mol_type = unassigned DNA
gtagttcttagtttttatagttt

SEQ ID NO: 16453 - DNA, 23 bp, Homo sapiens
  source 1..23: mol_type = unassigned DNA
aaactataaaaactaagaactac

SEQ ID NO: 16454 - RNA, 42 nt, Homo sapiens
  source 1..42: mol_type = unassigned RNA
cctactgctgctatgaagagcaccgcatctctctgaccacag

SEQ ID NO: 16455 - DNA, 42 bp, Homo sapiens
  source 1..42: mol_type = unassigned DNA
cctactgctgctatgaagagcaccgcatctctctgaccacag

SEQ ID NO: 16456 - DNA, 42 bp, Homo sapiens
  source 1..42: mol_type = unassigned DNA
ctgtggtcagagagatgcggtgctcttcatagcagcagtagg

SEQ ID NO: 16457 - RNA, 24 nt, Homo sapiens
  source 1..24: mol_type = unassigned RNA
aagcacattggcagacatttccat

SEQ ID NO: 16458 - DNA, 24 bp, Homo sapiens
  source 1..24: mol_type = unassigned DNA
aagcacattggcagacatttccat

SEQ ID NO: 16459 - DNA, 24 bp, Homo sapiens
  source 1..24: mol_type = unassigned DNA
atggaaatgtctgccaatgtgctt

SEQ ID NO: 16460 - RNA, 35 nt, Homo sapiens
  source 1..35: mol_type = unassigned RNA
gaccatcagatcactgaagtgggaactatgaatct

SEQ ID NO: 16461 - DNA, 35 bp, Homo sapiens
  source 1..35: mol_type = unassigned DNA
gaccatcagatcactgaagtgggaactatgaatct

SEQ ID NO: 16462 - DNA, 35 bp, Homo sapiens
  source 1..35: mol_type = unassigned DNA
agattcatagttcccacttcagtgatctgatggtc

SEQ ID NO: 16463 - RNA, 53 nt, Homo sapiens
  source 1..53: mol_type = unassigned RNA
ttattgaggcattttggagtagacatcagtttcctccatgctagaagccacat

SEQ ID NO: 16464 - DNA, 53 bp, Homo sapiens
  source 1..53: mol_type = unassigned DNA
ttattgaggcattttggagtagacatcagtttcctccatgctagaagccacat

SEQ ID NO: 16465 - DNA, 53 bp, Homo sapiens
  source 1..53: mol_type = unassigned DNA
atgtggcttctagcatggaggaaactgatgtctactccaaaatgcctcaataa

SEQ ID NO: 16466 - RNA, 94 nt, Homo sapiens
  source 1..94: mol_type = unassigned RNA
aggggcccctggagtgcaggggaccaggggacagtgtcctaggaacagacactgctctgggtctctgccctcttgtgtctctcctttctctctg

SEQ ID NO: 16467 - DNA, 94 bp, Homo sapiens
  source 1..94: mol_type = unassigned DNA
aggggcccctggagtgcaggggaccaggggacagtgtcctaggaacagacactgctctgggtctctgccctcttgtgtctctcctttctctctg

SEQ ID NO: 16468 - DNA, 94 bp, Homo sapiens
  source 1..94: mol_type = unassigned DNA
cagagagaaaggagagacacaagagggcagagacccagagcagtgtctgttcctaggacactgtcccctggtcccctgcactccaggggcccct

SEQ ID NO: 16469 - RNA, 24 nt, Homo sapiens
  source 1..24: mol_type = unassigned RNA
tgatttcagtatgttgtgtgttta

SEQ ID NO: 16470 - DNA, 24 bp, Homo sapiens
  source 1..24: mol_type = unassigned DNA
tgatttcagtatgttgtgtgttta

SEQ ID NO: 16471 - DNA, 24 bp, Homo sapiens
  source 1..24: mol_type = unassigned DNA
taaacacacaacatactgaaatca

SEQ ID NO: 16472 - RNA, 31 nt, Homo sapiens
  source 1..31: mol_type = unassigned RNA
gttgaggttgaggggtgggactgtgttcccc

SEQ ID NO: 16473 - DNA, 31 bp, Homo sapiens
  source 1..31: mol_type = unassigned DNA
gttgaggttgaggggtgggactgtgttcccc

SEQ ID NO: 16474 - DNA, 31 bp, Homo sapiens
  source 1..31: mol_type = unassigned DNA
ggggaacacagtcccacccctcaacctcaac

SEQ ID NO: 16475 - RNA, 51 nt, Homo sapiens
  source 1..51: mol_type = unassigned RNA
cacatctagcaccagacttgggaaacactcgtctaaggggctgctgcaggc

SEQ ID NO: 16476 - DNA, 51 bp, Homo sapiens
  source 1..51: mol_type = unassigned DNA
cacatctagcaccagacttgggaaacactcgtctaaggggctgctgcaggc

SEQ ID NO: 16477 - DNA, 51 bp, Homo sapiens
  source 1..51: mol_type = unassigned DNA
gcctgcagcagccccttagacgagtgtttcccaagtctggtgctagatgtg

SEQ ID NO: 16478 - RNA, 25 nt, Homo sapiens
  source 1..25: mol_type = unassigned RNA
catctagagggaagcacattcacag

SEQ ID NO: 16479 - DNA, 25 bp, Homo sapiens
  source 1..25: mol_type = unassigned DNA
catctagagggaagcacattcacag

SEQ ID NO: 16480 - DNA, 25 bp, Homo sapiens
  source 1..25: mol_type = unassigned DNA
ctgtgaatgtgcttccctctagatg

SEQ ID NO: 16481 - RNA, 26 nt, Homo sapiens
  source 1..26: mol_type = unassigned RNA
atattcagttttcccggcttgtattt

SEQ ID NO: 16482 - DNA, 26 bp, Homo sapiens
  source 1..26: mol_type = unassigned DNA
atattcagttttcccggcttgtattt

SEQ ID NO: 16483 - DNA, 26 bp, Homo sapiens
  source 1..26: mol_type = unassigned DNA
aaatacaagccgggaaaactgaatat

SEQ ID NO: 16484 - RNA, 27 nt, Homo sapiens
  source 1..27: mol_type = unassigned RNA
aggcatgcccttttcccggcatgtaca

SEQ ID NO: 16485 - DNA, 27 bp, Homo sapiens
  source 1..27: mol_type = unassigned DNA
aggcatgcccttttcccggcatgtaca

SEQ ID NO: 16486 - DNA, 27 bp, Homo sapiens
  source 1..27: mol_type = unassigned DNA
tgtacatgccgggaaaagggcatgcct

SEQ ID NO: 16487 - RNA, 26 nt, Homo sapiens
  source 1..26: mol_type = unassigned RNA
aaaagacctggttctttagtcttatt

SEQ ID NO: 16488 - DNA, 26 bp, Homo sapiens
  source 1..26: mol_type = unassigned DNA
aaaagacctggttctttagtcttatt

SEQ ID NO: 16489 - DNA, 26 bp, Homo sapiens
  source 1..26: mol_type = unassigned DNA
aataagactaaagaaccaggtctttt

SEQ ID NO: 16490 - RNA, 38 nt, Homo sapiens
  source 1..38: mol_type = unassigned RNA
tgcctgtttccctaacttgtgaaatcacattaatactt

SEQ ID NO: 16491 - DNA, 38 bp, Homo sapiens
  source 1..38: mol_type = unassigned DNA
tgcctgtttccctaacttgtgaaatcacattaatactt

SEQ ID NO: 16492 - DNA, 38 bp, Homo sapiens
  source 1..38: mol_type = unassigned DNA
aagtattaatgtgatttcacaagttagggaaacaggca

SEQ ID NO: 16493 - RNA, 23 nt, Homo sapiens
  source 1..23: mol_type = unassigned RNA
tgctagtagccttttggatgagt

SEQ ID NO: 16494 - DNA, 23 bp, Homo sapiens
  source 1..23: mol_type = unassigned DNA
tgctagtagccttttggatgagt

SEQ ID NO: 16495 - DNA, 23 bp, Homo sapiens
  source 1..23: mol_type = unassigned DNA
actcatccaaaaggctactagca

SEQ ID NO: 16496 - RNA, 28 nt, Homo sapiens
  source 1..28: mol_type = unassigned RNA
ggggaggatctgaggctgagaaccagct

SEQ ID NO: 16497 - DNA, 28 bp, Homo sapiens
  source 1..28: mol_type = unassigned DNA
ggggaggatctgaggctgagaaccagct

SEQ ID NO: 16498 - DNA, 28 bp, Homo sapiens
  source 1..28: mol_type = unassigned DNA
agctggttctcagcctcagatcctcccc

SEQ ID NO: 16499 - RNA, 58 nt, Homo sapiens
  source 1..58: mol_type = unassigned RNA
atcttttgggtcccagtacaggcagttacagggctttgtctggcaggcctcatgagag

SEQ ID NO: 16500 - DNA, 58 bp, Homo sapiens
  source 1..58: mol_type = unassigned DNA
atcttttgggtcccagtacaggcagttacagggctttgtctggcaggcctcatgagag

SEQ ID NO: 16501 - DNA, 58 bp, Homo sapiens
  source 1..58: mol_type = unassigned DNA
ctctcatgaggcctgccagacaaagccctgtaactgcctgtactgggacccaaaagat

SEQ ID NO: 16502 - RNA, 31 nt, Homo sapiens
  source 1..31: mol_type = unassigned RNA
ccctatctcctcctcctccacccagccctta

SEQ ID NO: 16503 - DNA, 31 bp, Homo sapiens
  source 1..31: mol_type = unassigned DNA
ccctatctcctcctcctccacccagccctta

SEQ ID NO: 16504 - DNA, 31 bp, Homo sapiens
  source 1..31: mol_type = unassigned DNA
taagggctgggtggaggaggaggagataggg

SEQ ID NO: 16505 - RNA, 37 nt, Homo sapiens
  source 1..37: mol_type = unassigned RNA
gcagttaaatggtttgaggtcttagtttttttggtct

SEQ ID NO: 16506 - DNA, 37 bp, Homo sapiens
  source 1..37: mol_type = unassigned DNA
gcagttaaatggtttgaggtcttagtttttttggtct

SEQ ID NO: 16507 - DNA, 37 bp, Homo sapiens
  source 1..37: mol_type = unassigned DNA
agaccaaaaaaactaagacctcaaaccatttaactgc

SEQ ID NO: 16508 - RNA, 80 nt, Homo sapiens
  source 1..80: mol_type = unassigned RNA
ggtgttgattactgacatggatttgcctggggaaaggagctgatttgcaggtaattgagagttctgtttgggctgtgtcc

SEQ ID NO: 16509 - DNA, 80 bp, Homo sapiens
  source 1..80: mol_type = unassigned DNA
ggtgttgattactgacatggatttgcctggggaaaggagctgatttgcaggtaattgagagttctgtttgggctgtgtcc

SEQ ID NO: 16510 - DNA, 80 bp, Homo sapiens
  source 1..80: mol_type = unassigned DNA
ggacacagcccaaacagaactctcaattacctgcaaatcagctcctttccccaggcaaatccatgtcagtaatcaacacc

SEQ ID NO: 16511 - RNA, 72 nt, Homo sapiens
  source 1..72: mol_type = unassigned RNA
cagagcaatgtggaacccacgggggagaaggttctactctggaggggagccgtccagatgtcccccaagacc

SEQ ID NO: 16512 - DNA, 72 bp, Homo sapiens
  source 1..72: mol_type = unassigned DNA
cagagcaatgtggaacccacgggggagaaggttctactctggaggggagccgtccagatgtcccccaagacc

SEQ ID NO: 16513 - DNA, 72 bp, Homo sapiens
  source 1..72: mol_type = unassigned DNA
ggtcttgggggacatctggacggctcccctccagagtagaaccttctcccccgtgggttccacattgctctg

SEQ ID NO: 16514 - RNA, 26 nt, Homo sapiens
  source 1..26: mol_type = unassigned RNA
gcagcaagttgggacaatgtagggag

SEQ ID NO: 16515 - DNA, 26 bp, Homo sapiens
  source 1..26: mol_type = unassigned DNA
gcagcaagttgggacaatgtagggag

SEQ ID NO: 16516 - DNA, 26 bp, Homo sapiens
  source 1..26: mol_type = unassigned DNA
ctccctacattgtcccaacttgctgc

SEQ ID NO: 16517 - RNA, 76 nt, Homo sapiens
  source 1..76: mol_type = unassigned RNA
cagcagtttacagggactgctgctctggacagctactgttgctgtatgcttctgctgctgctgctgctgctgctac

SEQ ID NO: 16518 - DNA, 76 bp, Homo sapiens
  source 1..76: mol_type = unassigned DNA
cagcagtttacagggactgctgctctggacagctactgttgctgtatgcttctgctgctgctgctgctgctgctac

SEQ ID NO: 16519 - DNA, 76 bp, Homo sapiens
  source 1..76: mol_type = unassigned DNA
gtagcagcagcagcagcagcagcagaagcatacagcaacagtagctgtccagagcagcagtccctgtaaactgctg

SEQ ID NO: 16520 - RNA, 26 nt, Homo sapiens
  source 1..26: mol_type = unassigned RNA
tgattgtacctttttggagttttcta

SEQ ID NO: 16521 - DNA, 26 bp, Homo sapiens
  source 1..26: mol_type = unassigned DNA
tgattgtacctttttggagttttcta

SEQ ID NO: 16522 - DNA, 26 bp, Homo sapiens
  source 1..26: mol_type = unassigned DNA
tagaaaactccaaaaaggtacaatca

SEQ ID NO: 16523 - RNA, 57 nt, Homo sapiens
  source 1..57: mol_type = unassigned RNA
ctgggattacaggcgtgagccattgcacctgtcctgagccatcctcctgaggaaaac

SEQ ID NO: 16524 - DNA, 57 bp, Homo sapiens
  source 1..57: mol_type = unassigned DNA
ctgggattacaggcgtgagccattgcacctgtcctgagccatcctcctgaggaaaac

SEQ ID NO: 16525 - DNA, 57 bp, Homo sapiens
  source 1..57: mol_type = unassigned DNA
gttttcctcaggaggatggctcaggacaggtgcaatggctcacgcctgtaatcccag

SEQ ID NO: 16526 - RNA, 44 nt, Homo sapiens
  source 1..44: mol_type = unassigned RNA
tgtttcctttttcccagcctgtaatttaactctgactggcacca

SEQ ID NO: 16527 - DNA, 44 bp, Homo sapiens
  source 1..44: mol_type = unassigned DNA
tgtttcctttttcccagcctgtaatttaactctgactggcacca

SEQ ID NO: 16528 - DNA, 44 bp, Homo sapiens
  source 1..44: mol_type = unassigned DNA
tggtgccagtcagagttaaattacaggctgggaaaaaggaaaca

SEQ ID NO: 16529 - RNA, 29 nt, Homo sapiens
  source 1..29: mol_type = unassigned RNA
ttattttttattttgtatagtattctatt

SEQ ID NO: 16530 - DNA, 29 bp, Homo sapiens
  source 1..29: mol_type = unassigned DNA
ttattttttattttgtatagtattctatt

SEQ ID NO: 16531 - DNA, 29 bp, Homo sapiens
  source 1..29: mol_type = unassigned DNA
aatagaatactatacaaaataaaaaataa

SEQ ID NO: 16532 - RNA, 61 nt, Homo sapiens
  source 1..61: mol_type = unassigned RNA
gtgattttgtgtgttgtatagtatgcttgttgtttgttgggtggttgtgaaaaagcattcc

SEQ ID NO: 16533 - DNA, 61 bp, Homo sapiens
  source 1..61: mol_type = unassigned DNA
gtgattttgtgtgttgtatagtatgcttgttgtttgttgggtggttgtgaaaaagcattcc

SEQ ID NO: 16534 - DNA, 61 bp, Homo sapiens
  source 1..61: mol_type = unassigned DNA
ggaatgctttttcacaaccacccaacaaacaacaagcatactatacaacacacaaaatcac

SEQ ID NO: 16535 - RNA, 21 nt, Homo sapiens
  source 1..21: mol_type = unassigned RNA
gttttccatgctagaatcaca

SEQ ID NO: 16536 - DNA, 21 bp, Homo sapiens
  source 1..21: mol_type = unassigned DNA
gttttccatgctagaatcaca

SEQ ID NO: 16537 - DNA, 21 bp, Homo sapiens
  source 1..21: mol_type = unassigned DNA
tgtgattctagcatggaaaac

SEQ ID NO: 16538 - RNA, 30 nt, Homo sapiens
  source 1..30: mol_type = unassigned RNA
tatttcacgtttcccggcttttacatatat

SEQ ID NO: 16539 - DNA, 30 bp, Homo sapiens
  source 1..30: mol_type = unassigned DNA
tatttcacgtttcccggcttttacatatat

SEQ ID NO: 16540 - DNA, 30 bp, Homo sapiens
  source 1..30: mol_type = unassigned DNA
atatatgtaaaagccgggaaacgtgaaata

SEQ ID NO: 16541 - RNA, 46 nt, Homo sapiens
  source 1..46: mol_type = unassigned RNA
ttattttttattttgtatagtatagaacttttaaaatactactgga

SEQ ID NO: 16542 - DNA, 46 bp, Homo sapiens
  source 1..46: mol_type = unassigned DNA
ttattttttattttgtatagtatagaacttttaaaatactactgga

SEQ ID NO: 16543 - DNA, 46 bp, Homo sapiens
  source 1..46: mol_type = unassigned DNA
tccagtagtattttaaaagttctatactatacaaaataaaaaataa

SEQ ID NO: 16544 - RNA, 78 nt, Homo sapiens
  source 1..78: mol_type = unassigned RNA
tctgtgactatggagctttctgttttgttttgtttcccagtatttgatttctttctgctctcctgaaagtacttggta

SEQ ID NO: 16545 - DNA, 78 bp, Homo sapiens
  source 1..78: mol_type = unassigned DNA
tctgtgactatggagctttctgttttgttttgtttcccagtatttgatttctttctgctctcctgaaagtacttggta

SEQ ID NO: 16546 - DNA, 78 bp, Homo sapiens
  source 1..78: mol_type = unassigned DNA
taccaagtactttcaggagagcagaaagaaatcaaatactgggaaacaaaacaaaacagaaagctccatagtcacaga

SEQ ID NO: 16547 - RNA, 35 nt, Homo sapiens
  source 1..35: mol_type = unassigned RNA
taagaaaactgttcctatgaatatacttcttattt

SEQ ID NO: 16548 - DNA, 35 bp, Homo sapiens
  source 1..35: mol_type = unassigned DNA
taagaaaactgttcctatgaatatacttcttattt

SEQ ID NO: 16549 - DNA, 35 bp, Homo sapiens
  source 1..35: mol_type = unassigned DNA
aaataagaagtatattcataggaacagttttctta

SEQ ID NO: 16550 - RNA, 42 nt, Homo sapiens
  source 1..42: mol_type = unassigned RNA
tctttgtttctttctcttgcgtgattgctctggctaggactt

SEQ ID NO: 16551 - DNA, 42 bp, Homo sapiens
  source 1..42: mol_type = unassigned DNA
tctttgtttctttctcttgcgtgattgctctggctaggactt

SEQ ID NO: 16552 - DNA, 42 bp, Homo sapiens
  source 1..42: mol_type = unassigned DNA
aagtcctagccagagcaatcacgcaagagaaagaaacaaaga

SEQ ID NO: 16553 - RNA, 187 nt, Homo sapiens
  source 1..187: mol_type = unassigned RNA
tcgtctagaggctaaggcaagtttcagctagatccagctaagctggtctgaactagtggaatgagccagttgtagctgttgtcattgcatctcccttttgagactatggaagcctaggacttagtctgttaattatcagagaggtcattgctgtatgtgttacgtgttcatggggctactgcagcag

SEQ ID NO: 16554 - DNA, 187 bp, Homo sapiens
  source 1..187: mol_type = unassigned DNA
tcgtctagaggctaaggcaagtttcagctagatccagctaagctggtctgaactagtggaatgagccagttgtagctgttgtcattgcatctcccttttgagactatggaagcctaggacttagtctgttaattatcagagaggtcattgctgtatgtgttacgtgttcatggggctactgcagcag

SEQ ID NO: 16555 - DNA, 187 bp, Homo sapiens
  source 1..187: mol_type = unassigned DNA
ctgctgcagtagccccatgaacacgtaacacatacagcaatgacctctctgataattaacagactaagtcctaggcttccatagtctcaaaagggagatgcaatgacaacagctacaactggctcattccactagttcagaccagcttagctggatctagctgaaacttgccttagcctctagacga

SEQ ID NO: 16556 - RNA, 48 nt, Homo sapiens
  source 1..48: mol_type = unassigned RNA
ctttccctcagagcagctctgctcattcttatgcatataattctttat

SEQ ID NO: 16557 - DNA, 48 bp, Homo sapiens
  source 1..48: mol_type = unassigned DNA
ctttccctcagagcagctctgctcattcttatgcatataattctttat

SEQ ID NO: 16558 - DNA, 48 bp, Homo sapiens
  source 1..48: mol_type = unassigned DNA
ataaagaattatatgcataagaatgagcagagctgctctgagggaaag

SEQ ID NO: 16559 - RNA, 66 nt, Homo sapiens
  source 1..66: mol_type = unassigned RNA
atttgacttccacttttcctaactgaatacccttgtttctttctgctgcctgattaccctagcccg

SEQ ID NO: 16560 - DNA, 66 bp, Homo sapiens
  source 1..66: mol_type = unassigned DNA
atttgacttccacttttcctaactgaatacccttgtttctttctgctgcctgattaccctagcccg

SEQ ID NO: 16561 - DNA, 66 bp, Homo sapiens
  source 1..66: mol_type = unassigned DNA
cgggctagggtaatcaggcagcagaaagaaacaagggtattcagttaggaaaagtggaagtcaaat

SEQ ID NO: 16562 - RNA, 29 nt, Homo sapiens
  source 1..29: mol_type = unassigned RNA
tccttcaggattgtgaggtactggaaaga

SEQ ID NO: 16563 - DNA, 29 bp, Homo sapiens
  source 1..29: mol_type = unassigned DNA
tccttcaggattgtgaggtactggaaaga

SEQ ID NO: 16564 - DNA, 29 bp, Homo sapiens
  source 1..29: mol_type = unassigned DNA
tctttccagtacctcacaatcctgaagga

SEQ ID NO: 16565 - RNA, 27 nt, Homo sapiens
  source 1..27: mol_type = unassigned RNA
tagcttgagatacagaactgtgttata

SEQ ID NO: 16566 - DNA, 27 bp, Homo sapiens
  source 1..27: mol_type = unassigned DNA
tagcttgagatacagaactgtgttata

SEQ ID NO: 16567 - DNA, 27 bp, Homo sapiens
  source 1..27: mol_type = unassigned DNA
tataacacagttctgtatctcaagcta

SEQ ID NO: 16568 - RNA, 37 nt, Homo sapiens
  source 1..37: mol_type = unassigned RNA
ttttgttatttcttctctcttgatcttcagagattac

SEQ ID NO: 16569 - DNA, 37 bp, Homo sapiens
  source 1..37: mol_type = unassigned DNA
ttttgttatttcttctctcttgatcttcagagattac

SEQ ID NO: 16570 - DNA, 37 bp, Homo sapiens
  source 1..37: mol_type = unassigned DNA
gtaatctctgaagatcaagagagaagaaataacaaaa

SEQ ID NO: 16571 - RNA, 33 nt, Homo sapiens
  source 1..33: mol_type = unassigned RNA
ctttttttttctttctgttcccgggaaacacca

SEQ ID NO: 16572 - DNA, 33 bp, Homo sapiens
  source 1..33: mol_type = unassigned DNA
ctttttttttctttctgttcccgggaaacacca

SEQ ID NO: 16573 - DNA, 33 bp, Homo sapiens
  source 1..33: mol_type = unassigned DNA
tggtgtttcccgggaacagaaagaaaaaaaaag

SEQ ID NO: 16574 - RNA, 33 nt, Homo sapiens
  source 1..33: mol_type = unassigned RNA
agcaaaagcactctggattctgcaggcaagtgg

SEQ ID NO: 16575 - DNA, 33 bp, Homo sapiens
  source 1..33: mol_type = unassigned DNA
agcaaaagcactctggattctgcaggcaagtgg

SEQ ID NO: 16576 - DNA, 33 bp, Homo sapiens
  source 1..33: mol_type = unassigned DNA
ccacttgcctgcagaatccagagtgcttttgct

SEQ ID NO: 16577 - RNA, 31 nt, Homo sapiens
  source 1..31: mol_type = unassigned RNA
tgcttatttctctggatatctcctgtatgta

SEQ ID NO: 16578 - DNA, 31 bp, Homo sapiens
  source 1..31: mol_type = unassigned DNA
tgcttatttctctggatatctcctgtatgta

SEQ ID NO: 16579 - DNA, 31 bp, Homo sapiens
  source 1..31: mol_type = unassigned DNA
tacatacaggagatatccagagaaataagca

SEQ ID NO: 16580 - RNA, 23 nt, Homo sapiens
  source 1..23: mol_type = unassigned RNA
ttttattcttcctgctccgtgag

SEQ ID NO: 16581 - DNA, 23 bp, Homo sapiens
  source 1..23: mol_type = unassigned DNA
ttttattcttcctgctccgtgag

SEQ ID NO: 16582 - DNA, 23 bp, Homo sapiens
  source 1..23: mol_type = unassigned DNA
ctcacggagcaggaagaataaaa

SEQ ID NO: 16583 - RNA, 44 nt, Homo sapiens
  source 1..44: mol_type = unassigned RNA
tctttgcttatgtatctttattataagctgtagaatatatcata

SEQ ID NO: 16584 - DNA, 44 bp, Homo sapiens
  source 1..44: mol_type = unassigned DNA
tctttgcttatgtatctttattataagctgtagaatatatcata

SEQ ID NO: 16585 - DNA, 44 bp, Homo sapiens
  source 1..44: mol_type = unassigned DNA
tatgatatattctacagcttataataaagatacataagcaaaga

SEQ ID NO: 16586 - RNA, 23 nt, Homo sapiens
  source 1..23: mol_type = unassigned RNA
taagttaataaactgatgtttat

SEQ ID NO: 16587 - DNA, 23 bp, Homo sapiens
  source 1..23: mol_type = unassigned DNA
taagttaataaactgatgtttat

SEQ ID NO: 16588 - DNA, 23 bp, Homo sapiens
  source 1..23: mol_type = unassigned DNA
ataaacatcagtttattaactta

SEQ ID NO: 16589 - RNA, 79 nt, Homo sapiens
  source 1..79: mol_type = unassigned RNA
ttgctgtgcctttgcccattctgggactcctgcccgacttcccttgccctctctgacacctgccatccttcaaagccct

SEQ ID NO: 16590 - DNA, 79 bp, Homo sapiens
  source 1..79: mol_type = unassigned DNA
ttgctgtgcctttgcccattctgggactcctgcccgacttcccttgccctctctgacacctgccatccttcaaagccct

SEQ ID NO: 16591 - DNA, 79 bp, Homo sapiens
  source 1..79: mol_type = unassigned DNA
agggctttgaaggatggcaggtgtcagagagggcaagggaagtcgggcaggagtcccagaatgggcaaaggcacagcaa

SEQ ID NO: 16592 - RNA, 24 nt, Homo sapiens
  source 1..24: mol_type = unassigned RNA
tttacttctttctgctctcctgag

SEQ ID NO: 16593 - DNA, 24 bp, Homo sapiens
  source 1..24: mol_type = unassigned DNA
tttacttctttctgctctcctgag

SEQ ID NO: 16594 - DNA, 24 bp, Homo sapiens
  source 1..24: mol_type = unassigned DNA
ctcaggagagcagaaagaagtaaa

SEQ ID NO: 16595 - RNA, 62 nt, Homo sapiens
  source 1..62: mol_type = unassigned RNA
gaaaagactctgactccagttcagctctgtttttttccctagctgtatgagataggcaagtc

SEQ ID NO: 16596 - DNA, 62 bp, Homo sapiens
  source 1..62: mol_type = unassigned DNA
gaaaagactctgactccagttcagctctgtttttttccctagctgtatgagataggcaagtc

SEQ ID NO: 16597 - DNA, 62 bp, Homo sapiens
  source 1..62: mol_type = unassigned DNA
gacttgcctatctcatacagctagggaaaaaaacagagctgaactggagtcagagtcttttc

SEQ ID NO: 16598 - RNA, 42 nt, Homo sapiens
  source 1..42: mol_type = unassigned RNA
agggaggtgtgagctgcaatctttgttatctagccgcattag

SEQ ID NO: 16599 - DNA, 42 bp, Homo sapiens
  source 1..42: mol_type = unassigned DNA
agggaggtgtgagctgcaatctttgttatctagccgcattag

SEQ ID NO: 16600 - DNA, 42 bp, Homo sapiens
  source 1..42: mol_type = unassigned DNA
ctaatgcggctagataacaaagattgcagctcacacctccct

SEQ ID NO: 16601 - RNA, 44 nt, Homo sapiens
  source 1..44: mol_type = unassigned RNA
tttcatttttggtacctggctgtatgaaaatattttagggtagg

SEQ ID NO: 16602 - DNA, 44 bp, Homo sapiens
  source 1..44: mol_type = unassigned DNA
tttcatttttggtacctggctgtatgaaaatattttagggtagg

SEQ ID NO: 16603 - DNA, 44 bp, Homo sapiens
  source 1..44: mol_type = unassigned DNA
cctaccctaaaatattttcatacagccaggtaccaaaaatgaaa

SEQ ID NO: 16604 - RNA, 117 nt, Homo sapiens
  source 1..117: mol_type = unassigned RNA
gacttaagtttgcctgaatcctgtttccagaatgtgcctggaaactcccaacctccatgccatttcactctgaatctaaagatctcgtaccaatctttgcttattcaaatgttgcat

SEQ ID NO: 16605 - DNA, 117 bp, Homo sapiens
  source 1..117: mol_type = unassigned DNA
gacttaagtttgcctgaatcctgtttccagaatgtgcctggaaactcccaacctccatgccatttcactctgaatctaaagatctcgtaccaatctttgcttattcaaatgttgcat

SEQ ID NO: 16606 - DNA, 117 bp, Homo sapiens
  source 1..117: mol_type = unassigned DNA
atgcaacatttgaataagcaaagattggtacgagatctttagattcagagtgaaatggcatggaggttgggagtttccaggcacattctggaaacaggattcaggcaaacttaagtc

SEQ ID NO: 16607 - RNA, 113 nt, Homo sapiens
  source 1..113: mol_type = unassigned RNA
tgactcgcctcagttccccaggacactgtggcgccatggaggtctgtcccctccctcctcctcacagcagagacccgggggcatgaggcagcgtctgctccagagtgggcccg

SEQ ID NO: 16608 - DNA, 113 bp, Homo sapiens
  source 1..113: mol_type = unassigned DNA
tgactcgcctcagttccccaggacactgtggcgccatggaggtctgtcccctccctcctcctcacagcagagacccgggggcatgaggcagcgtctgctccagagtgggcccg

SEQ ID NO: 16609 - DNA, 113 bp, Homo sapiens
  source 1..113: mol_type = unassigned DNA
cgggcccactctggagcagacgctgcctcatgcccccgggtctctgctgtgaggaggagggaggggacagacctccatggcgccacagtgtcctggggaactgaggcgagtca

SEQ ID NO: 16610 - RNA, 59 nt, Homo sapiens
  source 1..59: mol_type = unassigned RNA
tccattgtatgattatactacattttgcttatccgatcgtatgttgatggacacttagg

SEQ ID NO: 16611 - DNA, 59 bp, Homo sapiens
  source 1..59: mol_type = unassigned DNA
tccattgtatgattatactacattttgcttatccgatcgtatgttgatggacacttagg

SEQ ID NO: 16612 - DNA, 59 bp, Homo sapiens
  source 1..59: mol_type = unassigned DNA
cctaagtgtccatcaacatacgatcggataagcaaaatgtagtataatcatacaatgga

SEQ ID NO: 16613 - RNA, 36 nt, Homo sapiens
  source 1..36: mol_type = unassigned RNA
tagctgcgtgtatggctgatcagaatgaagatgaca

SEQ ID NO: 16614 - DNA, 36 bp, Homo sapiens
  source 1..36: mol_type = unassigned DNA
tagctgcgtgtatggctgatcagaatgaagatgaca

SEQ ID NO: 16615 - DNA, 36 bp, Homo sapiens
  source 1..36: mol_type = unassigned DNA
tgtcatcttcattctgatcagccatacacgcagcta

SEQ ID NO: 16616 - RNA, 34 nt, Homo sapiens
  source 1..34: mol_type = unassigned RNA
ccagctgccatttaagcactttgtggttattggc

SEQ ID NO: 16617 - DNA, 34 bp, Homo sapiens
  source 1..34: mol_type = unassigned DNA
ccagctgccatttaagcactttgtggttattggc

SEQ ID NO: 16618 - DNA, 34 bp, Homo sapiens
  source 1..34: mol_type = unassigned DNA
gccaataaccacaaagtgcttaaatggcagctgg

SEQ ID NO: 16619 - RNA, 43 nt, Homo sapiens
  source 1..43: mol_type = unassigned RNA
atgtgagctcccaggcagggtttggtcagtggcgcattggagc

SEQ ID NO: 16620 - DNA, 43 bp, Homo sapiens
  source 1..43: mol_type = unassigned DNA
atgtgagctcccaggcagggtttggtcagtggcgcattggagc

SEQ ID NO: 16621 - DNA, 43 bp, Homo sapiens
  source 1..43: mol_type = unassigned DNA
gctccaatgcgccactgaccaaaccctgcctgggagctcacat

SEQ ID NO: 16622 - RNA, 32 nt, Homo sapiens
  source 1..32: mol_type = unassigned RNA
caaagtctttgttctttctgctctctttgctg

SEQ ID NO: 16623 - DNA, 32 bp, Homo sapiens
  source 1..32: mol_type = unassigned DNA
caaagtctttgttctttctgctctctttgctg

SEQ ID NO: 16624 - DNA, 32 bp, Homo sapiens
  source 1..32: mol_type = unassigned DNA
cagcaaagagagcagaaagaacaaagactttg

SEQ ID NO: 16625 - RNA, 22 nt, Homo sapiens
  source 1..22: mol_type = unassigned RNA
attttgtgatgacttactttaa

SEQ ID NO: 16626 - DNA, 22 bp, Homo sapiens
  source 1..22: mol_type = unassigned DNA
attttgtgatgacttactttaa

SEQ ID NO: 16627 - DNA, 22 bp, Homo sapiens
  source 1..22: mol_type = unassigned DNA
ttaaagtaagtcatcacaaaat

SEQ ID NO: 16628 - RNA, 27 nt, Homo sapiens
  source 1..27: mol_type = unassigned RNA
attaacaattatcatactgctgtgtat

SEQ ID NO: 16629 - DNA, 27 bp, Homo sapiens
  source 1..27: mol_type = unassigned DNA
attaacaattatcatactgctgtgtat

SEQ ID NO: 16630 - DNA, 27 bp, Homo sapiens
  source 1..27: mol_type = unassigned DNA
atacacagcagtatgataattgttaat

SEQ ID NO: 16631 - RNA, 51 nt, Homo sapiens
  source 1..51: mol_type = unassigned RNA
acctacagatttctgtgtttcactatatgttaacttgcttggctggaagtt

SEQ ID NO: 16632 - DNA, 51 bp, Homo sapiens
  source 1..51: mol_type = unassigned DNA
acctacagatttctgtgtttcactatatgttaacttgcttggctggaagtt

SEQ ID NO: 16633 - DNA, 51 bp, Homo sapiens
  source 1..51: mol_type = unassigned DNA
aacttccagccaagcaagttaacatatagtgaaacacagaaatctgtaggt

SEQ ID NO: 16634 - RNA, 35 nt, Homo sapiens
  source 1..35: mol_type = unassigned RNA
atatcttaccacactgatgtacatggtttatctct

SEQ ID NO: 16635 - DNA, 35 bp, Homo sapiens
  source 1..35: mol_type = unassigned DNA
atatcttaccacactgatgtacatggtttatctct

SEQ ID NO: 16636 - DNA, 35 bp, Homo sapiens
  source 1..35: mol_type = unassigned DNA
agagataaaccatgtacatcagtgtggtaagatat

SEQ ID NO: 16637 - RNA, 35 nt, Homo sapiens
  source 1..35: mol_type = unassigned RNA
gggcacccacacagatcaggacaccctttgaattt

SEQ ID NO: 16638 - DNA, 35 bp, Homo sapiens
  source 1..35: mol_type = unassigned DNA
gggcacccacacagatcaggacaccctttgaattt

SEQ ID NO: 16639 - DNA, 35 bp, Homo sapiens
  source 1..35: mol_type = unassigned DNA
aaattcaaagggtgtcctgatctgtgtgggtgccc

SEQ ID NO: 16640 - RNA, 29 nt, Homo sapiens
  source 1..29: mol_type = unassigned RNA
tagcatctttgggtatcttgagtaagaat

SEQ ID NO: 16641 - DNA, 29 bp, Homo sapiens
  source 1..29: mol_type = unassigned DNA
tagcatctttgggtatcttgagtaagaat

SEQ ID NO: 16642 - DNA, 29 bp, Homo sapiens
  source 1..29: mol_type = unassigned DNA
attcttactcaagatacccaaagatgcta

SEQ ID NO: 16643 - RNA, 32 nt, Homo sapiens
  source 1..32: mol_type = unassigned RNA
tgatgtattagtttgctatggtatctctaaca

SEQ ID NO: 16644 - DNA, 32 bp, Homo sapiens
  source 1..32: mol_type = unassigned DNA
tgatgtattagtttgctatggtatctctaaca

SEQ ID NO: 16645 - DNA, 32 bp, Homo sapiens
  source 1..32: mol_type = unassigned DNA
tgttagagataccatagcaaactaatacatca

SEQ ID NO: 16646 - RNA, 38 nt, Homo sapiens
  source 1..38: mol_type = unassigned RNA
cattgcacggggaaaattcactataactttacatccaa

SEQ ID NO: 16647 - DNA, 38 bp, Homo sapiens
  source 1..38: mol_type = unassigned DNA
cattgcacggggaaaattcactataactttacatccaa

SEQ ID NO: 16648 - DNA, 38 bp, Homo sapiens
  source 1..38: mol_type = unassigned DNA
ttggatgtaaagttatagtgaattttccccgtgcaatg

SEQ ID NO: 16649 - RNA, 25 nt, Homo sapiens
  source 1..25: mol_type = unassigned RNA
ttttgttctttctgcttgctttcaa

SEQ ID NO: 16650 - DNA, 25 bp, Homo sapiens
  source 1..25: mol_type = unassigned DNA
ttttgttctttctgcttgctttcaa

SEQ ID NO: 16651 - DNA, 25 bp, Homo sapiens
  source 1..25: mol_type = unassigned DNA
ttgaaagcaagcagaaagaacaaaa

SEQ ID NO: 16652 - RNA, 29 nt, Homo sapiens
  source 1..29: mol_type = unassigned RNA
tgcttcctaaccatcccctgctaacatta

SEQ ID NO: 16653 - DNA, 29 bp, Homo sapiens
  source 1..29: mol_type = unassigned DNA
tgcttcctaaccatcccctgctaacatta

SEQ ID NO: 16654 - DNA, 29 bp, Homo sapiens
  source 1..29: mol_type = unassigned DNA
taatgttagcaggggatggttaggaagca

SEQ ID NO: 16655 - RNA, 44 nt, Homo sapiens
  source 1..44: mol_type = unassigned RNA
tcccctgtctctcagcctttggcactgtgtagaaatgacactca

SEQ ID NO: 16656 - DNA, 44 bp, Homo sapiens
  source 1..44: mol_type = unassigned DNA
tcccctgtctctcagcctttggcactgtgtagaaatgacactca

SEQ ID NO: 16657 - DNA, 44 bp, Homo sapiens
  source 1..44: mol_type = unassigned DNA
tgagtgtcatttctacacagtgccaaaggctgagagacagggga

SEQ ID NO: 16658 - RNA, 31 nt, Homo sapiens
  source 1..31: mol_type = unassigned RNA
ggtgtctctgcctctctgtgcctccgcagat

SEQ ID NO: 16659 - DNA, 31 bp, Homo sapiens
  source 1..31: mol_type = unassigned DNA
ggtgtctctgcctctctgtgcctccgcagat

SEQ ID NO: 16660 - DNA, 31 bp, Homo sapiens
  source 1..31: mol_type = unassigned DNA
atctgcggaggcacagagaggcagagacacc

SEQ ID NO: 16661 - RNA, 28 nt, Homo sapiens
  source 1..28: mol_type = unassigned RNA
gattagtgatgtcttgcatggatgaaga

SEQ ID NO: 16662 - DNA, 28 bp, Homo sapiens
  source 1..28: mol_type = unassigned DNA
gattagtgatgtcttgcatggatgaaga

SEQ ID NO: 16663 - DNA, 28 bp, Homo sapiens
  source 1..28: mol_type = unassigned DNA
tcttcatccatgcaagacatcactaatc

SEQ ID NO: 16664 - RNA, 25 nt, Homo sapiens
  source 1..25: mol_type = unassigned RNA
ttcttttgttatcaacctgtaagaa

SEQ ID NO: 16665 - DNA, 25 bp, Homo sapiens
  source 1..25: mol_type = unassigned DNA
ttcttttgttatcaacctgtaagaa

SEQ ID NO: 16666 - DNA, 25 bp, Homo sapiens
  source 1..25: mol_type = unassigned DNA
ttcttacaggttgataacaaaagaa

SEQ ID NO: 16667 - RNA, 51 nt, Homo sapiens
  source 1..51: mol_type = unassigned RNA
tcattcatagtactctgctttgtcctgggaaaatccaaacttaaatgccta

SEQ ID NO: 16668 - DNA, 51 bp, Homo sapiens
  source 1..51: mol_type = unassigned DNA
tcattcatagtactctgctttgtcctgggaaaatccaaacttaaatgccta

SEQ ID NO: 16669 - DNA, 51 bp, Homo sapiens
  source 1..51: mol_type = unassigned DNA
taggcatttaagtttggattttcccaggacaaagcagagtactatgaatga

SEQ ID NO: 16670 - RNA, 36 nt, Homo sapiens
  source 1..36: mol_type = unassigned RNA
ttctcttctcttactgcttttgagattatttccttg

SEQ ID NO: 16671 - DNA, 36 bp, Homo sapiens
  source 1..36: mol_type = unassigned DNA
ttctcttctcttactgcttttgagattatttccttg

SEQ ID NO: 16672 - DNA, 36 bp, Homo sapiens
  source 1..36: mol_type = unassigned DNA
caaggaaataatctcaaaagcagtaagagaagagaa

SEQ ID NO: 16673 - RNA, 21 nt, Homo sapiens
  source 1..21: mol_type = unassigned RNA
tagcttcccagatgctgctta

SEQ ID NO: 16674 - DNA, 21 bp, Homo sapiens
  source 1..21: mol_type = unassigned DNA
tagcttcccagatgctgctta

SEQ ID NO: 16675 - DNA, 21 bp, Homo sapiens
  source 1..21: mol_type = unassigned DNA
taagcagcatctgggaagcta

SEQ ID NO: 16676 - RNA, 24 nt, Homo sapiens
  source 1..24: mol_type = unassigned RNA
tttacttatcataatgttgttgaa

SEQ ID NO: 16677 - DNA, 24 bp, Homo sapiens
  source 1..24: mol_type = unassigned DNA
tttacttatcataatgttgttgaa

SEQ ID NO: 16678 - DNA, 24 bp, Homo sapiens
  source 1..24: mol_type = unassigned DNA
ttcaacaacattatgataagtaaa

SEQ ID NO: 16679 - RNA, 26 nt, Homo sapiens
  source 1..26: mol_type = unassigned RNA
ttgaagatcaggctgatgttgcaaag

SEQ ID NO: 16680 - DNA, 26 bp, Homo sapiens
  source 1..26: mol_type = unassigned DNA
ttgaagatcaggctgatgttgcaaag

SEQ ID NO: 16681 - DNA, 26 bp, Homo sapiens
  source 1..26: mol_type = unassigned DNA
ctttgcaacatcagcctgatcttcaa

SEQ ID NO: 16682 - RNA, 99 nt, Homo sapiens
  source 1..99: mol_type = unassigned RNA
ctgtttttagttttggctatttagatgtatgattgtattagtctgttcccacactgctataaagaactacctgagactgcgtagttaataaggaacagt

SEQ ID NO: 16683 - DNA, 99 bp, Homo sapiens
  source 1..99: mol_type = unassigned DNA
ctgtttttagttttggctatttagatgtatgattgtattagtctgttcccacactgctataaagaactacctgagactgcgtagttaataaggaacagt

SEQ ID NO: 16684 - DNA, 99 bp, Homo sapiens
  source 1..99: mol_type = unassigned DNA
actgttccttattaactacgcagtctcaggtagttctttatagcagtgtgggaacagactaatacaatcatacatctaaatagccaaaactaaaaacag

SEQ ID NO: 16685 - RNA, 29 nt, Homo sapiens
  source 1..29: mol_type = unassigned RNA
gtctatggccataccacctgaatgcacca

SEQ ID NO: 16686 - DNA, 29 bp, Homo sapiens
  source 1..29: mol_type = unassigned DNA
gtctatggccataccacctgaatgcacca

SEQ ID NO: 16687 - DNA, 29 bp, Homo sapiens
  source 1..29: mol_type = unassigned DNA
tggtgcattcaggtggtatggccatagac

SEQ ID NO: 16688 - RNA, 41 nt, Homo sapiens
  source 1..41: mol_type = unassigned RNA
taacgtatcactttgtatagttttttagtggtctttccagg

SEQ ID NO: 16689 - DNA, 41 bp, Homo sapiens
  source 1..41: mol_type = unassigned DNA
taacgtatcactttgtatagttttttagtggtctttccagg

SEQ ID NO: 16690 - DNA, 41 bp, Homo sapiens
  source 1..41: mol_type = unassigned DNA
cctggaaagaccactaaaaaactatacaaagtgatacgtta

SEQ ID NO: 16691 - RNA, 53 nt, Homo sapiens
  source 1..53: mol_type = unassigned RNA
cagtcctggggtctggaaagtctgaggtcgaagtgctggcatctggcaagggc

SEQ ID NO: 16692 - DNA, 53 bp, Homo sapiens
  source 1..53: mol_type = unassigned DNA
cagtcctggggtctggaaagtctgaggtcgaagtgctggcatctggcaagggc

SEQ ID NO: 16693 - DNA, 53 bp, Homo sapiens
  source 1..53: mol_type = unassigned DNA
gcccttgccagatgccagcacttcgacctcagactttccagaccccaggactg

SEQ ID NO: 16694 - RNA, 42 nt, Homo sapiens
  source 1..42: mol_type = unassigned RNA
tttgttcgttggcttgttttggttttggctttggtttgttca

SEQ ID NO: 16695 - DNA, 42 bp, Homo sapiens
  source 1..42: mol_type = unassigned DNA
tttgttcgttggcttgttttggttttggctttggtttgttca

SEQ ID NO: 16696 - DNA, 42 bp, Homo sapiens
  source 1..42: mol_type = unassigned DNA
tgaacaaaccaaagccaaaaccaaaacaagccaacgaacaaa

SEQ ID NO: 16697 - RNA, 23 nt, Homo sapiens
  source 1..23: mol_type = unassigned RNA
tattttgtttctcactgtatgca

SEQ ID NO: 16698 - DNA, 23 bp, Homo sapiens
  source 1..23: mol_type = unassigned DNA
tattttgtttctcactgtatgca

SEQ ID NO: 16699 - DNA, 23 bp, Homo sapiens
  source 1..23: mol_type = unassigned DNA
tgcatacagtgagaaacaaaata

SEQ ID NO: 16700 - RNA, 95 nt, Homo sapiens
  source 1..95: mol_type = unassigned RNA
ctaactttgccattgattagctgtgtgactttggaaaataacttaacctctctgactctcatattgtgcatttgtgatacagagataataatgcc

SEQ ID NO: 16701 - DNA, 95 bp, Homo sapiens
  source 1..95: mol_type = unassigned DNA
ctaactttgccattgattagctgtgtgactttggaaaataacttaacctctctgactctcatattgtgcatttgtgatacagagataataatgcc

SEQ ID NO: 16702 - DNA, 95 bp, Homo sapiens
  source 1..95: mol_type = unassigned DNA
ggcattattatctctgtatcacaaatgcacaatatgagagtcagagaggttaagttattttccaaagtcacacagctaatcaatggcaaagttag

SEQ ID NO: 16703 - RNA, 33 nt, Homo sapiens
  source 1..33: mol_type = unassigned RNA
atctaatgagcaatggggcgtggcctgatggag

SEQ ID NO: 16704 - DNA, 33 bp, Homo sapiens
  source 1..33: mol_type = unassigned DNA
atctaatgagcaatggggcgtggcctgatggag

SEQ ID NO: 16705 - DNA, 33 bp, Homo sapiens
  source 1..33: mol_type = unassigned DNA
ctccatcaggccacgccccattgctcattagat

SEQ ID NO: 16706 - RNA, 24 nt, Homo sapiens
  source 1..24: mol_type = unassigned RNA
tagcttccagcaccatggctgtta

SEQ ID NO: 16707 - DNA, 24 bp, Homo sapiens
  source 1..24: mol_type = unassigned DNA
tagcttccagcaccatggctgtta

SEQ ID NO: 16708 - DNA, 24 bp, Homo sapiens
  source 1..24: mol_type = unassigned DNA
taacagccatggtgctggaagcta

SEQ ID NO: 16709 - RNA, 32 nt, Homo sapiens
  source 1..32: mol_type = unassigned RNA
tcaccttagcagactaatgtggaccccaattc

SEQ ID NO: 16710 - DNA, 32 bp, Homo sapiens
  source 1..32: mol_type = unassigned DNA
tcaccttagcagactaatgtggaccccaattc

SEQ ID NO: 16711 - DNA, 32 bp, Homo sapiens
  source 1..32: mol_type = unassigned DNA
gaattggggtccacattagtctgctaaggtga

SEQ ID NO: 16712 - RNA, 32 nt, Homo sapiens
  source 1..32: mol_type = unassigned RNA
ttctgataatatcagattgattttgaatttta

SEQ ID NO: 16713 - DNA, 32 bp, Homo sapiens
  source 1..32: mol_type = unassigned DNA
ttctgataatatcagattgattttgaatttta

SEQ ID NO: 16714 - DNA, 32 bp, Homo sapiens
  source 1..32: mol_type = unassigned DNA
taaaattcaaaatcaatctgatattatcagaa

SEQ ID NO: 16715 - RNA, 65 nt, Homo sapiens
  source 1..65: mol_type = unassigned RNA
agagagaacttgtgcaggggaactcctctttataaaaccatgagatctcgtgagacttacatggg

SEQ ID NO: 16716 - DNA, 65 bp, Homo sapiens
  source 1..65: mol_type = unassigned DNA
agagagaacttgtgcaggggaactcctctttataaaaccatgagatctcgtgagacttacatggg

SEQ ID NO: 16717 - DNA, 65 bp, Homo sapiens
  source 1..65: mol_type = unassigned DNA
cccatgtaagtctcacgagatctcatggttttataaagaggagttcccctgcacaagttctctct

SEQ ID NO: 16718 - RNA, 48 nt, Homo sapiens
  source 1..48: mol_type = unassigned RNA
tccctctgctttggaataatctttttctctgacctcctttgacaactg

SEQ ID NO: 16719 - DNA, 48 bp, Homo sapiens
  source 1..48: mol_type = unassigned DNA
tccctctgctttggaataatctttttctctgacctcctttgacaactg

SEQ ID NO: 16720 - DNA, 48 bp, Homo sapiens
  source 1..48: mol_type = unassigned DNA
cagttgtcaaaggaggtcagagaaaaagattattccaaagcagaggga

SEQ ID NO: 16721 - RNA, 35 nt, Homo sapiens
  source 1..35: mol_type = unassigned RNA
gatttttttattacttacatggaatgttctagaac

SEQ ID NO: 16722 - DNA, 35 bp, Homo sapiens
  source 1..35: mol_type = unassigned DNA
gatttttttattacttacatggaatgttctagaac

SEQ ID NO: 16723 - DNA, 35 bp, Homo sapiens
  source 1..35: mol_type = unassigned DNA
gttctagaacattccatgtaagtaataaaaaaatc

SEQ ID NO: 16724 - RNA, 30 nt, Homo sapiens
  source 1..30: mol_type = unassigned RNA
gtaggtgctgcagatccaaggacatctttt

SEQ ID NO: 16725 - DNA, 30 bp, Homo sapiens
  source 1..30: mol_type = unassigned DNA
gtaggtgctgcagatccaaggacatctttt

SEQ ID NO: 16726 - DNA, 30 bp, Homo sapiens
  source 1..30: mol_type = unassigned DNA
aaaagatgtccttggatctgcagcacctac

SEQ ID NO: 16727 - RNA, 73 nt, Homo sapiens
  source 1..73: mol_type = unassigned RNA
ctgatatggcacttggcctggctgtttttggtgtataggaatgtatgtaatttttgcacaccaatattgtatc

SEQ ID NO: 16728 - DNA, 73 bp, Homo sapiens
  source 1..73: mol_type = unassigned DNA
ctgatatggcacttggcctggctgtttttggtgtataggaatgtatgtaatttttgcacaccaatattgtatc

SEQ ID NO: 16729 - DNA, 73 bp, Homo sapiens
  source 1..73: mol_type = unassigned DNA
gatacaatattggtgtgcaaaaattacatacattcctatacaccaaaaacagccaggccaagtgccatatcag

SEQ ID NO: 16730 - RNA, 164 nt, Homo sapiens
  source 1..164: mol_type = unassigned RNA
cacagatgaaagcaatgaaagagactgtgcagctctgcttgacatctgttttccgtgatcagcctcctccccctttgagtttaatcacatcaaatccaactcggatgttactcccacccaggaatattgcctctaagcttccagatgcagcggccaaaagcaag

SEQ ID NO: 16731 - DNA, 164 bp, Homo sapiens
  source 1..164: mol_type = unassigned DNA
cacagatgaaagcaatgaaagagactgtgcagctctgcttgacatctgttttccgtgatcagcctcctccccctttgagtttaatcacatcaaatccaactcggatgttactcccacccaggaatattgcctctaagcttccagatgcagcggccaaaagcaag

SEQ ID NO: 16732 - DNA, 164 bp, Homo sapiens
  source 1..164: mol_type = unassigned DNA
cttgcttttggccgctgcatctggaagcttagaggcaatattcctgggtgggagtaacatccgagttggatttgatgtgattaaactcaaagggggaggaggctgatcacggaaaacagatgtcaagcagagctgcacagtctctttcattgctttcatctgtg

SEQ ID NO: 16733 - RNA, 38 nt, Homo sapiens
  source 1..38: mol_type = unassigned RNA
tgattttgtctttctgcttgtgtgagtctccatctttt

SEQ ID NO: 16734 - DNA, 38 bp, Homo sapiens
  source 1..38: mol_type = unassigned DNA
tgattttgtctttctgcttgtgtgagtctccatctttt

SEQ ID NO: 16735 - DNA, 38 bp, Homo sapiens
  source 1..38: mol_type = unassigned DNA
aaaagatggagactcacacaagcagaaagacaaaatca

SEQ ID NO: 16736 - RNA, 23 nt, Homo sapiens
  source 1..23: mol_type = unassigned RNA
ttgccaagcagagtgatgttgat

SEQ ID NO: 16737 - DNA, 23 bp, Homo sapiens
  source 1..23: mol_type = unassigned DNA
ttgccaagcagagtgatgttgat

SEQ ID NO: 16738 - DNA, 23 bp, Homo sapiens
  source 1..23: mol_type = unassigned DNA
atcaacatcactctgcttggcaa

SEQ ID NO: 16739 - RNA, 47 nt, Homo sapiens
  source 1..47: mol_type = unassigned RNA
attaaccatttttgactgtgcttgatgtaagtaggttatatatttaa

SEQ ID NO: 16740 - DNA, 47 bp, Homo sapiens
  source 1..47: mol_type = unassigned DNA
attaaccatttttgactgtgcttgatgtaagtaggttatatatttaa

SEQ ID NO: 16741 - DNA, 47 bp, Homo sapiens
  source 1..47: mol_type = unassigned DNA
ttaaatatataacctacttacatcaagcacagtcaaaaatggttaat

SEQ ID NO: 16742 - RNA, 78 nt, Homo sapiens
  source 1..78: mol_type = unassigned RNA
aagatgtgatgaatcttttgattcttgttaactgaactcattctcaggatttgtagtgatgacttacatgtgaatcag

SEQ ID NO: 16743 - DNA, 78 bp, Homo sapiens
  source 1..78: mol_type = unassigned DNA
aagatgtgatgaatcttttgattcttgttaactgaactcattctcaggatttgtagtgatgacttacatgtgaatcag

SEQ ID NO: 16744 - DNA, 78 bp, Homo sapiens
  source 1..78: mol_type = unassigned DNA
ctgattcacatgtaagtcatcactacaaatcctgagaatgagttcagttaacaagaatcaaaagattcatcacatctt

SEQ ID NO: 16745 - RNA, 58 nt, Homo sapiens
  source 1..58: mol_type = unassigned RNA
atccatgaaataaaacagtatggagtttccttttgtttgctggtttttgtttgtttgt

SEQ ID NO: 16746 - DNA, 58 bp, Homo sapiens
  source 1..58: mol_type = unassigned DNA
atccatgaaataaaacagtatggagtttccttttgtttgctggtttttgtttgtttgt

SEQ ID NO: 16747 - DNA, 58 bp, Homo sapiens
  source 1..58: mol_type = unassigned DNA
acaaacaaacaaaaaccagcaaacaaaaggaaactccatactgttttatttcatggat

SEQ ID NO: 16748 - RNA, 99 nt, Homo sapiens
  source 1..99: mol_type = unassigned RNA
tctccagactcaaattcgattctccctggtgctgtgcactgagagccctgccttctcctgcttgctgttcctgggacagcagcacatcctggtgtccac

SEQ ID NO: 16749 - DNA, 99 bp, Homo sapiens
  source 1..99: mol_type = unassigned DNA
tctccagactcaaattcgattctccctggtgctgtgcactgagagccctgccttctcctgcttgctgttcctgggacagcagcacatcctggtgtccac

SEQ ID NO: 16750 - DNA, 99 bp, Homo sapiens
  source 1..99: mol_type = unassigned DNA
gtggacaccaggatgtgctgctgtcccaggaacagcaagcaggagaaggcagggctctcagtgcacagcaccagggagaatcgaatttgagtctggaga

SEQ ID NO: 16751 - RNA, 55 nt, Homo sapiens
  source 1..55: mol_type = unassigned RNA
cttccttttctctgattttctgatgaccttgagaggtcttttcttcatgctgggg

SEQ ID NO: 16752 - DNA, 55 bp, Homo sapiens
  source 1..55: mol_type = unassigned DNA
cttccttttctctgattttctgatgaccttgagaggtcttttcttcatgctgggg

SEQ ID NO: 16753 - DNA, 55 bp, Homo sapiens
  source 1..55: mol_type = unassigned DNA
ccccagcatgaagaaaagacctctcaaggtcatcagaaaatcagagaaaaggaag

SEQ ID NO: 16754 - RNA, 31 nt, Homo sapiens
  source 1..31: mol_type = unassigned RNA
atgggccagcactggtttaattcactggctg

SEQ ID NO: 16755 - DNA, 31 bp, Homo sapiens
  source 1..31: mol_type = unassigned DNA
atgggccagcactggtttaattcactggctg

SEQ ID NO: 16756 - DNA, 31 bp, Homo sapiens
  source 1..31: mol_type = unassigned DNA
cagccagtgaattaaaccagtgctggcccat

SEQ ID NO: 16757 - RNA, 116 nt, Homo sapiens
  source 1..116: mol_type = unassigned RNA
caggctggccctagactacttattagcagaagagggtgcgggctgtggtaagtttaacatctccaattgctgtcttaacataggcaataatggagaagaggttctggaaatcgctt

SEQ ID NO: 16758 - DNA, 116 bp, Homo sapiens
  source 1..116: mol_type = unassigned DNA
caggctggccctagactacttattagcagaagagggtgcgggctgtggtaagtttaacatctccaattgctgtcttaacataggcaataatggagaagaggttctggaaatcgctt

SEQ ID NO: 16759 - DNA, 116 bp, Homo sapiens
  source 1..116: mol_type = unassigned DNA
aagcgatttccagaacctcttctccattattgcctatgttaagacagcaattggagatgttaaacttaccacagcccgcaccctcttctgctaataagtagtctagggccagcctg

SEQ ID NO: 16760 - RNA, 33 nt, Homo sapiens
  source 1..33: mol_type = unassigned RNA
ttgaggacttttcaggactctacttgtcatctc

SEQ ID NO: 16761 - DNA, 33 bp, Homo sapiens
  source 1..33: mol_type = unassigned DNA
ttgaggacttttcaggactctacttgtcatctc

SEQ ID NO: 16762 - DNA, 33 bp, Homo sapiens
  source 1..33: mol_type = unassigned DNA
gagatgacaagtagagtcctgaaaagtcctcaa

SEQ ID NO: 16763 - RNA, 29 nt, Homo sapiens
  source 1..29: mol_type = unassigned RNA
gggccagagacgccatggagtacaggccc

SEQ ID NO: 16764 - DNA, 29 bp, Homo sapiens
  source 1..29: mol_type = unassigned DNA
gggccagagacgccatggagtacaggccc

SEQ ID NO: 16765 - DNA, 29 bp, Homo sapiens
  source 1..29: mol_type = unassigned DNA
gggcctgtactccatggcgtctctggccc

SEQ ID NO: 16766 - RNA, 31 nt, Homo sapiens
  source 1..31: mol_type = unassigned RNA
gtgcttggcttttcggactcatggtgaatgc

SEQ ID NO: 16767 - DNA, 31 bp, Homo sapiens
  source 1..31: mol_type = unassigned DNA
gtgcttggcttttcggactcatggtgaatgc

SEQ ID NO: 16768 - DNA, 31 bp, Homo sapiens
  source 1..31: mol_type = unassigned DNA
gcattcaccatgagtccgaaaagccaagcac

SEQ ID NO: 16769 - RNA, 24 nt, Homo sapiens
  source 1..24: mol_type = unassigned RNA
gcacttgactcactttctgttttt

SEQ ID NO: 16770 - DNA, 24 bp, Homo sapiens
  source 1..24: mol_type = unassigned DNA
gcacttgactcactttctgttttt

SEQ ID NO: 16771 - DNA, 24 bp, Homo sapiens
  source 1..24: mol_type = unassigned DNA
aaaaacagaaagtgagtcaagtgc

SEQ ID NO: 16772 - RNA, 42 nt, Homo sapiens
  source 1..42: mol_type = unassigned RNA
atggatactgtattcactgtggttctctccctgtctgctgtg

SEQ ID NO: 16773 - DNA, 42 bp, Homo sapiens
  source 1..42: mol_type = unassigned DNA
atggatactgtattcactgtggttctctccctgtctgctgtg

SEQ ID NO: 16774 - DNA, 42 bp, Homo sapiens
  source 1..42: mol_type = unassigned DNA
cacagcagacagggagagaaccacagtgaatacagtatccat

SEQ ID NO: 16775 - RNA, 40 nt, Homo sapiens
  source 1..40: mol_type = unassigned RNA
tttgttgttcagtttgcctgaagtgatcctgtgacctttg

SEQ ID NO: 16776 - DNA, 40 bp, Homo sapiens
  source 1..40: mol_type = unassigned DNA
tttgttgttcagtttgcctgaagtgatcctgtgacctttg

SEQ ID NO: 16777 - DNA, 40 bp, Homo sapiens
  source 1..40: mol_type = unassigned DNA
caaaggtcacaggatcacttcaggcaaactgaacaacaaa

SEQ ID NO: 16778 - RNA, 22 nt, Homo sapiens
  source 1..22: mol_type = unassigned RNA
tacttggttatctgctatattc

SEQ ID NO: 16779 - DNA, 22 bp, Homo sapiens
  source 1..22: mol_type = unassigned DNA
tacttggttatctgctatattc

SEQ ID NO: 16780 - DNA, 22 bp, Homo sapiens
  source 1..22: mol_type = unassigned DNA
gaatatagcagataaccaagta

SEQ ID NO: 16781 - RNA, 22 nt, Homo sapiens
  source 1..22: mol_type = unassigned RNA
tgtttctgaggacttacattaa

SEQ ID NO: 16782 - DNA, 22 bp, Homo sapiens
  source 1..22: mol_type = unassigned DNA
tgtttctgaggacttacattaa

SEQ ID NO: 16783 - DNA, 22 bp, Homo sapiens
  source 1..22: mol_type = unassigned DNA
ttaatgtaagtcctcagaaaca

SEQ ID NO: 16784 - RNA, 26 nt, Homo sapiens
  source 1..26: mol_type = unassigned RNA
atctaggtaagtcaggaggagctcaa

SEQ ID NO: 16785 - DNA, 26 bp, Homo sapiens
  source 1..26: mol_type = unassigned DNA
atctaggtaagtcaggaggagctcaa

SEQ ID NO: 16786 - DNA, 26 bp, Homo sapiens
  source 1..26: mol_type = unassigned DNA
ttgagctcctcctgacttacctagat

SEQ ID NO: 16787 - RNA, 24 nt, Homo sapiens
  source 1..24: mol_type = unassigned RNA
tatttggttagctctgtgtatgtt

SEQ ID NO: 16788 - DNA, 24 bp, Homo sapiens
  source 1..24: mol_type = unassigned DNA
tatttggttagctctgtgtatgtt

SEQ ID NO: 16789 - DNA, 24 bp, Homo sapiens
  source 1..24: mol_type = unassigned DNA
aacatacacagagctaaccaaata

SEQ ID NO: 16790 - RNA, 26 nt, Homo sapiens
  source 1..26: mol_type = unassigned RNA
gcttcagctgtcattttaaaactgtc

SEQ ID NO: 16791 - DNA, 26 bp, Homo sapiens
  source 1..26: mol_type = unassigned DNA
gcttcagctgtcattttaaaactgtc

SEQ ID NO: 16792 - DNA, 26 bp, Homo sapiens
  source 1..26: mol_type = unassigned DNA
gacagttttaaaatgacagctgaagc

SEQ ID NO: 16793 - RNA, 58 nt, Homo sapiens
  source 1..58: mol_type = unassigned RNA
cattcatgggtcagggcttcaaacaagaaacttcctttatgctactgatgttgtagaa

SEQ ID NO: 16794 - DNA, 58 bp, Homo sapiens
  source 1..58: mol_type = unassigned DNA
cattcatgggtcagggcttcaaacaagaaacttcctttatgctactgatgttgtagaa

SEQ ID NO: 16795 - DNA, 58 bp, Homo sapiens
  source 1..58: mol_type = unassigned DNA
ttctacaacatcagtagcataaaggaagtttcttgtttgaagccctgacccatgaatg

SEQ ID NO: 16796 - RNA, 23 nt, Homo sapiens
  source 1..23: mol_type = unassigned RNA
gtctttaacagactgatgtctaa

SEQ ID NO: 16797 - DNA, 23 bp, Homo sapiens
  source 1..23: mol_type = unassigned DNA
gtctttaacagactgatgtctaa

SEQ ID NO: 16798 - DNA, 23 bp, Homo sapiens
  source 1..23: mol_type = unassigned DNA
ttagacatcagtctgttaaagac

SEQ ID NO: 16799 - RNA, 31 nt, Homo sapiens
  source 1..31: mol_type = unassigned RNA
ttacagcccgaggagcccaagatcagcctga

SEQ ID NO: 16800 - DNA, 31 bp, Homo sapiens
  source 1..31: mol_type = unassigned DNA
ttacagcccgaggagcccaagatcagcctga

SEQ ID NO: 16801 - DNA, 31 bp, Homo sapiens
  source 1..31: mol_type = unassigned DNA
tcaggctgatcttgggctcctcgggctgtaa

SEQ ID NO: 16802 - RNA, 36 nt, Homo sapiens
  source 1..36: mol_type = unassigned RNA
gaatcacggtgtgattctgcccaggatgggagccac

SEQ ID NO: 16803 - DNA, 36 bp, Homo sapiens
  source 1..36: mol_type = unassigned DNA
gaatcacggtgtgattctgcccaggatgggagccac

SEQ ID NO: 16804 - DNA, 36 bp, Homo sapiens
  source 1..36: mol_type = unassigned DNA
gtggctcccatcctgggcagaatcacaccgtgattc

SEQ ID NO: 16805 - RNA, 29 nt, Homo sapiens
  source 1..29: mol_type = unassigned RNA
acattgtaatgacttacatgaacttgagt

SEQ ID NO: 16806 - DNA, 29 bp, Homo sapiens
  source 1..29: mol_type = unassigned DNA
acattgtaatgacttacatgaacttgagt

SEQ ID NO: 16807 - DNA, 29 bp, Homo sapiens
  source 1..29: mol_type = unassigned DNA
actcaagttcatgtaagtcattacaatgt

SEQ ID NO: 16808 - RNA, 22 nt, Homo sapiens
  source 1..22: mol_type = unassigned RNA
aacctgtgatgatttacattga

SEQ ID NO: 16809 - DNA, 22 bp, Homo sapiens
  source 1..22: mol_type = unassigned DNA
aacctgtgatgatttacattga

SEQ ID NO: 16810 - DNA, 22 bp, Homo sapiens
  source 1..22: mol_type = unassigned DNA
tcaatgtaaatcatcacaggtt

SEQ ID NO: 16811 - RNA, 24 nt, Homo sapiens
  source 1..24: mol_type = unassigned RNA
taagttagcaggctgaggttaagt

SEQ ID NO: 16812 - DNA, 24 bp, Homo sapiens
  source 1..24: mol_type = unassigned DNA
taagttagcaggctgaggttaagt

SEQ ID NO: 16813 - DNA, 24 bp, Homo sapiens
  source 1..24: mol_type = unassigned DNA
acttaacctcagcctgctaactta

SEQ ID NO: 16814 - RNA, 30 nt, Homo sapiens
  source 1..30: mol_type = unassigned RNA
aatctttattttatttagctgtatgaaata

SEQ ID NO: 16815 - DNA, 30 bp, Homo sapiens
  source 1..30: mol_type = unassigned DNA
aatctttattttatttagctgtatgaaata

SEQ ID NO: 16816 - DNA, 30 bp, Homo sapiens
  source 1..30: mol_type = unassigned DNA
tatttcatacagctaaataaaataaagatt

SEQ ID NO: 16817 - RNA, 55 nt, Homo sapiens
  source 1..55: mol_type = unassigned RNA
ttatttaagtcattggcagaattcacttgcttgtgtttgtgaggctgcagtcccg

SEQ ID NO: 16818 - DNA, 55 bp, Homo sapiens
  source 1..55: mol_type = unassigned DNA
ttatttaagtcattggcagaattcacttgcttgtgtttgtgaggctgcagtcccg

SEQ ID NO: 16819 - DNA, 55 bp, Homo sapiens
  source 1..55: mol_type = unassigned DNA
cgggactgcagcctcacaaacacaagcaagtgaattctgccaatgacttaaataa

SEQ ID NO: 16820 - RNA, 38 nt, Homo sapiens
  source 1..38: mol_type = unassigned RNA
agtcctgtgaggacttacagggattttgcctgttttgt

SEQ ID NO: 16821 - DNA, 38 bp, Homo sapiens
  source 1..38: mol_type = unassigned DNA
agtcctgtgaggacttacagggattttgcctgttttgt

SEQ ID NO: 16822 - DNA, 38 bp, Homo sapiens
  source 1..38: mol_type = unassigned DNA
acaaaacaggcaaaatccctgtaagtcctcacaggact

SEQ ID NO: 16823 - RNA, 71 nt, Homo sapiens
  source 1..71: mol_type = unassigned RNA
tcaccccagggatacctggctgtggggagggtggggaacttactagaagggaagccgccgccaaagaacat

SEQ ID NO: 16824 - DNA, 71 bp, Homo sapiens
  source 1..71: mol_type = unassigned DNA
tcaccccagggatacctggctgtggggagggtggggaacttactagaagggaagccgccgccaaagaacat

SEQ ID NO: 16825 - DNA, 71 bp, Homo sapiens
  source 1..71: mol_type = unassigned DNA
atgttctttggcggcggcttcccttctagtaagttccccaccctccccacagccaggtatccctggggtga

SEQ ID NO: 16826 - RNA, 32 nt, Homo sapiens
  source 1..32: mol_type = unassigned RNA
ttctgtttttgtgatgaatcacattgattggt

SEQ ID NO: 16827 - DNA, 32 bp, Homo sapiens
  source 1..32: mol_type = unassigned DNA
ttctgtttttgtgatgaatcacattgattggt

SEQ ID NO: 16828 - DNA, 32 bp, Homo sapiens
  source 1..32: mol_type = unassigned DNA
accaatcaatgtgattcatcacaaaaacagaa

SEQ ID NO: 16829 - RNA, 48 nt, Homo sapiens
  source 1..48: mol_type = unassigned RNA
ttctacataacttcacctctctgcctttccctctctttctttttctgt

SEQ ID NO: 16830 - DNA, 48 bp, Homo sapiens
  source 1..48: mol_type = unassigned DNA
ttctacataacttcacctctctgcctttccctctctttctttttctgt

SEQ ID NO: 16831 - DNA, 48 bp, Homo sapiens
  source 1..48: mol_type = unassigned DNA
acagaaaaagaaagagagggaaaggcagagaggtgaagttatgtagaa

SEQ ID NO: 16832 - RNA, 72 nt, Homo sapiens
  source 1..72: mol_type = unassigned RNA
acctaaatgttgataacctcaaatctctctcttctcctactgctgtcttctgaaatgtagaacaaaacttgt

SEQ ID NO: 16833 - DNA, 72 bp, Homo sapiens
  source 1..72: mol_type = unassigned DNA
acctaaatgttgataacctcaaatctctctcttctcctactgctgtcttctgaaatgtagaacaaaacttgt

SEQ ID NO: 16834 - DNA, 72 bp, Homo sapiens
  source 1..72: mol_type = unassigned DNA
acaagttttgttctacatttcagaagacagcagtaggagaagagagagatttgaggttatcaacatttaggt

SEQ ID NO: 16835 - RNA, 36 nt, Homo sapiens
  source 1..36: mol_type = unassigned RNA
tgttttgttatatagcagtctgaatggatgaagaca

SEQ ID NO: 16836 - DNA, 36 bp, Homo sapiens
  source 1..36: mol_type = unassigned DNA
tgttttgttatatagcagtctgaatggatgaagaca

SEQ ID NO: 16837 - DNA, 36 bp, Homo sapiens
  source 1..36: mol_type = unassigned DNA
tgtcttcatccattcagactgctatataacaaaaca

SEQ ID NO: 16838 - RNA, 59 nt, Homo sapiens
  source 1..59: mol_type = unassigned RNA
tgcagtcaagccccttcccttgccctgatctctgaaagtactaatctccttgctgctcc

SEQ ID NO: 16839 - DNA, 59 bp, Homo sapiens
  source 1..59: mol_type = unassigned DNA
tgcagtcaagccccttcccttgccctgatctctgaaagtactaatctccttgctgctcc

SEQ ID NO: 16840 - DNA, 59 bp, Homo sapiens
  source 1..59: mol_type = unassigned DNA
ggagcagcaaggagattagtactttcagagatcagggcaagggaaggggcttgactgca

SEQ ID NO: 16841 - RNA, 61 nt, Homo sapiens
  source 1..61: mol_type = unassigned RNA
acactctcctacttgataactgtgctaggtctagaccagtacttctcagactctcctgtgc

SEQ ID NO: 16842 - DNA, 61 bp, Homo sapiens
  source 1..61: mol_type = unassigned DNA
acactctcctacttgataactgtgctaggtctagaccagtacttctcagactctcctgtgc

SEQ ID NO: 16843 - DNA, 61 bp, Homo sapiens
  source 1..61: mol_type = unassigned DNA
gcacaggagagtctgagaagtactggtctagacctagcacagttatcaagtaggagagtgt

SEQ ID NO: 16844 - RNA, 88 nt, Homo sapiens
  source 1..88: mol_type = unassigned RNA
aggtcctagaatggaggcttcagaactctgccctgttaccctattagactgtagctgagcaggcatccaatttgcaagacaaatgtcc

SEQ ID NO: 16845 - DNA, 88 bp, Homo sapiens
  source 1..88: mol_type = unassigned DNA
aggtcctagaatggaggcttcagaactctgccctgttaccctattagactgtagctgagcaggcatccaatttgcaagacaaatgtcc

SEQ ID NO: 16846 - DNA, 88 bp, Homo sapiens
  source 1..88: mol_type = unassigned DNA
ggacatttgtcttgcaaattggatgcctgctcagctacagtctaatagggtaacagggcagagttctgaagcctccattctaggacct

SEQ ID NO: 16847 - RNA, 30 nt, Homo sapiens
  source 1..30: mol_type = unassigned RNA
atcaactagcttgaacaaactgacattgaa

SEQ ID NO: 16848 - DNA, 30 bp, Homo sapiens
  source 1..30: mol_type = unassigned DNA
atcaactagcttgaacaaactgacattgaa

SEQ ID NO: 16849 - DNA, 30 bp, Homo sapiens
  source 1..30: mol_type = unassigned DNA
ttcaatgtcagtttgttcaagctagttgat

SEQ ID NO: 16850 - RNA, 23 nt, Homo sapiens
  source 1..23: mol_type = unassigned RNA
ctttttgtgatgaatttcatggg

SEQ ID NO: 16851 - DNA, 23 bp, Homo sapiens
  source 1..23: mol_type = unassigned DNA
ctttttgtgatgaatttcatggg

SEQ ID NO: 16852 - DNA, 23 bp, Homo sapiens
  source 1..23: mol_type = unassigned DNA
cccatgaaattcatcacaaaaag

SEQ ID NO: 16853 - RNA, 24 nt, Homo sapiens
  source 1..24: mol_type = unassigned RNA
gtttgttcgttcctcccgtctgga

SEQ ID NO: 16854 - DNA, 24 bp, Homo sapiens
  source 1..24: mol_type = unassigned DNA
gtttgttcgttcctcccgtctgga

SEQ ID NO: 16855 - DNA, 24 bp, Homo sapiens
  source 1..24: mol_type = unassigned DNA
tccagacgggaggaacgaacaaac

SEQ ID NO: 16856 - RNA, 93 nt, Homo sapiens
  source 1..93: mol_type = unassigned RNA
tccctgggtggccccaagggttgggagcccccaggtcaagtggctggtagattgtaatgacttgcttggaatcatcttgcctacaccatctgg

SEQ ID NO: 16857 - DNA, 93 bp, Homo sapiens
  source 1..93: mol_type = unassigned DNA
tccctgggtggccccaagggttgggagcccccaggtcaagtggctggtagattgtaatgacttgcttggaatcatcttgcctacaccatctgg

SEQ ID NO: 16858 - DNA, 93 bp, Homo sapiens
  source 1..93: mol_type = unassigned DNA
ccagatggtgtaggcaagatgattccaagcaagtcattacaatctaccagccacttgacctgggggctcccaacccttggggccacccaggga

SEQ ID NO: 16859 - RNA, 37 nt, Homo sapiens
  source 1..37: mol_type = unassigned RNA
tggtttttatcaactgctgttgacacactgcagaaaa

SEQ ID NO: 16860 - DNA, 37 bp, Homo sapiens
  source 1..37: mol_type = unassigned DNA
tggtttttatcaactgctgttgacacactgcagaaaa

SEQ ID NO: 16861 - DNA, 37 bp, Homo sapiens
  source 1..37: mol_type = unassigned DNA
ttttctgcagtgtgtcaacagcagttgataaaaacca

SEQ ID NO: 16862 - RNA, 24 nt, Homo sapiens
  source 1..24: mol_type = unassigned RNA
tctttggttaccacagctgtattt

SEQ ID NO: 16863 - DNA, 24 bp, Homo sapiens
  source 1..24: mol_type = unassigned DNA
tctttggttaccacagctgtattt

SEQ ID NO: 16864 - DNA, 24 bp, Homo sapiens
  source 1..24: mol_type = unassigned DNA
aaatacagctgtggtaaccaaaga

SEQ ID NO: 16865 - RNA, 26 nt, Homo sapiens
  source 1..26: mol_type = unassigned RNA
gtgtgactgagccctgctactggtat

SEQ ID NO: 16866 - DNA, 26 bp, Homo sapiens
  source 1..26: mol_type = unassigned DNA
gtgtgactgagccctgctactggtat

SEQ ID NO: 16867 - DNA, 26 bp, Homo sapiens
  source 1..26: mol_type = unassigned DNA
ataccagtagcagggctcagtcacac

SEQ ID NO: 16868 - RNA, 24 nt, Homo sapiens
  source 1..24: mol_type = unassigned RNA
ttgtggtacttgtcttggtctgtt

SEQ ID NO: 16869 - DNA, 24 bp, Homo sapiens
  source 1..24: mol_type = unassigned DNA
ttgtggtacttgtcttggtctgtt

SEQ ID NO: 16870 - DNA, 24 bp, Homo sapiens
  source 1..24: mol_type = unassigned DNA
aacagaccaagacaagtaccacaa

SEQ ID NO: 16871 - RNA, 84 nt, Homo sapiens
  source 1..84: mol_type = unassigned RNA
ctaggacctgtttactctgattccaggaccttctgacaggtgggaagcccccagctggagaagtgtgggacattttctaaaaga

SEQ ID NO: 16872 - DNA, 84 bp, Homo sapiens
  source 1..84: mol_type = unassigned DNA
ctaggacctgtttactctgattccaggaccttctgacaggtgggaagcccccagctggagaagtgtgggacattttctaaaaga

SEQ ID NO: 16873 - DNA, 84 bp, Homo sapiens
  source 1..84: mol_type = unassigned DNA
tcttttagaaaatgtcccacacttctccagctgggggcttcccacctgtcagaaggtcctggaatcagagtaaacaggtcctag

SEQ ID NO: 16874 - RNA, 61 nt, Homo sapiens
  source 1..61: mol_type = unassigned RNA
gaattccaaaatggaggagggtatgatgaggcatgtctgaccctctcctcattatggcctg

SEQ ID NO: 16875 - DNA, 61 bp, Homo sapiens
  source 1..61: mol_type = unassigned DNA
gaattccaaaatggaggagggtatgatgaggcatgtctgaccctctcctcattatggcctg

SEQ ID NO: 16876 - DNA, 61 bp, Homo sapiens
  source 1..61: mol_type = unassigned DNA
caggccataatgaggagagggtcagacatgcctcatcataccctcctccattttggaattc

SEQ ID NO: 16877 - RNA, 46 nt, Homo sapiens
  source 1..46: mol_type = unassigned RNA
ctcctgcaaaagctgcttgatcttgacctgttgctgtttgacccgg

SEQ ID NO: 16878 - DNA, 46 bp, Homo sapiens
  source 1..46: mol_type = unassigned DNA
ctcctgcaaaagctgcttgatcttgacctgttgctgtttgacccgg

SEQ ID NO: 16879 - DNA, 46 bp, Homo sapiens
  source 1..46: mol_type = unassigned DNA
ccgggtcaaacagcaacaggtcaagatcaagcagcttttgcaggag

SEQ ID NO: 16880 - RNA, 168 nt, Homo sapiens
  source 1..168: mol_type = unassigned RNA
ctcctaagttaccagcctgaggttgggattctgtgctctccagaaacatgcctcagcgtttctggacagtcagcacaggagggctccgggacgatggggcccacatcggccttatgtggccagggactgacatgaaatgcccactccgtaggagcctcctgggtgttc

SEQ ID NO: 16881 - DNA, 168 bp, Homo sapiens
  source 1..168: mol_type = unassigned DNA
ctcctaagttaccagcctgaggttgggattctgtgctctccagaaacatgcctcagcgtttctggacagtcagcacaggagggctccgggacgatggggcccacatcggccttatgtggccagggactgacatgaaatgcccactccgtaggagcctcctgggtgttc

SEQ ID NO: 16882 - DNA, 168 bp, Homo sapiens
  source 1..168: mol_type = unassigned DNA
gaacacccaggaggctcctacggagtgggcatttcatgtcagtccctggccacataaggccgatgtgggccccatcgtcccggagccctcctgtgctgactgtccagaaacgctgaggcatgtttctggagagcacagaatcccaacctcaggctggtaacttaggag

SEQ ID NO: 16883 - RNA, 44 nt, Homo sapiens
  source 1..44: mol_type = unassigned RNA
ttaggtattattttgttttgttaggtttgttgcttcagagggag

SEQ ID NO: 16884 - DNA, 44 bp, Homo sapiens
  source 1..44: mol_type = unassigned DNA
ttaggtattattttgttttgttaggtttgttgcttcagagggag

SEQ ID NO: 16885 - DNA, 44 bp, Homo sapiens
  source 1..44: mol_type = unassigned DNA
ctccctctgaagcaacaaacctaacaaaacaaaataatacctaa

SEQ ID NO: 16886 - RNA, 28 nt, Homo sapiens
  source 1..28: mol_type = unassigned RNA
atatgtattttgctgttgttgggtgaag

SEQ ID NO: 16887 - DNA, 28 bp, Homo sapiens
  source 1..28: mol_type = unassigned DNA
atatgtattttgctgttgttgggtgaag

SEQ ID NO: 16888 - DNA, 28 bp, Homo sapiens
  source 1..28: mol_type = unassigned DNA
cttcacccaacaacagcaaaatacatat

SEQ ID NO: 16889 - RNA, 32 nt, Homo sapiens
  source 1..32: mol_type = unassigned RNA
gaccaaggggcctcaggagctctgagctcaga

SEQ ID NO: 16890 - DNA, 32 bp, Homo sapiens
  source 1..32: mol_type = unassigned DNA
gaccaaggggcctcaggagctctgagctcaga

SEQ ID NO: 16891 - DNA, 32 bp, Homo sapiens
  source 1..32: mol_type = unassigned DNA
tctgagctcagagctcctgaggccccttggtc

SEQ ID NO: 16892 - RNA, 52 nt, Homo sapiens
  source 1..52: mol_type = unassigned RNA
gtaaattcccaggaagtggggtcagccagtcctgagtctatcctacagtcag

SEQ ID NO: 16893 - DNA, 52 bp, Homo sapiens
  source 1..52: mol_type = unassigned DNA
gtaaattcccaggaagtggggtcagccagtcctgagtctatcctacagtcag

SEQ ID NO: 16894 - DNA, 52 bp, Homo sapiens
  source 1..52: mol_type = unassigned DNA
ctgactgtaggatagactcaggactggctgaccccacttcctgggaatttac

SEQ ID NO: 16895 - RNA, 35 nt, Homo sapiens
  source 1..35: mol_type = unassigned RNA
agcacagtttagtactctattagactatgttgaga

SEQ ID NO: 16896 - DNA, 35 bp, Homo sapiens
  source 1..35: mol_type = unassigned DNA
agcacagtttagtactctattagactatgttgaga

SEQ ID NO: 16897 - DNA, 35 bp, Homo sapiens
  source 1..35: mol_type = unassigned DNA
tctcaacatagtctaatagagtactaaactgtgct

SEQ ID NO: 16898 - RNA, 23 nt, Homo sapiens
  source 1..23: mol_type = unassigned RNA
aagtttatcaaagtgatgctgat

SEQ ID NO: 16899 - DNA, 23 bp, Homo sapiens
  source 1..23: mol_type = unassigned DNA
aagtttatcaaagtgatgctgat

SEQ ID NO: 16900 - DNA, 23 bp, Homo sapiens
  source 1..23: mol_type = unassigned DNA
atcagcatcactttgataaactt

SEQ ID NO: 16901 - RNA, 39 nt, Homo sapiens
  source 1..39: mol_type = unassigned RNA
aactgggacatctgaggacgttgttgtatggtggtcatc

SEQ ID NO: 16902 - DNA, 39 bp, Homo sapiens
  source 1..39: mol_type = unassigned DNA
aactgggacatctgaggacgttgttgtatggtggtcatc

SEQ ID NO: 16903 - DNA, 39 bp, Homo sapiens
  source 1..39: mol_type = unassigned DNA
gatgaccaccatacaacaacgtcctcagatgtcccagtt

SEQ ID NO: 16904 - RNA, 31 nt, Homo sapiens
  source 1..31: mol_type = unassigned RNA
ggcagaggctgcaggactcattggctggctt

SEQ ID NO: 16905 - DNA, 31 bp, Homo sapiens
  source 1..31: mol_type = unassigned DNA
ggcagaggctgcaggactcattggctggctt

SEQ ID NO: 16906 - DNA, 31 bp, Homo sapiens
  source 1..31: mol_type = unassigned DNA
aagccagccaatgagtcctgcagcctctgcc

SEQ ID NO: 16907 - RNA, 86 nt, Homo sapiens
  source 1..86: mol_type = unassigned RNA
ctccgtgacctttacattggccttttcttactccctcttttgctctttctgccctcttgctcctgttatctgggactgcctcccaa

SEQ ID NO: 16908 - DNA, 86 bp, Homo sapiens
  source 1..86: mol_type = unassigned DNA
ctccgtgacctttacattggccttttcttactccctcttttgctctttctgccctcttgctcctgttatctgggactgcctcccaa

SEQ ID NO: 16909 - DNA, 86 bp, Homo sapiens
  source 1..86: mol_type = unassigned DNA
ttgggaggcagtcccagataacaggagcaagagggcagaaagagcaaaagagggagtaagaaaaggccaatgtaaaggtcacggag

SEQ ID NO: 16910 - RNA, 48 nt, Homo sapiens
  source 1..48: mol_type = unassigned RNA
aataaggagggagacagcaggaacgacaggggtcgggttcagaaacct

SEQ ID NO: 16911 - DNA, 48 bp, Homo sapiens
  source 1..48: mol_type = unassigned DNA
aataaggagggagacagcaggaacgacaggggtcgggttcagaaacct

SEQ ID NO: 16912 - DNA, 48 bp, Homo sapiens
  source 1..48: mol_type = unassigned DNA
aggtttctgaacccgacccctgtcgttcctgctgtctccctccttatt

SEQ ID NO: 16913 - RNA, 27 nt, Homo sapiens
  source 1..27: mol_type = unassigned RNA
tctaggttatcagattgactgttgctg

SEQ ID NO: 16914 - DNA, 27 bp, Homo sapiens
  source 1..27: mol_type = unassigned DNA
tctaggttatcagattgactgttgctg

SEQ ID NO: 16915 - DNA, 27 bp, Homo sapiens
  source 1..27: mol_type = unassigned DNA
cagcaacagtcaatctgataacctaga

SEQ ID NO: 16916 - RNA, 47 nt, Homo sapiens
  source 1..47: mol_type = unassigned RNA
cagctgaatcccaaaggaagctcagcagctgatggggaagtgattta

SEQ ID NO: 16917 - DNA, 47 bp, Homo sapiens
  source 1..47: mol_type = unassigned DNA
cagctgaatcccaaaggaagctcagcagctgatggggaagtgattta

SEQ ID NO: 16918 - DNA, 47 bp, Homo sapiens
  source 1..47: mol_type = unassigned DNA
taaatcacttccccatcagctgctgagcttcctttgggattcagctg

SEQ ID NO: 16919 - RNA, 22 nt, Homo sapiens
  source 1..22: mol_type = unassigned RNA
tgtttgtgatgagttaactggt

SEQ ID NO: 16920 - DNA, 22 bp, Homo sapiens
  source 1..22: mol_type = unassigned DNA
tgtttgtgatgagttaactggt

SEQ ID NO: 16921 - DNA, 22 bp, Homo sapiens
  source 1..22: mol_type = unassigned DNA
accagttaactcatcacaaaca

SEQ ID NO: 16922 - RNA, 23 nt, Homo sapiens
  source 1..23: mol_type = unassigned RNA
tagctagttatacagatgttgaa

SEQ ID NO: 16923 - DNA, 23 bp, Homo sapiens
  source 1..23: mol_type = unassigned DNA
tagctagttatacagatgttgaa

SEQ ID NO: 16924 - DNA, 23 bp, Homo sapiens
  source 1..23: mol_type = unassigned DNA
ttcaacatctgtataactagcta

SEQ ID NO: 16925 - RNA, 30 nt, Homo sapiens
  source 1..30: mol_type = unassigned RNA
agcaccatgccagagccagcgtcaggaact

SEQ ID NO: 16926 - DNA, 30 bp, Homo sapiens
  source 1..30: mol_type = unassigned DNA
agcaccatgccagagccagcgtcaggaact

SEQ ID NO: 16927 - DNA, 30 bp, Homo sapiens
  source 1..30: mol_type = unassigned DNA
agttcctgacgctggctctggcatggtgct

SEQ ID NO: 16928 - RNA, 50 nt, Homo sapiens
  source 1..50: mol_type = unassigned RNA
ggaggtaattggatcatgggagcaaacttcattctttctgctctcatgat

SEQ ID NO: 16929 - DNA, 50 bp, Homo sapiens
  source 1..50: mol_type = unassigned DNA
ggaggtaattggatcatgggagcaaacttcattctttctgctctcatgat

SEQ ID NO: 16930 - DNA, 50 bp, Homo sapiens
  source 1..50: mol_type = unassigned DNA
atcatgagagcagaaagaatgaagtttgctcccatgatccaattacctcc

SEQ ID NO: 16931 - RNA, 29 nt, Homo sapiens
  source 1..29: mol_type = unassigned RNA
tagttactttacagggtctgtaggctatg

SEQ ID NO: 16932 - DNA, 29 bp, Homo sapiens
  source 1..29: mol_type = unassigned DNA
tagttactttacagggtctgtaggctatg

SEQ ID NO: 16933 - DNA, 29 bp, Homo sapiens
  source 1..29: mol_type = unassigned DNA
catagcctacagaccctgtaaagtaacta

SEQ ID NO: 16934 - RNA, 41 nt, Homo sapiens
  source 1..41: mol_type = unassigned RNA
ttagggaacagcctgtttagttggtgattagctgaatggtg

SEQ ID NO: 16935 - DNA, 41 bp, Homo sapiens
  source 1..41: mol_type = unassigned DNA
ttagggaacagcctgtttagttggtgattagctgaatggtg

SEQ ID NO: 16936 - DNA, 41 bp, Homo sapiens
  source 1..41: mol_type = unassigned DNA
caccattcagctaatcaccaactaaacaggctgttccctaa

SEQ ID NO: 16937 - RNA, 25 nt, Homo sapiens
  source 1..25: mol_type = unassigned RNA
atttgttctttctggtctcttggag

SEQ ID NO: 16938 - DNA, 25 bp, Homo sapiens
  source 1..25: mol_type = unassigned DNA
atttgttctttctggtctcttggag

SEQ ID NO: 16939 - DNA, 25 bp, Homo sapiens
  source 1..25: mol_type = unassigned DNA
ctccaagagaccagaaagaacaaat

SEQ ID NO: 16940 - RNA, 55 nt, Homo sapiens
  source 1..55: mol_type = unassigned RNA
actctcttctcttagtgcaggtagaactccaggtcagatgtgtctgagtttgctt

SEQ ID NO: 16941 - DNA, 55 bp, Homo sapiens
  source 1..55: mol_type = unassigned DNA
actctcttctcttagtgcaggtagaactccaggtcagatgtgtctgagtttgctt

SEQ ID NO: 16942 - DNA, 55 bp, Homo sapiens
  source 1..55: mol_type = unassigned DNA
aagcaaactcagacacatctgacctggagttctacctgcactaagagaagagagt

SEQ ID NO: 16943 - RNA, 66 nt, Homo sapiens
  source 1..66: mol_type = unassigned RNA
tttccttgaagaggtccttcacatccctcgttagctgtattcctaggttaacatactaattttgaa

SEQ ID NO: 16944 - DNA, 66 bp, Homo sapiens
  source 1..66: mol_type = unassigned DNA
tttccttgaagaggtccttcacatccctcgttagctgtattcctaggttaacatactaattttgaa

SEQ ID NO: 16945 - DNA, 66 bp, Homo sapiens
  source 1..66: mol_type = unassigned DNA
ttcaaaattagtatgttaacctaggaatacagctaacgagggatgtgaaggacctcttcaaggaaa

SEQ ID NO: 16946 - RNA, 28 nt, Homo sapiens
  source 1..28: mol_type = unassigned RNA
agaggcttgaagtgtggggagaacttgg

SEQ ID NO: 16947 - DNA, 28 bp, Homo sapiens
  source 1..28: mol_type = unassigned DNA
agaggcttgaagtgtggggagaacttgg

SEQ ID NO: 16948 - DNA, 28 bp, Homo sapiens
  source 1..28: mol_type = unassigned DNA
ccaagttctccccacacttcaagcctct

SEQ ID NO: 16949 - RNA, 30 nt, Homo sapiens
  source 1..30: mol_type = unassigned RNA
attacataccttatccgacatgattttgtt

SEQ ID NO: 16950 - DNA, 30 bp, Homo sapiens
  source 1..30: mol_type = unassigned DNA
attacataccttatccgacatgattttgtt

SEQ ID NO: 16951 - DNA, 30 bp, Homo sapiens
  source 1..30: mol_type = unassigned DNA
aacaaaatcatgtcggataaggtatgtaat

SEQ ID NO: 16952 - RNA, 30 nt, Homo sapiens
  source 1..30: mol_type = unassigned RNA
gctgtgtgaactgctccgctggaaggagaa

SEQ ID NO: 16953 - DNA, 30 bp, Homo sapiens
  source 1..30: mol_type = unassigned DNA
gctgtgtgaactgctccgctggaaggagaa

SEQ ID NO: 16954 - DNA, 30 bp, Homo sapiens
  source 1..30: mol_type = unassigned DNA
ttctccttccagcggagcagttcacacagc

SEQ ID NO: 16955 - RNA, 32 nt, Homo sapiens
  source 1..32: mol_type = unassigned RNA
taagtttatctgactgaagtggacctgagaat

SEQ ID NO: 16956 - DNA, 32 bp, Homo sapiens
  source 1..32: mol_type = unassigned DNA
taagtttatctgactgaagtggacctgagaat

SEQ ID NO: 16957 - DNA, 32 bp, Homo sapiens
  source 1..32: mol_type = unassigned DNA
attctcaggtccacttcagtcagataaactta

SEQ ID NO: 16958 - RNA, 48 nt, Homo sapiens
  source 1..48: mol_type = unassigned RNA
aaagaggtgaaatcttggacttgccttcatggactgtcctatttcgct

SEQ ID NO: 16959 - DNA, 48 bp, Homo sapiens
  source 1..48: mol_type = unassigned DNA
aaagaggtgaaatcttggacttgccttcatggactgtcctatttcgct

SEQ ID NO: 16960 - DNA, 48 bp, Homo sapiens
  source 1..48: mol_type = unassigned DNA
agcgaaataggacagtccatgaaggcaagtccaagatttcacctcttt

SEQ ID NO: 16961 - RNA, 22 nt, Homo sapiens
  source 1..22: mol_type = unassigned RNA
tagcttcacacactttgttgat

SEQ ID NO: 16962 - DNA, 22 bp, Homo sapiens
  source 1..22: mol_type = unassigned DNA
tagcttcacacactttgttgat

SEQ ID NO: 16963 - DNA, 22 bp, Homo sapiens
  source 1..22: mol_type = unassigned DNA
atcaacaaagtgtgtgaagcta

SEQ ID NO: 16964 - RNA, 87 nt, Homo sapiens
  source 1..87: mol_type = unassigned RNA
gcctggattcagccttttcatttgtctctgtctgtctcatctgtctctctctgtgtgtctctttatttctccctgtaagccatcctt

SEQ ID NO: 16965 - DNA, 87 bp, Homo sapiens
  source 1..87: mol_type = unassigned DNA
gcctggattcagccttttcatttgtctctgtctgtctcatctgtctctctctgtgtgtctctttatttctccctgtaagccatcctt

SEQ ID NO: 16966 - DNA, 87 bp, Homo sapiens
  source 1..87: mol_type = unassigned DNA
aaggatggcttacagggagaaataaagagacacacagagagagacagatgagacagacagagacaaatgaaaaggctgaatccaggc

SEQ ID NO: 16967 - RNA, 25 nt, Homo sapiens
  source 1..25: mol_type = unassigned RNA
tgaagcaggtacagggcaatgactc

SEQ ID NO: 16968 - DNA, 25 bp, Homo sapiens
  source 1..25: mol_type = unassigned DNA
tgaagcaggtacagggcaatgactc

SEQ ID NO: 16969 - DNA, 25 bp, Homo sapiens
  source 1..25: mol_type = unassigned DNA
gagtcattgccctgtacctgcttca

SEQ ID NO: 16970 - RNA, 23 nt, Homo sapiens
  source 1..23: mol_type = unassigned RNA
ttttagtgcctactgctgttgat

SEQ ID NO: 16971 - DNA, 23 bp, Homo sapiens
  source 1..23: mol_type = unassigned DNA
ttttagtgcctactgctgttgat

SEQ ID NO: 16972 - DNA, 23 bp, Homo sapiens
  source 1..23: mol_type = unassigned DNA
atcaacagcagtaggcactaaaa

SEQ ID NO: 16973 - RNA, 141 nt, Homo sapiens
  source 1..141: mol_type = unassigned RNA
gttttttttcttatcttcctcaggtgcagctttcagtgctggattgacaggaggaatcagtacttctatagccgtcttctgtcatgaactgccacatgaattaggtaatataaccttaaaaattttaccagatttcatcaa

SEQ ID NO: 16974 - DNA, 141 bp, Homo sapiens
  source 1..141: mol_type = unassigned DNA
gttttttttcttatcttcctcaggtgcagctttcagtgctggattgacaggaggaatcagtacttctatagccgtcttctgtcatgaactgccacatgaattaggtaatataaccttaaaaattttaccagatttcatcaa

SEQ ID NO: 16975 - DNA, 141 bp, Homo sapiens
  source 1..141: mol_type = unassigned DNA
ttgatgaaatctggtaaaatttttaaggttatattacctaattcatgtggcagttcatgacagaagacggctatagaagtactgattcctcctgtcaatccagcactgaaagctgcacctgaggaagataagaaaaaaaac

SEQ ID NO: 16976 - RNA, 24 nt, Homo sapiens
  source 1..24: mol_type = unassigned RNA
ttagctaaaagtttgtatagtttt

SEQ ID NO: 16977 - DNA, 24 bp, Homo sapiens
  source 1..24: mol_type = unassigned DNA
ttagctaaaagtttgtatagtttt

SEQ ID NO: 16978 - DNA, 24 bp, Homo sapiens
  source 1..24: mol_type = unassigned DNA
aaaactatacaaacttttagctaa

SEQ ID NO: 16979 - RNA, 34 nt, Homo sapiens
  source 1..34: mol_type = unassigned RNA
agttaagctcagggggctatgataatcctagtgg

SEQ ID NO: 16980 - DNA, 34 bp, Homo sapiens
  source 1..34: mol_type = unassigned DNA
agttaagctcagggggctatgataatcctagtgg

SEQ ID NO: 16981 - DNA, 34 bp, Homo sapiens
  source 1..34: mol_type = unassigned DNA
ccactaggattatcatagccccctgagcttaact

SEQ ID NO: 16982 - RNA, 78 nt, Homo sapiens
  source 1..78: mol_type = unassigned RNA
cactttgtgacccaggacacccattcatcctctctatgcctcgttctctcatctgtaatatgccggcaatgatggaat

SEQ ID NO: 16983 - DNA, 78 bp, Homo sapiens
  source 1..78: mol_type = unassigned DNA
cactttgtgacccaggacacccattcatcctctctatgcctcgttctctcatctgtaatatgccggcaatgatggaat

SEQ ID NO: 16984 - DNA, 78 bp, Homo sapiens
  source 1..78: mol_type = unassigned DNA
attccatcattgccggcatattacagatgagagaacgaggcatagagaggatgaatgggtgtcctgggtcacaaagtg

SEQ ID NO: 16985 - RNA, 115 nt, Homo sapiens
  source 1..115: mol_type = unassigned RNA
gaagtgaacttgacccagcagttacggaccagttctacatgaaagatggtgttactgcaaagaatgtcactcatgagagtggaatttgtgacctgattccaggttctgtcactga

SEQ ID NO: 16986 - DNA, 115 bp, Homo sapiens
  source 1..115: mol_type = unassigned DNA
gaagtgaacttgacccagcagttacggaccagttctacatgaaagatggtgttactgcaaagaatgtcactcatgagagtggaatttgtgacctgattccaggttctgtcactga

SEQ ID NO: 16987 - DNA, 115 bp, Homo sapiens
  source 1..115: mol_type = unassigned DNA
tcagtgacagaacctggaatcaggtcacaaattccactctcatgagtgacattctttgcagtaacaccatctttcatgtagaactggtccgtaactgctgggtcaagttcacttc

SEQ ID NO: 16988 - RNA, 63 nt, Homo sapiens
  source 1..63: mol_type = unassigned RNA
ttctaggaagaactgctggttgggcttctgatacgtgctagcactggagaaatcactgaaatt

SEQ ID NO: 16989 - DNA, 63 bp, Homo sapiens
  source 1..63: mol_type = unassigned DNA
ttctaggaagaactgctggttgggcttctgatacgtgctagcactggagaaatcactgaaatt

SEQ ID NO: 16990 - DNA, 63 bp, Homo sapiens
  source 1..63: mol_type = unassigned DNA
aatttcagtgatttctccagtgctagcacgtatcagaagcccaaccagcagttcttcctagaa

SEQ ID NO: 16991 - RNA, 33 nt, Homo sapiens
  source 1..33: mol_type = unassigned RNA
ctttgcagatttgaacttcacttgacctggcaa

SEQ ID NO: 16992 - DNA, 33 bp, Homo sapiens
  source 1..33: mol_type = unassigned DNA
ctttgcagatttgaacttcacttgacctggcaa

SEQ ID NO: 16993 - DNA, 33 bp, Homo sapiens
  source 1..33: mol_type = unassigned DNA
ttgccaggtcaagtgaagttcaaatctgcaaag

SEQ ID NO: 16994 - RNA, 31 nt, Homo sapiens
  source 1..31: mol_type = unassigned RNA
tcttgcagatgcccaggcggaggtgcgcttg

SEQ ID NO: 16995 - DNA, 31 bp, Homo sapiens
  source 1..31: mol_type = unassigned DNA
tcttgcagatgcccaggcggaggtgcgcttg

SEQ ID NO: 16996 - DNA, 31 bp, Homo sapiens
  source 1..31: mol_type = unassigned DNA
caagcgcacctccgcctgggcatctgcaaga

SEQ ID NO: 16997 - RNA, 43 nt, Homo sapiens
  source 1..43: mol_type = unassigned RNA
gagcccatgatgatgtactgaggctccagatgtcaatcttggg

SEQ ID NO: 16998 - DNA, 43 bp, Homo sapiens
  source 1..43: mol_type = unassigned DNA
gagcccatgatgatgtactgaggctccagatgtcaatcttggg

SEQ ID NO: 16999 - DNA, 43 bp, Homo sapiens
  source 1..43: mol_type = unassigned DNA
cccaagattgacatctggagcctcagtacatcatcatgggctc

SEQ ID NO: 17000 - RNA, 58 nt, Homo sapiens
  source 1..58: mol_type = unassigned RNA
cccactctgcattgccagaaacttttccaggtgcagaaatgtatcactgaacaaaaca

SEQ ID NO: 17001 - DNA, 58 bp, Homo sapiens
  source 1..58: mol_type = unassigned DNA
cccactctgcattgccagaaacttttccaggtgcagaaatgtatcactgaacaaaaca

SEQ ID NO: 17002 - DNA, 58 bp, Homo sapiens
  source 1..58: mol_type = unassigned DNA
tgttttgttcagtgatacatttctgcacctggaaaagtttctggcaatgcagagtggg

SEQ ID NO: 17003 - RNA, 25 nt, Homo sapiens
  source 1..25: mol_type = unassigned RNA
tgtggagtcggttttatgggtttgg

SEQ ID NO: 17004 - DNA, 25 bp, Homo sapiens
  source 1..25: mol_type = unassigned DNA
tgtggagtcggttttatgggtttgg

SEQ ID NO: 17005 - DNA, 25 bp, Homo sapiens
  source 1..25: mol_type = unassigned DNA
ccaaacccataaaaccgactccaca

SEQ ID NO: 17006 - RNA, 23 nt, Homo sapiens
  source 1..23: mol_type = unassigned RNA
taatggagtagattatatatttt

SEQ ID NO: 17007 - DNA, 23 bp, Homo sapiens
  source 1..23: mol_type = unassigned DNA
taatggagtagattatatatttt

SEQ ID NO: 17008 - DNA, 23 bp, Homo sapiens
  source 1..23: mol_type = unassigned DNA
aaaatatataatctactccatta

SEQ ID NO: 17009 - RNA, 25 nt, Homo sapiens
  source 1..25: mol_type = unassigned RNA
ctgagatactgggtgctaaggcttc

SEQ ID NO: 17010 - DNA, 25 bp, Homo sapiens
  source 1..25: mol_type = unassigned DNA
ctgagatactgggtgctaaggcttc

SEQ ID NO: 17011 - DNA, 25 bp, Homo sapiens
  source 1..25: mol_type = unassigned DNA
gaagccttagcacccagtatctcag

SEQ ID NO: 17012 - RNA, 35 nt, Homo sapiens
  source 1..35: mol_type = unassigned RNA
catctgtgtttaggaatactgggctgtaggtttct

SEQ ID NO: 17013 - DNA, 35 bp, Homo sapiens
  source 1..35: mol_type = unassigned DNA
catctgtgtttaggaatactgggctgtaggtttct

SEQ ID NO: 17014 - DNA, 35 bp, Homo sapiens
  source 1..35: mol_type = unassigned DNA
agaaacctacagcccagtattcctaaacacagatg

SEQ ID NO: 17015 - RNA, 24 nt, Homo sapiens
  source 1..24: mol_type = unassigned RNA
tggggtattagtgtgtgtgaaatt

SEQ ID NO: 17016 - DNA, 24 bp, Homo sapiens
  source 1..24: mol_type = unassigned DNA
tggggtattagtgtgtgtgaaatt

SEQ ID NO: 17017 - DNA, 24 bp, Homo sapiens
  source 1..24: mol_type = unassigned DNA
aatttcacacacactaatacccca

SEQ ID NO: 17018 - RNA, 23 nt, Homo sapiens
  source 1..23: mol_type = unassigned RNA
tagcttaactcaatgatgttaat

SEQ ID NO: 17019 - DNA, 23 bp, Homo sapiens
  source 1..23: mol_type = unassigned DNA
tagcttaactcaatgatgttaat

SEQ ID NO: 17020 - DNA, 23 bp, Homo sapiens
  source 1..23: mol_type = unassigned DNA
attaacatcattgagttaagcta

SEQ ID NO: 17021 - RNA, 59 nt, Homo sapiens
  source 1..59: mol_type = unassigned RNA
atcaatgtgccaggcaagtccctgtcctcacggagctcagtgcgggtggggagacaggc

SEQ ID NO: 17022 - DNA, 59 bp, Homo sapiens
  source 1..59: mol_type = unassigned DNA
atcaatgtgccaggcaagtccctgtcctcacggagctcagtgcgggtggggagacaggc

SEQ ID NO: 17023 - DNA, 59 bp, Homo sapiens
  source 1..59: mol_type = unassigned DNA
gcctgtctccccacccgcactgagctccgtgaggacagggacttgcctggcacattgat

SEQ ID NO: 17024 - RNA, 25 nt, Homo sapiens
  source 1..25: mol_type = unassigned RNA
catacggcacagctagaattcattc

SEQ ID NO: 17025 - DNA, 25 bp, Homo sapiens
  source 1..25: mol_type = unassigned DNA
catacggcacagctagaattcattc

SEQ ID NO: 17026 - DNA, 25 bp, Homo sapiens
  source 1..25: mol_type = unassigned DNA
gaatgaattctagctgtgccgtatg

SEQ ID NO: 17027 - RNA, 31 nt, Homo sapiens
  source 1..31: mol_type = unassigned RNA
gtcacttgttttcagactgtggttgactaag

SEQ ID NO: 17028 - DNA, 31 bp, Homo sapiens
  source 1..31: mol_type = unassigned DNA
gtcacttgttttcagactgtggttgactaag

SEQ ID NO: 17029 - DNA, 31 bp, Homo sapiens
  source 1..31: mol_type = unassigned DNA
cttagtcaaccacagtctgaaaacaagtgac

SEQ ID NO: 17030 - RNA, 62 nt, Homo sapiens
  source 1..62: mol_type = unassigned RNA
aactaattgaacaaactgacgttgattgtaggatttatagtaatcctaacacaatggtatac

SEQ ID NO: 17031 - DNA, 62 bp, Homo sapiens
  source 1..62: mol_type = unassigned DNA
aactaattgaacaaactgacgttgattgtaggatttatagtaatcctaacacaatggtatac

SEQ ID NO: 17032 - DNA, 62 bp, Homo sapiens
  source 1..62: mol_type = unassigned DNA
gtataccattgtgttaggattactataaatcctacaatcaacgtcagtttgttcaattagtt

SEQ ID NO: 17033 - RNA, 32 nt, Homo sapiens
  source 1..32: mol_type = unassigned RNA
gtctattgctcagactgatcttgagcttttgg

SEQ ID NO: 17034 - DNA, 32 bp, Homo sapiens
  source 1..32: mol_type = unassigned DNA
gtctattgctcagactgatcttgagcttttgg

SEQ ID NO: 17035 - DNA, 32 bp, Homo sapiens
  source 1..32: mol_type = unassigned DNA
ccaaaagctcaagatcagtctgagcaatagac

SEQ ID NO: 17036 - RNA, 189 nt, Homo sapiens
  source 1..189: mol_type = unassigned RNA
ctttgctttccatttgttccctagggattttgatgcaaatctctatctgtgtgaagaagcttttggcctcctgccttttaatacatttggaaggctttcagatactctgcttttttatgcttacatattcgttctgtccatcacagtgattgtagcattcgttgttgcctttcataatctcaggtatgg

SEQ ID NO: 17037 - DNA, 189 bp, Homo sapiens
  source 1..189: mol_type = unassigned DNA
ctttgctttccatttgttccctagggattttgatgcaaatctctatctgtgtgaagaagcttttggcctcctgccttttaatacatttggaaggctttcagatactctgcttttttatgcttacatattcgttctgtccatcacagtgattgtagcattcgttgttgcctttcataatctcaggtatgg

SEQ ID NO: 17038 - DNA, 189 bp, Homo sapiens
  source 1..189: mol_type = unassigned DNA
ccatacctgagattatgaaaggcaacaacgaatgctacaatcactgtgatggacagaacgaatatgtaagcataaaaaagcagagtatctgaaagccttccaaatgtattaaaaggcaggaggccaaaagcttcttcacacagatagagatttgcatcaaaatccctagggaacaaatggaaagcaaag

SEQ ID NO: 17039 - RNA, 30 nt, Homo sapiens
  source 1..30: mol_type = unassigned RNA
agttaccaagaatgtgactgtcaagagtga

SEQ ID NO: 17040 - DNA, 30 bp, Homo sapiens
  source 1..30: mol_type = unassigned DNA
agttaccaagaatgtgactgtcaagagtga

SEQ ID NO: 17041 - DNA, 30 bp, Homo sapiens
  source 1..30: mol_type = unassigned DNA
tcactcttgacagtcacattcttggtaact

SEQ ID NO: 17042 - RNA, 44 nt, Homo sapiens
  source 1..44: mol_type = unassigned RNA
agtttgtaatcacttacctgggtctgccatgcaatgaaccaacc

SEQ ID NO: 17043 - DNA, 44 bp, Homo sapiens
  source 1..44: mol_type = unassigned DNA
agtttgtaatcacttacctgggtctgccatgcaatgaaccaacc

SEQ ID NO: 17044 - DNA, 44 bp, Homo sapiens
  source 1..44: mol_type = unassigned DNA
ggttggttcattgcatggcagacccaggtaagtgattacaaact

SEQ ID NO: 17045 - RNA, 48 nt, Homo sapiens
  source 1..48: mol_type = unassigned RNA
agttccatgacatcagagactgactacatcttatacactgatgttgct

SEQ ID NO: 17046 - DNA, 48 bp, Homo sapiens
  source 1..48: mol_type = unassigned DNA
agttccatgacatcagagactgactacatcttatacactgatgttgct

SEQ ID NO: 17047 - DNA, 48 bp, Homo sapiens
  source 1..48: mol_type = unassigned DNA
agcaacatcagtgtataagatgtagtcagtctctgatgtcatggaact

SEQ ID NO: 17048 - RNA, 24 nt, Homo sapiens
  source 1..24: mol_type = unassigned RNA
cttagttctttctgctccttgaca

SEQ ID NO: 17049 - DNA, 24 bp, Homo sapiens
  source 1..24: mol_type = unassigned DNA
cttagttctttctgctccttgaca

SEQ ID NO: 17050 - DNA, 24 bp, Homo sapiens
  source 1..24: mol_type = unassigned DNA
tgtcaaggagcagaaagaactaag

SEQ ID NO: 17051 - RNA, 24 nt, Homo sapiens
  source 1..24: mol_type = unassigned RNA
ggaaattatcagagtgatgatgta

SEQ ID NO: 17052 - DNA, 24 bp, Homo sapiens
  source 1..24: mol_type = unassigned DNA
ggaaattatcagagtgatgatgta

SEQ ID NO: 17053 - DNA, 24 bp, Homo sapiens
  source 1..24: mol_type = unassigned DNA
tacatcatcactctgataatttcc

SEQ ID NO: 17054 - RNA, 25 nt, Homo sapiens
  source 1..25: mol_type = unassigned RNA
ttctcttctctgactgctgtagcta

SEQ ID NO: 17055 - DNA, 25 bp, Homo sapiens
  source 1..25: mol_type = unassigned DNA
ttctcttctctgactgctgtagcta

SEQ ID NO: 17056 - DNA, 25 bp, Homo sapiens
  source 1..25: mol_type = unassigned DNA
tagctacagcagtcagagaagagaa

SEQ ID NO: 17057 - RNA, 23 nt, Homo sapiens
  source 1..23: mol_type = unassigned RNA
gtcccttctccactgcttttgat

SEQ ID NO: 17058 - DNA, 23 bp, Homo sapiens
  source 1..23: mol_type = unassigned DNA
gtcccttctccactgcttttgat

SEQ ID NO: 17059 - DNA, 23 bp, Homo sapiens
  source 1..23: mol_type = unassigned DNA
atcaaaagcagtggagaagggac

SEQ ID NO: 17060 - RNA, 33 nt, Homo sapiens
  source 1..33: mol_type = unassigned RNA
gagaataccgcagaccaaatggcttagaaatta

SEQ ID NO: 17061 - DNA, 33 bp, Homo sapiens
  source 1..33: mol_type = unassigned DNA
gagaataccgcagaccaaatggcttagaaatta

SEQ ID NO: 17062 - DNA, 33 bp, Homo sapiens
  source 1..33: mol_type = unassigned DNA
taatttctaagccatttggtctgcggtattctc

SEQ ID NO: 17063 - RNA, 26 nt, Homo sapiens
  source 1..26: mol_type = unassigned RNA
gtggggaataccaggttgtaggctat

SEQ ID NO: 17064 - DNA, 26 bp, Homo sapiens
  source 1..26: mol_type = unassigned DNA
gtggggaataccaggttgtaggctat

SEQ ID NO: 17065 - DNA, 26 bp, Homo sapiens
  source 1..26: mol_type = unassigned DNA
atagcctacaacctggtattccccac

SEQ ID NO: 17066 - RNA, 86 nt, Homo sapiens
  source 1..86: mol_type = unassigned RNA
tcagtataaagggacttgtaggcaggtgaggggttttgtttgcattgttgagggctatgagaagccattggattgtgtgtgtaaag

SEQ ID NO: 17067 - DNA, 86 bp, Homo sapiens
  source 1..86: mol_type = unassigned DNA
tcagtataaagggacttgtaggcaggtgaggggttttgtttgcattgttgagggctatgagaagccattggattgtgtgtgtaaag

SEQ ID NO: 17068 - DNA, 86 bp, Homo sapiens
  source 1..86: mol_type = unassigned DNA
ctttacacacacaatccaatggcttctcatagccctcaacaatgcaaacaaaacccctcacctgcctacaagtccctttatactga

SEQ ID NO: 17069 - RNA, 30 nt, Homo sapiens
  source 1..30: mol_type = unassigned RNA
ggtcagggctggccttcctctgtgcatcac

SEQ ID NO: 17070 - DNA, 30 bp, Homo sapiens
  source 1..30: mol_type = unassigned DNA
ggtcagggctggccttcctctgtgcatcac

SEQ ID NO: 17071 - DNA, 30 bp, Homo sapiens
  source 1..30: mol_type = unassigned DNA
gtgatgcacagaggaaggccagccctgacc

SEQ ID NO: 17072 - RNA, 76 nt, Homo sapiens
  source 1..76: mol_type = unassigned RNA
tttactcttacatataagcagacaatcaagatttagcagatcaactaaagggctgatctgataataatctccaaag

SEQ ID NO: 17073 - DNA, 76 bp, Homo sapiens
  source 1..76: mol_type = unassigned DNA
tttactcttacatataagcagacaatcaagatttagcagatcaactaaagggctgatctgataataatctccaaag

SEQ ID NO: 17074 - DNA, 76 bp, Homo sapiens
  source 1..76: mol_type = unassigned DNA
ctttggagattattatcagatcagccctttagttgatctgctaaatcttgattgtctgcttatatgtaagagtaaa

SEQ ID NO: 17075 - RNA, 29 nt, Homo sapiens
  source 1..29: mol_type = unassigned RNA
tatgcttgactgagccctgctcctaggcc

SEQ ID NO: 17076 - DNA, 29 bp, Homo sapiens
  source 1..29: mol_type = unassigned DNA
tatgcttgactgagccctgctcctaggcc

SEQ ID NO: 17077 - DNA, 29 bp, Homo sapiens
  source 1..29: mol_type = unassigned DNA
ggcctaggagcagggctcagtcaagcata

SEQ ID NO: 17078 - RNA, 117 nt, Homo sapiens
  source 1..117: mol_type = unassigned RNA
cagattgagcaaacagtgcatgtgctctgagaaggctaaggattcatactctgagagcccagtaaattaacttattcagtgggatggtaggctcagtacctgggtatgtcaaatggt

SEQ ID NO: 17079 - DNA, 117 bp, Homo sapiens
  source 1..117: mol_type = unassigned DNA
cagattgagcaaacagtgcatgtgctctgagaaggctaaggattcatactctgagagcccagtaaattaacttattcagtgggatggtaggctcagtacctgggtatgtcaaatggt

SEQ ID NO: 17080 - DNA, 117 bp, Homo sapiens
  source 1..117: mol_type = unassigned DNA
accatttgacatacccaggtactgagcctaccatcccactgaataagttaatttactgggctctcagagtatgaatccttagccttctcagagcacatgcactgtttgctcaatctg

SEQ ID NO: 17081 - RNA, 126 nt, Homo sapiens
  source 1..126: mol_type = unassigned RNA
attaaaagtccatggtgcctgtaggcaggttcaattgacaattaacaaccctactagactcccgggctccagacctactagatgcccgggctccacgcaaagcgggctcaggcaggccatatgact

SEQ ID NO: 17082 - DNA, 126 bp, Homo sapiens
  source 1..126: mol_type = unassigned DNA
attaaaagtccatggtgcctgtaggcaggttcaattgacaattaacaaccctactagactcccgggctccagacctactagatgcccgggctccacgcaaagcgggctcaggcaggccatatgact

SEQ ID NO: 17083 - DNA, 126 bp, Homo sapiens
  source 1..126: mol_type = unassigned DNA
agtcatatggcctgcctgagcccgctttgcgtggagcccgggcatctagtaggtctggagcccgggagtctagtagggttgttaattgtcaattgaacctgcctacaggcaccatggacttttaat

SEQ ID NO: 17084 - RNA, 82 nt, Homo sapiens
  source 1..82: mol_type = unassigned RNA
tttgccatgaaagagatgggaactccagatgtgcgcattgataccaggctcatcaaagctgtctgggccaaaggaataaaga

SEQ ID NO: 17085 - DNA, 82 bp, Homo sapiens
  source 1..82: mol_type = unassigned DNA
tttgccatgaaagagatgggaactccagatgtgcgcattgataccaggctcatcaaagctgtctgggccaaaggaataaaga

SEQ ID NO: 17086 - DNA, 82 bp, Homo sapiens
  source 1..82: mol_type = unassigned DNA
tctttattcctttggcccagacagctttgatgagcctggtatcaatgcgcacatctggagttcccatctctttcatggcaaa

SEQ ID NO: 17087 - RNA, 23 nt, Homo sapiens
  source 1..23: mol_type = unassigned RNA
aatccttcctggtgcagaactgt

SEQ ID NO: 17088 - DNA, 23 bp, Homo sapiens
  source 1..23: mol_type = unassigned DNA
aatccttcctggtgcagaactgt

SEQ ID NO: 17089 - DNA, 23 bp, Homo sapiens
  source 1..23: mol_type = unassigned DNA
acagttctgcaccaggaaggatt

SEQ ID NO: 17090 - RNA, 66 nt, Homo sapiens
  source 1..66: mol_type = unassigned RNA
tgacagtgaccatgatgaggaggtttcccagcagagtcgtcatgtacaccaagagtaggaaaagaa

SEQ ID NO: 17091 - DNA, 66 bp, Homo sapiens
  source 1..66: mol_type = unassigned DNA
tgacagtgaccatgatgaggaggtttcccagcagagtcgtcatgtacaccaagagtaggaaaagaa

SEQ ID NO: 17092 - DNA, 66 bp, Homo sapiens
  source 1..66: mol_type = unassigned DNA
ttcttttcctactcttggtgtacatgacgactctgctgggaaacctcctcatcatggtcactgtca

SEQ ID NO: 17093 - RNA, 24 nt, Homo sapiens
  source 1..24: mol_type = unassigned RNA
tctttgattatatatgtgtatgtc

SEQ ID NO: 17094 - DNA, 24 bp, Homo sapiens
  source 1..24: mol_type = unassigned DNA
tctttgattatatatgtgtatgtc

SEQ ID NO: 17095 - DNA, 24 bp, Homo sapiens
  source 1..24: mol_type = unassigned DNA
gacatacacatatataatcaaaga

SEQ ID NO: 17096 - RNA, 72 nt, Homo sapiens
  source 1..72: mol_type = unassigned RNA
tttcttctcccactgctgtttctccagttcacccttggtggcaactcatctgctgttcccatctttgcttca

SEQ ID NO: 17097 - DNA, 72 bp, Homo sapiens
  source 1..72: mol_type = unassigned DNA
tttcttctcccactgctgtttctccagttcacccttggtggcaactcatctgctgttcccatctttgcttca

SEQ ID NO: 17098 - DNA, 72 bp, Homo sapiens
  source 1..72: mol_type = unassigned DNA
tgaagcaaagatgggaacagcagatgagttgccaccaagggtgaactggagaaacagcagtgggagaagaaa

SEQ ID NO: 17099 - RNA, 44 nt, Homo sapiens
  source 1..44: mol_type = unassigned RNA
gctttttctagaactcttttcccgggtctgtaggtttaaaacat

SEQ ID NO: 17100 - DNA, 44 bp, Homo sapiens
  source 1..44: mol_type = unassigned DNA
gctttttctagaactcttttcccgggtctgtaggtttaaaacat

SEQ ID NO: 17101 - DNA, 44 bp, Homo sapiens
  source 1..44: mol_type = unassigned DNA
atgttttaaacctacagacccgggaaaagagttctagaaaaagc

SEQ ID NO: 17102 - RNA, 23 nt, Homo sapiens
  source 1..23: mol_type = unassigned RNA
tacattgtcagctgatgtttaac

SEQ ID NO: 17103 - DNA, 23 bp, Homo sapiens
  source 1..23: mol_type = unassigned DNA
tacattgtcagctgatgtttaac

SEQ ID NO: 17104 - DNA, 23 bp, Homo sapiens
  source 1..23: mol_type = unassigned DNA
gttaaacatcagctgacaatgta

SEQ ID NO: 17105 - RNA, 35 nt, Homo sapiens
  source 1..35: mol_type = unassigned RNA
tggggcattgcctaatggagctgggagaagaaggc

SEQ ID NO: 17106 - DNA, 35 bp, Homo sapiens
  source 1..35: mol_type = unassigned DNA
tggggcattgcctaatggagctgggagaagaaggc

SEQ ID NO: 17107 - DNA, 35 bp, Homo sapiens
  source 1..35: mol_type = unassigned DNA
gccttcttctcccagctccattaggcaatgcccca

SEQ ID NO: 17108 - RNA, 32 nt, Homo sapiens
  source 1..32: mol_type = unassigned RNA
cgtggagcagcgacttagacatggtgctgaca

SEQ ID NO: 17109 - DNA, 32 bp, Homo sapiens
  source 1..32: mol_type = unassigned DNA
cgtggagcagcgacttagacatggtgctgaca

SEQ ID NO: 17110 - DNA, 32 bp, Homo sapiens
  source 1..32: mol_type = unassigned DNA
tgtcagcaccatgtctaagtcgctgctccacg

SEQ ID NO: 17111 - RNA, 23 nt, Homo sapiens
  source 1..23: mol_type = unassigned RNA
tttctagtgaagacttacatgaa

SEQ ID NO: 17112 - DNA, 23 bp, Homo sapiens
  source 1..23: mol_type = unassigned DNA
tttctagtgaagacttacatgaa

SEQ ID NO: 17113 - DNA, 23 bp, Homo sapiens
  source 1..23: mol_type = unassigned DNA
ttcatgtaagtcttcactagaaa

SEQ ID NO: 17114 - RNA, 52 nt, Homo sapiens
  source 1..52: mol_type = unassigned RNA
cacaacagaatccgtcacttaactgacctctctgaattaaactgaggtatga

SEQ ID NO: 17115 - DNA, 52 bp, Homo sapiens
  source 1..52: mol_type = unassigned DNA
cacaacagaatccgtcacttaactgacctctctgaattaaactgaggtatga

SEQ ID NO: 17116 - DNA, 52 bp, Homo sapiens
  source 1..52: mol_type = unassigned DNA
tcatacctcagtttaattcagagaggtcagttaagtgacggattctgttgtg

SEQ ID NO: 17117 - RNA, 31 nt, Homo sapiens
  source 1..31: mol_type = unassigned RNA
tggtttatcagctgactttgaaaaaatgaag

SEQ ID NO: 17118 - DNA, 31 bp, Homo sapiens
  source 1..31: mol_type = unassigned DNA
tggtttatcagctgactttgaaaaaatgaag

SEQ ID NO: 17119 - DNA, 31 bp, Homo sapiens
  source 1..31: mol_type = unassigned DNA
cttcattttttcaaagtcagctgataaacca

SEQ ID NO: 17120 - RNA, 29 nt, Homo sapiens
  source 1..29: mol_type = unassigned RNA
gtagtttactttatcacactgaggatgtt

SEQ ID NO: 17121 - DNA, 29 bp, Homo sapiens
  source 1..29: mol_type = unassigned DNA
gtagtttactttatcacactgaggatgtt

SEQ ID NO: 17122 - DNA, 29 bp, Homo sapiens
  source 1..29: mol_type = unassigned DNA
aacatcctcagtgtgataaagtaaactac

SEQ ID NO: 17123 - RNA, 156 nt, Homo sapiens
  source 1..156: mol_type = unassigned RNA
aactttttactttgaggcaatggtaggatcacatgcagttgtaagaaacgattagcactgtatgatgatgtgtacctgtagtcctaatgatgtaggacaattgcttgagaccaagagtttgaatccagcctaggcaatgtagagagacccttatac

SEQ ID NO: 17124 - DNA, 156 bp, Homo sapiens
  source 1..156: mol_type = unassigned DNA
aactttttactttgaggcaatggtaggatcacatgcagttgtaagaaacgattagcactgtatgatgatgtgtacctgtagtcctaatgatgtaggacaattgcttgagaccaagagtttgaatccagcctaggcaatgtagagagacccttatac

SEQ ID NO: 17125 - DNA, 156 bp, Homo sapiens
  source 1..156: mol_type = unassigned DNA
gtataagggtctctctacattgcctaggctggattcaaactcttggtctcaagcaattgtcctacatcattaggactacaggtacacatcatcatacagtgctaatcgtttcttacaactgcatgtgatcctaccattgcctcaaagtaaaaagtt

SEQ ID NO: 17126 - RNA, 29 nt, Homo sapiens
  source 1..29: mol_type = unassigned RNA
aggtgcaagtgaccatgtgcatcggcgcg

SEQ ID NO: 17127 - DNA, 29 bp, Homo sapiens
  source 1..29: mol_type = unassigned DNA
aggtgcaagtgaccatgtgcatcggcgcg

SEQ ID NO: 17128 - DNA, 29 bp, Homo sapiens
  source 1..29: mol_type = unassigned DNA
cgcgccgatgcacatggtcacttgcacct

SEQ ID NO: 17129 - RNA, 34 nt, Homo sapiens
  source 1..34: mol_type = unassigned RNA
catgccggaacttgtcttggaaccggtagccaga

SEQ ID NO: 17130 - DNA, 34 bp, Homo sapiens
  source 1..34: mol_type = unassigned DNA
catgccggaacttgtcttggaaccggtagccaga

SEQ ID NO: 17131 - DNA, 34 bp, Homo sapiens
  source 1..34: mol_type = unassigned DNA
tctggctaccggttccaagacaagttccggcatg

SEQ ID NO: 17132 - RNA, 25 nt, Homo sapiens
  source 1..25: mol_type = unassigned RNA
caaaagtgcttttcgccaggtagtc

SEQ ID NO: 17133 - DNA, 25 bp, Homo sapiens
  source 1..25: mol_type = unassigned DNA
caaaagtgcttttcgccaggtagtc

SEQ ID NO: 17134 - DNA, 25 bp, Homo sapiens
  source 1..25: mol_type = unassigned DNA
gactacctggcgaaaagcacttttg

SEQ ID NO: 17135 - RNA, 59 nt, Homo sapiens
  source 1..59: mol_type = unassigned RNA
tctattctcctgctgctggtgattttagctttgatgccttctgtgacccaacctgttca

SEQ ID NO: 17136 - DNA, 59 bp, Homo sapiens
  source 1..59: mol_type = unassigned DNA
tctattctcctgctgctggtgattttagctttgatgccttctgtgacccaacctgttca

SEQ ID NO: 17137 - DNA, 59 bp, Homo sapiens
  source 1..59: mol_type = unassigned DNA
tgaacaggttgggtcacagaaggcatcaaagctaaaatcaccagcagcaggagaataga

SEQ ID NO: 17138 - RNA, 27 nt, Homo sapiens
  source 1..27: mol_type = unassigned RNA
taataagattatcagacttttcttgat

SEQ ID NO: 17139 - DNA, 27 bp, Homo sapiens
  source 1..27: mol_type = unassigned DNA
taataagattatcagacttttcttgat

SEQ ID NO: 17140 - DNA, 27 bp, Homo sapiens
  source 1..27: mol_type = unassigned DNA
atcaagaaaagtctgataatcttatta

SEQ ID NO: 17141 - RNA, 55 nt, Homo sapiens
  source 1..55: mol_type = unassigned RNA
ataaattactcttaaaactgaacttttttctttgttccatgaggtcattcttaat

SEQ ID NO: 17142 - DNA, 55 bp, Homo sapiens
  source 1..55: mol_type = unassigned DNA
ataaattactcttaaaactgaacttttttctttgttccatgaggtcattcttaat

SEQ ID NO: 17143 - DNA, 55 bp, Homo sapiens
  source 1..55: mol_type = unassigned DNA
attaagaatgacctcatggaacaaagaaaaaagttcagttttaagagtaatttat

SEQ ID NO: 17144 - RNA, 26 nt, Homo sapiens
  source 1..26: mol_type = unassigned RNA
ttctctatcaaagagatgttgacagg

SEQ ID NO: 17145 - DNA, 26 bp, Homo sapiens
  source 1..26: mol_type = unassigned DNA
ttctctatcaaagagatgttgacagg

SEQ ID NO: 17146 - DNA, 26 bp, Homo sapiens
  source 1..26: mol_type = unassigned DNA
cctgtcaacatctctttgatagagaa

SEQ ID NO: 17147 - RNA, 25 nt, Homo sapiens
  source 1..25: mol_type = unassigned RNA
actccgcaatggtggaaatcacaaa

SEQ ID NO: 17148 - DNA, 25 bp, Homo sapiens
  source 1..25: mol_type = unassigned DNA
actccgcaatggtggaaatcacaaa

SEQ ID NO: 17149 - DNA, 25 bp, Homo sapiens
  source 1..25: mol_type = unassigned DNA
tttgtgatttccaccattgcggagt

SEQ ID NO: 17150 - RNA, 31 nt, Homo sapiens
  source 1..31: mol_type = unassigned RNA
tggcctctggagaaagatagagtagctcgct

SEQ ID NO: 17151 - DNA, 31 bp, Homo sapiens
  source 1..31: mol_type = unassigned DNA
tggcctctggagaaagatagagtagctcgct

SEQ ID NO: 17152 - DNA, 31 bp, Homo sapiens
  source 1..31: mol_type = unassigned DNA
agcgagctactctatctttctccagaggcca

SEQ ID NO: 17153 - RNA, 28 nt, Homo sapiens
  source 1..28: mol_type = unassigned RNA
caagctgctttggacaactgacaatatg

SEQ ID NO: 17154 - DNA, 28 bp, Homo sapiens
  source 1..28: mol_type = unassigned DNA
caagctgctttggacaactgacaatatg

SEQ ID NO: 17155 - DNA, 28 bp, Homo sapiens
  source 1..28: mol_type = unassigned DNA
catattgtcagttgtccaaagcagcttg

SEQ ID NO: 17156 - RNA, 23 nt, Homo sapiens
  source 1..23: mol_type = unassigned RNA
tacgttttcagagtgatgtggga

SEQ ID NO: 17157 - DNA, 23 bp, Homo sapiens
  source 1..23: mol_type = unassigned DNA
tacgttttcagagtgatgtggga

SEQ ID NO: 17158 - DNA, 23 bp, Homo sapiens
  source 1..23: mol_type = unassigned DNA
tcccacatcactctgaaaacgta

SEQ ID NO: 17159 - RNA, 30 nt, Homo sapiens
  source 1..30: mol_type = unassigned RNA
tgtttcttactttgaacctggaggcagcct

SEQ ID NO: 17160 - DNA, 30 bp, Homo sapiens
  source 1..30: mol_type = unassigned DNA
tgtttcttactttgaacctggaggcagcct

SEQ ID NO: 17161 - DNA, 30 bp, Homo sapiens
  source 1..30: mol_type = unassigned DNA
aggctgcctccaggttcaaagtaagaaaca

SEQ ID NO: 17162 - RNA, 26 nt, Homo sapiens
  source 1..26: mol_type = unassigned RNA
atcttgtttgtgatgagttagatgtc

SEQ ID NO: 17163 - DNA, 26 bp, Homo sapiens
  source 1..26: mol_type = unassigned DNA
atcttgtttgtgatgagttagatgtc

SEQ ID NO: 17164 - DNA, 26 bp, Homo sapiens
  source 1..26: mol_type = unassigned DNA
gacatctaactcatcacaaacaagat

SEQ ID NO: 17165 - RNA, 89 nt, Homo sapiens
  source 1..89: mol_type = unassigned RNA
ctgagtatgagctttttccaggacggcagtttattttcagctgtaggctttcagcgacactggctttgcttctttctgctgccgtgaaa

SEQ ID NO: 17166 - DNA, 89 bp, Homo sapiens
  source 1..89: mol_type = unassigned DNA
ctgagtatgagctttttccaggacggcagtttattttcagctgtaggctttcagcgacactggctttgcttctttctgctgccgtgaaa

SEQ ID NO: 17167 - DNA, 89 bp, Homo sapiens
  source 1..89: mol_type = unassigned DNA
tttcacggcagcagaaagaagcaaagccagtgtcgctgaaagcctacagctgaaaataaactgccgtcctggaaaaagctcatactcag

SEQ ID NO: 17168 - RNA, 54 nt, Homo sapiens
  source 1..54: mol_type = unassigned RNA
aatctttatcagggtgattttgacttcgtcctaccctctggatggcagtggggc

SEQ ID NO: 17169 - DNA, 54 bp, Homo sapiens
  source 1..54: mol_type = unassigned DNA
aatctttatcagggtgattttgacttcgtcctaccctctggatggcagtggggc

SEQ ID NO: 17170 - DNA, 54 bp, Homo sapiens
  source 1..54: mol_type = unassigned DNA
gccccactgccatccagagggtaggacgaagtcaaaatcaccctgataaagatt

SEQ ID NO: 17171 - RNA, 26 nt, Homo sapiens
  source 1..26: mol_type = unassigned RNA
cagtaacatcacacattgatgttgag

SEQ ID NO: 17172 - DNA, 26 bp, Homo sapiens
  source 1..26: mol_type = unassigned DNA
cagtaacatcacacattgatgttgag

SEQ ID NO: 17173 - DNA, 26 bp, Homo sapiens
  source 1..26: mol_type = unassigned DNA
ctcaacatcaatgtgtgatgttactg

SEQ ID NO: 17174 - RNA, 69 nt, Homo sapiens
  source 1..69: mol_type = unassigned RNA
tcagtttcctcagtctcccactacatcatcttctgttctgcctttatccgatgatgttgcttccttctt

SEQ ID NO: 17175 - DNA, 69 bp, Homo sapiens
  source 1..69: mol_type = unassigned DNA
tcagtttcctcagtctcccactacatcatcttctgttctgcctttatccgatgatgttgcttccttctt

SEQ ID NO: 17176 - DNA, 69 bp, Homo sapiens
  source 1..69: mol_type = unassigned DNA
aagaaggaagcaacatcatcggataaaggcagaacagaagatgatgtagtgggagactgaggaaactga

SEQ ID NO: 17177 - RNA, 32 nt, Homo sapiens
  source 1..32: mol_type = unassigned RNA
gcatcacagagaagttgggtttaggacaggta

SEQ ID NO: 17178 - DNA, 32 bp, Homo sapiens
  source 1..32: mol_type = unassigned DNA
gcatcacagagaagttgggtttaggacaggta

SEQ ID NO: 17179 - DNA, 32 bp, Homo sapiens
  source 1..32: mol_type = unassigned DNA
tacctgtcctaaacccaacttctctgtgatgc

SEQ ID NO: 17180 - RNA, 25 nt, Homo sapiens
  source 1..25: mol_type = unassigned RNA
tagctattacacactgatgtttact

SEQ ID NO: 17181 - DNA, 25 bp, Homo sapiens
  source 1..25: mol_type = unassigned DNA
tagctattacacactgatgtttact

SEQ ID NO: 17182 - DNA, 25 bp, Homo sapiens
  source 1..25: mol_type = unassigned DNA
agtaaacatcagtgtgtaatagcta

SEQ ID NO: 17183 - RNA, 30 nt, Homo sapiens
  source 1..30: mol_type = unassigned RNA
aaaattagtgactttggacagatggcttca

SEQ ID NO: 17184 - DNA, 30 bp, Homo sapiens
  source 1..30: mol_type = unassigned DNA
aaaattagtgactttggacagatggcttca

SEQ ID NO: 17185 - DNA, 30 bp, Homo sapiens
  source 1..30: mol_type = unassigned DNA
tgaagccatctgtccaaagtcactaatttt

SEQ ID NO: 17186 - RNA, 44 nt, Homo sapiens
  source 1..44: mol_type = unassigned RNA
tttgcattttcatttttgttttttctgatctcttgaacaatccc

SEQ ID NO: 17187 - DNA, 44 bp, Homo sapiens
  source 1..44: mol_type = unassigned DNA
tttgcattttcatttttgttttttctgatctcttgaacaatccc

SEQ ID NO: 17188 - DNA, 44 bp, Homo sapiens
  source 1..44: mol_type = unassigned DNA
gggattgttcaagagatcagaaaaaacaaaaatgaaaatgcaaa

SEQ ID NO: 17189 - RNA, 23 nt, Homo sapiens
  source 1..23: mol_type = unassigned RNA
gagcttccattttaacaactatt

SEQ ID NO: 17190 - DNA, 23 bp, Homo sapiens
  source 1..23: mol_type = unassigned DNA
gagcttccattttaacaactatt

SEQ ID NO: 17191 - DNA, 23 bp, Homo sapiens
  source 1..23: mol_type = unassigned DNA
aatagttgttaaaatggaagctc

SEQ ID NO: 17192 - RNA, 32 nt, Homo sapiens
  source 1..32: mol_type = unassigned RNA
aagatgagatttcggtggggacacagaaaaac

SEQ ID NO: 17193 - DNA, 32 bp, Homo sapiens
  source 1..32: mol_type = unassigned DNA
aagatgagatttcggtggggacacagaaaaac

SEQ ID NO: 17194 - DNA, 32 bp, Homo sapiens
  source 1..32: mol_type = unassigned DNA
gtttttctgtgtccccaccgaaatctcatctt

SEQ ID NO: 17195 - RNA, 52 nt, Homo sapiens
  source 1..52: mol_type = unassigned RNA
gttcttagcatgaccgcttgacctgcagagcccctgttatagaactcatttt

SEQ ID NO: 17196 - DNA, 52 bp, Homo sapiens
  source 1..52: mol_type = unassigned DNA
gttcttagcatgaccgcttgacctgcagagcccctgttatagaactcatttt

SEQ ID NO: 17197 - DNA, 52 bp, Homo sapiens
  source 1..52: mol_type = unassigned DNA
aaaatgagttctataacaggggctctgcaggtcaagcggtcatgctaagaac

SEQ ID NO: 17198 - RNA, 27 nt, Homo sapiens
  source 1..27: mol_type = unassigned RNA
gatatttcagttgggacacaataaaac

SEQ ID NO: 17199 - DNA, 27 bp, Homo sapiens
  source 1..27: mol_type = unassigned DNA
gatatttcagttgggacacaataaaac

SEQ ID NO: 17200 - DNA, 27 bp, Homo sapiens
  source 1..27: mol_type = unassigned DNA
gttttattgtgtcccaactgaaatatc

SEQ ID NO: 17201 - RNA, 30 nt, Homo sapiens
  source 1..30: mol_type = unassigned RNA
gcccctgagggacctggacactggcggtaa

SEQ ID NO: 17202 - DNA, 30 bp, Homo sapiens
  source 1..30: mol_type = unassigned DNA
gcccctgagggacctggacactggcggtaa

SEQ ID NO: 17203 - DNA, 30 bp, Homo sapiens
  source 1..30: mol_type = unassigned DNA
ttaccgccagtgtccaggtccctcaggggc

SEQ ID NO: 17204 - RNA, 30 nt, Homo sapiens
  source 1..30: mol_type = unassigned RNA
ctacctctgtaccatacataagggctcgct

SEQ ID NO: 17205 - DNA, 30 bp, Homo sapiens
  source 1..30: mol_type = unassigned DNA
ctacctctgtaccatacataagggctcgct

SEQ ID NO: 17206 - DNA, 30 bp, Homo sapiens
  source 1..30: mol_type = unassigned DNA
agcgagcccttatgtatggtacagaggtag

SEQ ID NO: 17207 - RNA, 24 nt, Homo sapiens
  source 1..24: mol_type = unassigned RNA
tcttatcatattttattttaatat

SEQ ID NO: 17208 - DNA, 24 bp, Homo sapiens
  source 1..24: mol_type = unassigned DNA
tcttatcatattttattttaatat

SEQ ID NO: 17209 - DNA, 24 bp, Homo sapiens
  source 1..24: mol_type = unassigned DNA
atattaaaataaaatatgataaga

SEQ ID NO: 17210 - RNA, 43 nt, Homo sapiens
  source 1..43: mol_type = unassigned RNA
cagtatgttctggtccctctggaaccctgtaatccatttggga

SEQ ID NO: 17211 - DNA, 43 bp, Homo sapiens
  source 1..43: mol_type = unassigned DNA
cagtatgttctggtccctctggaaccctgtaatccatttggga

SEQ ID NO: 17212 - DNA, 43 bp, Homo sapiens
  source 1..43: mol_type = unassigned DNA
tcccaaatggattacagggttccagagggaccagaacatactg

SEQ ID NO: 17213 - RNA, 27 nt, Homo sapiens
  source 1..27: mol_type = unassigned RNA
cttgtcgatctgtctgatgttgacagt

SEQ ID NO: 17214 - DNA, 27 bp, Homo sapiens
  source 1..27: mol_type = unassigned DNA
cttgtcgatctgtctgatgttgacagt

SEQ ID NO: 17215 - DNA, 27 bp, Homo sapiens
  source 1..27: mol_type = unassigned DNA
actgtcaacatcagacagatcgacaag

SEQ ID NO: 17216 - RNA, 29 nt, Homo sapiens
  source 1..29: mol_type = unassigned RNA
ggcgattttggttacctgctgtatgtgtc

SEQ ID NO: 17217 - DNA, 29 bp, Homo sapiens
  source 1..29: mol_type = unassigned DNA
ggcgattttggttacctgctgtatgtgtc

SEQ ID NO: 17218 - DNA, 29 bp, Homo sapiens
  source 1..29: mol_type = unassigned DNA
gacacatacagcaggtaaccaaaatcgcc

SEQ ID NO: 17219 - RNA, 75 nt, Homo sapiens
  source 1..75: mol_type = unassigned RNA
tttttttttttcctgaggactgatctgaggactgatttaatgatgattgtcgaagctgagctcccagatgaggct

SEQ ID NO: 17220 - DNA, 75 bp, Homo sapiens
  source 1..75: mol_type = unassigned DNA
tttttttttttcctgaggactgatctgaggactgatttaatgatgattgtcgaagctgagctcccagatgaggct

SEQ ID NO: 17221 - DNA, 75 bp, Homo sapiens
  source 1..75: mol_type = unassigned DNA
agcctcatctgggagctcagcttcgacaatcatcattaaatcagtcctcagatcagtcctcaggaaaaaaaaaaa

SEQ ID NO: 17222 - RNA, 53 nt, Homo sapiens
  source 1..53: mol_type = unassigned RNA
cttttgaatgttgaagttgcattgtagaagtttagaagctctggctatgggtt

SEQ ID NO: 17223 - DNA, 53 bp, Homo sapiens
  source 1..53: mol_type = unassigned DNA
cttttgaatgttgaagttgcattgtagaagtttagaagctctggctatgggtt

SEQ ID NO: 17224 - DNA, 53 bp, Homo sapiens
  source 1..53: mol_type = unassigned DNA
aacccatagccagagcttctaaacttctacaatgcaacttcaacattcaaaag

SEQ ID NO: 17225 - RNA, 29 nt, Homo sapiens
  source 1..29: mol_type = unassigned RNA
atatggcacttttagaactcagtttcctc

SEQ ID NO: 17226 - DNA, 29 bp, Homo sapiens
  source 1..29: mol_type = unassigned DNA
atatggcacttttagaactcagtttcctc

SEQ ID NO: 17227 - DNA, 29 bp, Homo sapiens
  source 1..29: mol_type = unassigned DNA
gaggaaactgagttctaaaagtgccatat

SEQ ID NO: 17228 - RNA, 52 nt, Homo sapiens
  source 1..52: mol_type = unassigned RNA
aaaatatttaaagagagtaaggtgactgtggagagttgggtataagagggaa

SEQ ID NO: 17229 - DNA, 52 bp, Homo sapiens
  source 1..52: mol_type = unassigned DNA
aaaatatttaaagagagtaaggtgactgtggagagttgggtataagagggaa

SEQ ID NO: 17230 - DNA, 52 bp, Homo sapiens
  source 1..52: mol_type = unassigned DNA
ttccctcttatacccaactctccacagtcaccttactctctttaaatatttt

SEQ ID NO: 17231 - RNA, 65 nt, Homo sapiens
  source 1..65: mol_type = unassigned RNA
aattataaatggtagaattcacagggtcccctgaactcctctgaaccaggaaggaacacatgtgg

SEQ ID NO: 17232 - DNA, 65 bp, Homo sapiens
  source 1..65: mol_type = unassigned DNA
aattataaatggtagaattcacagggtcccctgaactcctctgaaccaggaaggaacacatgtgg

SEQ ID NO: 17233 - DNA, 65 bp, Homo sapiens
  source 1..65: mol_type = unassigned DNA
ccacatgtgttccttcctggttcagaggagttcaggggaccctgtgaattctaccatttataatt

SEQ ID NO: 17234 - RNA, 31 nt, Homo sapiens
  source 1..31: mol_type = unassigned RNA
tatcctgtgtgacgtgggatgtgtggcttcg

SEQ ID NO: 17235 - DNA, 31 bp, Homo sapiens
  source 1..31: mol_type = unassigned DNA
tatcctgtgtgacgtgggatgtgtggcttcg

SEQ ID NO: 17236 - DNA, 31 bp, Homo sapiens
  source 1..31: mol_type = unassigned DNA
cgaagccacacatcccacgtcacacaggata

SEQ ID NO: 17237 - RNA, 56 nt, Homo sapiens
  source 1..56: mol_type = unassigned RNA
ctggctacagctgtggctatggctctggctacagctgtggctatggctctggctct

SEQ ID NO: 17238 - DNA, 56 bp, Homo sapiens
  source 1..56: mol_type = unassigned DNA
ctggctacagctgtggctatggctctggctacagctgtggctatggctctggctct

SEQ ID NO: 17239 - DNA, 56 bp, Homo sapiens
  source 1..56: mol_type = unassigned DNA
agagccagagccatagccacagctgtagccagagccatagccacagctgtagccag

SEQ ID NO: 17240 - RNA, 43 nt, Homo sapiens
  source 1..43: mol_type = unassigned RNA
ggagatattgttgcttgtgatgactcacgtggttgggtggaga

SEQ ID NO: 17241 - DNA, 43 bp, Homo sapiens
  source 1..43: mol_type = unassigned DNA
ggagatattgttgcttgtgatgactcacgtggttgggtggaga

SEQ ID NO: 17242 - DNA, 43 bp, Homo sapiens
  source 1..43: mol_type = unassigned DNA
tctccacccaaccacgtgagtcatcacaagcaacaatatctcc

SEQ ID NO: 17243 - RNA, 30 nt, Homo sapiens
  source 1..30: mol_type = unassigned RNA
gcttttgcaattggagaacttagaagaagt

SEQ ID NO: 17244 - DNA, 30 bp, Homo sapiens
  source 1..30: mol_type = unassigned DNA
gcttttgcaattggagaacttagaagaagt

SEQ ID NO: 17245 - DNA, 30 bp, Homo sapiens
  source 1..30: mol_type = unassigned DNA
acttcttctaagttctccaattgcaaaagc

SEQ ID NO: 17246 - RNA, 80 nt, Homo sapiens
  source 1..80: mol_type = unassigned RNA
cctgggcttcctgcttgctgaaacagggtgatggttctcacccccacagggctgttctgcaggtgggggagggtggggca

SEQ ID NO: 17247 - DNA, 80 bp, Homo sapiens
  source 1..80: mol_type = unassigned DNA
cctgggcttcctgcttgctgaaacagggtgatggttctcacccccacagggctgttctgcaggtgggggagggtggggca

SEQ ID NO: 17248 - DNA, 80 bp, Homo sapiens
  source 1..80: mol_type = unassigned DNA
tgccccaccctcccccacctgcagaacagccctgtgggggtgagaaccatcaccctgtttcagcaagcaggaagcccagg

SEQ ID NO: 17249 - RNA, 30 nt, Homo sapiens
  source 1..30: mol_type = unassigned RNA
catcctctgccaggtgggagctgccttccc

SEQ ID NO: 17250 - DNA, 30 bp, Homo sapiens
  source 1..30: mol_type = unassigned DNA
catcctctgccaggtgggagctgccttccc

SEQ ID NO: 17251 - DNA, 30 bp, Homo sapiens
  source 1..30: mol_type = unassigned DNA
gggaaggcagctcccacctggcagaggatg

SEQ ID NO: 17252 - RNA, 151 nt, Homo sapiens
  source 1..151: mol_type = unassigned RNA
caccccttctgttcttcatgaccctctgttgtcttcttgtttcacaggcaacttcagcaacagcaggcagaattggaagtgcaccagagagatggattgtcatcgtatgacttatcccaggtgagtttctggaaaaccctttccctgttgg

SEQ ID NO: 17253 - DNA, 151 bp, Homo sapiens
  source 1..151: mol_type = unassigned DNA
caccccttctgttcttcatgaccctctgttgtcttcttgtttcacaggcaacttcagcaacagcaggcagaattggaagtgcaccagagagatggattgtcatcgtatgacttatcccaggtgagtttctggaaaaccctttccctgttgg

SEQ ID NO: 17254 - DNA, 151 bp, Homo sapiens
  source 1..151: mol_type = unassigned DNA
ccaacagggaaagggttttccagaaactcacctgggataagtcatacgatgacaatccatctctctggtgcacttccaattctgcctgctgttgctgaagttgcctgtgaaacaagaagacaacagagggtcatgaagaacagaaggggtg

SEQ ID NO: 17255 - RNA, 54 nt, Homo sapiens
  source 1..54: mol_type = unassigned RNA
cacccaaaaacatggagccttccaaaatctctgggctaattgtgaacatttcaa

SEQ ID NO: 17256 - DNA, 54 bp, Homo sapiens
  source 1..54: mol_type = unassigned DNA
cacccaaaaacatggagccttccaaaatctctgggctaattgtgaacatttcaa

SEQ ID NO: 17257 - DNA, 54 bp, Homo sapiens
  source 1..54: mol_type = unassigned DNA
ttgaaatgttcacaattagcccagagattttggaaggctccatgtttttgggtg

SEQ ID NO: 17258 - RNA, 44 nt, Homo sapiens
  source 1..44: mol_type = unassigned RNA
ctatattctccctccatgggcaatggtagaattcttccctgtgc

SEQ ID NO: 17259 - DNA, 44 bp, Homo sapiens
  source 1..44: mol_type = unassigned DNA
ctatattctccctccatgggcaatggtagaattcttccctgtgc

SEQ ID NO: 17260 - DNA, 44 bp, Homo sapiens
  source 1..44: mol_type = unassigned DNA
gcacagggaagaattctaccattgcccatggagggagaatatag

SEQ ID NO: 17261 - RNA, 37 nt, Homo sapiens
  source 1..37: mol_type = unassigned RNA
cagctgatcagagtcttttgcaattggagaacttaga

SEQ ID NO: 17262 - DNA, 37 bp, Homo sapiens
  source 1..37: mol_type = unassigned DNA
cagctgatcagagtcttttgcaattggagaacttaga

SEQ ID NO: 17263 - DNA, 37 bp, Homo sapiens
  source 1..37: mol_type = unassigned DNA
tctaagttctccaattgcaaaagactctgatcagctg

SEQ ID NO: 17264 - RNA, 31 nt, Homo sapiens
  source 1..31: mol_type = unassigned RNA
ctagaagtatcatctggattgttgtgaaacg

SEQ ID NO: 17265 - DNA, 31 bp, Homo sapiens
  source 1..31: mol_type = unassigned DNA
ctagaagtatcatctggattgttgtgaaacg

SEQ ID NO: 17266 - DNA, 31 bp, Homo sapiens
  source 1..31: mol_type = unassigned DNA
cgtttcacaacaatccagatgatacttctag

SEQ ID NO: 17267 - RNA, 36 nt, Homo sapiens
  source 1..36: mol_type = unassigned RNA
aactattaacagcctgctgttgaccagaagccccac

SEQ ID NO: 17268 - DNA, 36 bp, Homo sapiens
  source 1..36: mol_type = unassigned DNA
aactattaacagcctgctgttgaccagaagccccac

SEQ ID NO: 17269 - DNA, 36 bp, Homo sapiens
  source 1..36: mol_type = unassigned DNA
gtggggcttctggtcaacagcaggctgttaatagtt

SEQ ID NO: 17270 - RNA, 52 nt, Homo sapiens
  source 1..52: mol_type = unassigned RNA
ggcttctcttggctgtagcagtttttcagactgttcttgatgatattgacat

SEQ ID NO: 17271 - DNA, 52 bp, Homo sapiens
  source 1..52: mol_type = unassigned DNA
ggcttctcttggctgtagcagtttttcagactgttcttgatgatattgacat

SEQ ID NO: 17272 - DNA, 52 bp, Homo sapiens
  source 1..52: mol_type = unassigned DNA
atgtcaatatcatcaagaacagtctgaaaaactgctacagccaagagaagcc

SEQ ID NO: 17273 - RNA, 30 nt, Homo sapiens
  source 1..30: mol_type = unassigned RNA
agcacctgaattctcaatgcagggtctaaa

SEQ ID NO: 17274 - DNA, 30 bp, Homo sapiens
  source 1..30: mol_type = unassigned DNA
agcacctgaattctcaatgcagggtctaaa

SEQ ID NO: 17275 - DNA, 30 bp, Homo sapiens
  source 1..30: mol_type = unassigned DNA
tttagaccctgcattgagaattcaggtgct

SEQ ID NO: 17276 - RNA, 38 nt, Homo sapiens
  source 1..38: mol_type = unassigned RNA
gagtagggaacagacagcgcactgatataattcacaga

SEQ ID NO: 17277 - DNA, 38 bp, Homo sapiens
  source 1..38: mol_type = unassigned DNA
gagtagggaacagacagcgcactgatataattcacaga

SEQ ID NO: 17278 - DNA, 38 bp, Homo sapiens
  source 1..38: mol_type = unassigned DNA
tctgtgaattatatcagtgcgctgtctgttccctactc

SEQ ID NO: 17279 - RNA, 56 nt, Homo sapiens
  source 1..56: mol_type = unassigned RNA
gagtacctctggttaacaaaggtcaagcatattgccaccacctcagctggatctcg

SEQ ID NO: 17280 - DNA, 56 bp, Homo sapiens
  source 1..56: mol_type = unassigned DNA
gagtacctctggttaacaaaggtcaagcatattgccaccacctcagctggatctcg

SEQ ID NO: 17281 - DNA, 56 bp, Homo sapiens
  source 1..56: mol_type = unassigned DNA
cgagatccagctgaggtggtggcaatatgcttgacctttgttaaccagaggtactc

SEQ ID NO: 17282 - RNA, 73 nt, Homo sapiens
  source 1..73: mol_type = unassigned RNA
attagctgcttccatgttttggctggcttgtaataggaatttcacttgtttctttgttatctcgttttatgta

SEQ ID NO: 17283 - DNA, 73 bp, Homo sapiens
  source 1..73: mol_type = unassigned DNA
attagctgcttccatgttttggctggcttgtaataggaatttcacttgtttctttgttatctcgttttatgta

SEQ ID NO: 17284 - DNA, 73 bp, Homo sapiens
  source 1..73: mol_type = unassigned DNA
tacataaaacgagataacaaagaaacaagtgaaattcctattacaagccagccaaaacatggaagcagctaat

SEQ ID NO: 17285 - RNA, 24 nt, Homo sapiens
  source 1..24: mol_type = unassigned RNA
atacccaacacactgatgttaaca

SEQ ID NO: 17286 - DNA, 24 bp, Homo sapiens
  source 1..24: mol_type = unassigned DNA
atacccaacacactgatgttaaca

SEQ ID NO: 17287 - DNA, 24 bp, Homo sapiens
  source 1..24: mol_type = unassigned DNA
tgttaacatcagtgtgttgggtat

SEQ ID NO: 17288 - RNA, 49 nt, Homo sapiens
  source 1..49: mol_type = unassigned RNA
ctgctaaatggtttgcactctgactccttctctaaacatcacggtttat

SEQ ID NO: 17289 - DNA, 49 bp, Homo sapiens
  source 1..49: mol_type = unassigned DNA
ctgctaaatggtttgcactctgactccttctctaaacatcacggtttat

SEQ ID NO: 17290 - DNA, 49 bp, Homo sapiens
  source 1..49: mol_type = unassigned DNA
ataaaccgtgatgtttagagaaggagtcagagtgcaaaccatttagcag

SEQ ID NO: 17291 - RNA, 42 nt, Homo sapiens
  source 1..42: mol_type = unassigned RNA
taccaagttcttaactctgctggctctggggcactggacata

SEQ ID NO: 17292 - DNA, 42 bp, Homo sapiens
  source 1..42: mol_type = unassigned DNA
taccaagttcttaactctgctggctctggggcactggacata

SEQ ID NO: 17293 - DNA, 42 bp, Homo sapiens
  source 1..42: mol_type = unassigned DNA
tatgtccagtgccccagagccagcagagttaagaacttggta

SEQ ID NO: 17294 - RNA, 34 nt, Homo sapiens
  source 1..34: mol_type = unassigned RNA
atctgagcaccttgtcaactgaggttgatattaa

SEQ ID NO: 17295 - DNA, 34 bp, Homo sapiens
  source 1..34: mol_type = unassigned DNA
atctgagcaccttgtcaactgaggttgatattaa

SEQ ID NO: 17296 - DNA, 34 bp, Homo sapiens
  source 1..34: mol_type = unassigned DNA
ttaatatcaacctcagttgacaaggtgctcagat

SEQ ID NO: 17297 - RNA, 30 nt, Homo sapiens
  source 1..30: mol_type = unassigned RNA
taactgctctgtctagaactcccagcacta

SEQ ID NO: 17298 - DNA, 30 bp, Homo sapiens
  source 1..30: mol_type = unassigned DNA
taactgctctgtctagaactcccagcacta

SEQ ID NO: 17299 - DNA, 30 bp, Homo sapiens
  source 1..30: mol_type = unassigned DNA
tagtgctgggagttctagacagagcagtta

SEQ ID NO: 17300 - RNA, 22 nt, Homo sapiens
  source 1..22: mol_type = unassigned RNA
attttttaatgacttacatgaa

SEQ ID NO: 17301 - DNA, 22 bp, Homo sapiens
  source 1..22: mol_type = unassigned DNA
attttttaatgacttacatgaa

SEQ ID NO: 17302 - DNA, 22 bp, Homo sapiens
  source 1..22: mol_type = unassigned DNA
ttcatgtaagtcattaaaaaat

SEQ ID NO: 17303 - RNA, 23 nt, Homo sapiens
  source 1..23: mol_type = unassigned RNA
tgtagcaagggtatacctcacat

SEQ ID NO: 17304 - DNA, 23 bp, Homo sapiens
  source 1..23: mol_type = unassigned DNA
tgtagcaagggtatacctcacat

SEQ ID NO: 17305 - DNA, 23 bp, Homo sapiens
  source 1..23: mol_type = unassigned DNA
atgtgaggtatacccttgctaca

SEQ ID NO: 17306 - RNA, 25 nt, Homo sapiens
  source 1..25: mol_type = unassigned RNA
aatatggcactgataaaaatcacat

SEQ ID NO: 17307 - DNA, 25 bp, Homo sapiens
  source 1..25: mol_type = unassigned DNA
aatatggcactgataaaaatcacat

SEQ ID NO: 17308 - DNA, 25 bp, Homo sapiens
  source 1..25: mol_type = unassigned DNA
atgtgatttttatcagtgccatatt

SEQ ID NO: 17309 - RNA, 78 nt, Homo sapiens
  source 1..78: mol_type = unassigned RNA
tggctccaggcttcggccacagtcttccaccaggatgtgactgaaggcctggccgaggtctgcaggccacctggaggg

SEQ ID NO: 17310 - DNA, 78 bp, Homo sapiens
  source 1..78: mol_type = unassigned DNA
tggctccaggcttcggccacagtcttccaccaggatgtgactgaaggcctggccgaggtctgcaggccacctggaggg

SEQ ID NO: 17311 - DNA, 78 bp, Homo sapiens
  source 1..78: mol_type = unassigned DNA
ccctccaggtggcctgcagacctcggccaggccttcagtcacatcctggtggaagactgtggccgaagcctggagcca

SEQ ID NO: 17312 - RNA, 111 nt, Homo sapiens
  source 1..111: mol_type = unassigned RNA
gtgcctgtgatctgtatttgttacctaaggcttctttatcagcagaagaaggcaaatgataccctgcaaatgtttccagcatgcaactttgcttatctccctgtattaatg

SEQ ID NO: 17313 - DNA, 111 bp, Homo sapiens
  source 1..111: mol_type = unassigned DNA
gtgcctgtgatctgtatttgttacctaaggcttctttatcagcagaagaaggcaaatgataccctgcaaatgtttccagcatgcaactttgcttatctccctgtattaatg

SEQ ID NO: 17314 - DNA, 111 bp, Homo sapiens
  source 1..111: mol_type = unassigned DNA
cattaatacagggagataagcaaagttgcatgctggaaacatttgcagggtatcatttgccttcttctgctgataaagaagccttaggtaacaaatacagatcacaggcac

SEQ ID NO: 17315 - RNA, 34 nt, Homo sapiens
  source 1..34: mol_type = unassigned RNA
gagaagtgcaagaatttgtgaacacggcggtgga

SEQ ID NO: 17316 - DNA, 34 bp, Homo sapiens
  source 1..34: mol_type = unassigned DNA
gagaagtgcaagaatttgtgaacacggcggtgga

SEQ ID NO: 17317 - DNA, 34 bp, Homo sapiens
  source 1..34: mol_type = unassigned DNA
tccaccgccgtgttcacaaattcttgcacttctc

SEQ ID NO: 17318 - RNA, 31 nt, Homo sapiens
  source 1..31: mol_type = unassigned RNA
agagctgaaagggactggttgagttcactgg

SEQ ID NO: 17319 - DNA, 31 bp, Homo sapiens
  source 1..31: mol_type = unassigned DNA
agagctgaaagggactggttgagttcactgg

SEQ ID NO: 17320 - DNA, 31 bp, Homo sapiens
  source 1..31: mol_type = unassigned DNA
ccagtgaactcaaccagtccctttcagctct

SEQ ID NO: 17321 - RNA, 106 nt, Homo sapiens
  source 1..106: mol_type = unassigned RNA
ttctgacaaagatagaactcacaaagtgtgagtccatccttgagacactggtcaccagagtctatagcactaagggtcagctcctgctaaggtgtaggccctgtgc

SEQ ID NO: 17322 - DNA, 106 bp, Homo sapiens
  source 1..106: mol_type = unassigned DNA
ttctgacaaagatagaactcacaaagtgtgagtccatccttgagacactggtcaccagagtctatagcactaagggtcagctcctgctaaggtgtaggccctgtgc

SEQ ID NO: 17323 - DNA, 106 bp, Homo sapiens
  source 1..106: mol_type = unassigned DNA
gcacagggcctacaccttagcaggagctgacccttagtgctatagactctggtgaccagtgtctcaaggatggactcacactttgtgagttctatctttgtcagaa

SEQ ID NO: 17324 - RNA, 23 nt, Homo sapiens
  source 1..23: mol_type = unassigned RNA
ttttggaaaggtataactcaaat

SEQ ID NO: 17325 - DNA, 23 bp, Homo sapiens
  source 1..23: mol_type = unassigned DNA
ttttggaaaggtataactcaaat

SEQ ID NO: 17326 - DNA, 23 bp, Homo sapiens
  source 1..23: mol_type = unassigned DNA
atttgagttatacctttccaaaa

SEQ ID NO: 17327 - RNA, 26 nt, Homo sapiens
  source 1..26: mol_type = unassigned RNA
aaccgaccacgtggccacatggaatc

SEQ ID NO: 17328 - DNA, 26 bp, Homo sapiens
  source 1..26: mol_type = unassigned DNA
aaccgaccacgtggccacatggaatc

SEQ ID NO: 17329 - DNA, 26 bp, Homo sapiens
  source 1..26: mol_type = unassigned DNA
gattccatgtggccacgtggtcggtt

SEQ ID NO: 17330 - RNA, 182 nt, Homo sapiens
  source 1..182: mol_type = unassigned RNA
catattcataaaagacttgttgtttttcagaaatccaaagcttgtggtgactgagaagaccatccgacttgcttatcgtcatgctaagcagaataaaaaaaattcgtcatgctttttacttggttctctgacagcagacgaaggtaatacacttttaaaaatggaccagtgctcacgcctgt

SEQ ID NO: 17331 - DNA, 182 bp, Homo sapiens
  source 1..182: mol_type = unassigned DNA
catattcataaaagacttgttgtttttcagaaatccaaagcttgtggtgactgagaagaccatccgacttgcttatcgtcatgctaagcagaataaaaaaaattcgtcatgctttttacttggttctctgacagcagacgaaggtaatacacttttaaaaatggaccagtgctcacgcctgt

SEQ ID NO: 17332 - DNA, 182 bp, Homo sapiens
  source 1..182: mol_type = unassigned DNA
acaggcgtgagcactggtccatttttaaaagtgtattaccttcgtctgctgtcagagaaccaagtaaaaagcatgacgaattttttttattctgcttagcatgacgataagcaagtcggatggtcttctcagtcaccacaagctttggatttctgaaaaacaacaagtcttttatgaatatg

SEQ ID NO: 17333 - RNA, 117 nt, Homo sapiens
  source 1..117: mol_type = unassigned RNA
tttcacgtgcactgtctctggctaaaggtctaggtgcttggaacagcttttatgaatcggaaactggacagaaaccagcctgaggccgtgcgagctcccacggcccttggaggaaag

SEQ ID NO: 17334 - DNA, 117 bp, Homo sapiens
  source 1..117: mol_type = unassigned DNA
tttcacgtgcactgtctctggctaaaggtctaggtgcttggaacagcttttatgaatcggaaactggacagaaaccagcctgaggccgtgcgagctcccacggcccttggaggaaag

SEQ ID NO: 17335 - DNA, 117 bp, Homo sapiens
  source 1..117: mol_type = unassigned DNA
ctttcctccaagggccgtgggagctcgcacggcctcaggctggtttctgtccagtttccgattcataaaagctgttccaagcacctagacctttagccagagacagtgcacgtgaaa

SEQ ID NO: 17336 - RNA, 33 nt, Homo sapiens
  source 1..33: mol_type = unassigned RNA
tcagatgtagattctctggtcattgagcatatc

SEQ ID NO: 17337 - DNA, 33 bp, Homo sapiens
  source 1..33: mol_type = unassigned DNA
tcagatgtagattctctggtcattgagcatatc

SEQ ID NO: 17338 - DNA, 33 bp, Homo sapiens
  source 1..33: mol_type = unassigned DNA
gatatgctcaatgaccagagaatctacatctga

SEQ ID NO: 17339 - RNA, 27 nt, Homo sapiens
  source 1..27: mol_type = unassigned RNA
tatctgttttgacacagatttccttgt

SEQ ID NO: 17340 - DNA, 27 bp, Homo sapiens
  source 1..27: mol_type = unassigned DNA
tatctgttttgacacagatttccttgt

SEQ ID NO: 17341 - DNA, 27 bp, Homo sapiens
  source 1..27: mol_type = unassigned DNA
acaaggaaatctgtgtcaaaacagata

SEQ ID NO: 17342 - RNA, 101 nt, Homo sapiens
  source 1..101: mol_type = unassigned RNA
ccagataagagaataaaggcaggctgcctgaggcaagcgcggcacgccgccacggtccgttttcaggctgtggtagctttgtttttttgctttttgtaata

SEQ ID NO: 17343 - DNA, 101 bp, Homo sapiens
  source 1..101: mol_type = unassigned DNA
ccagataagagaataaaggcaggctgcctgaggcaagcgcggcacgccgccacggtccgttttcaggctgtggtagctttgtttttttgctttttgtaata

SEQ ID NO: 17344 - DNA, 101 bp, Homo sapiens
  source 1..101: mol_type = unassigned DNA
tattacaaaaagcaaaaaaacaaagctaccacagcctgaaaacggaccgtggcggcgtgccgcgcttgcctcaggcagcctgcctttattctcttatctgg

SEQ ID NO: 17345 - RNA, 54 nt, Homo sapiens
  source 1..54: mol_type = unassigned RNA
actcattccaggtcccagagcaaactctctctgctctcggagcctgtgacactg

SEQ ID NO: 17346 - DNA, 54 bp, Homo sapiens
  source 1..54: mol_type = unassigned DNA
actcattccaggtcccagagcaaactctctctgctctcggagcctgtgacactg

SEQ ID NO: 17347 - DNA, 54 bp, Homo sapiens
  source 1..54: mol_type = unassigned DNA
cagtgtcacaggctccgagagcagagagagtttgctctgggacctggaatgagt

SEQ ID NO: 17348 - RNA, 31 nt, Homo sapiens
  source 1..31: mol_type = unassigned RNA
cagccgagggaccagagtgggcagtggggac

SEQ ID NO: 17349 - DNA, 31 bp, Homo sapiens
  source 1..31: mol_type = unassigned DNA
cagccgagggaccagagtgggcagtggggac

SEQ ID NO: 17350 - DNA, 31 bp, Homo sapiens
  source 1..31: mol_type = unassigned DNA
gtccccactgcccactctggtccctcggctg

SEQ ID NO: 17351 - RNA, 46 nt, Homo sapiens
  source 1..46: mol_type = unassigned RNA
tgaaaccagtgaagggactgagttttttatccagactgaagtggaa

SEQ ID NO: 17352 - DNA, 46 bp, Homo sapiens
  source 1..46: mol_type = unassigned DNA
tgaaaccagtgaagggactgagttttttatccagactgaagtggaa

SEQ ID NO: 17353 - DNA, 46 bp, Homo sapiens
  source 1..46: mol_type = unassigned DNA
ttccacttcagtctggataaaaaactcagtcccttcactggtttca

SEQ ID NO: 17354 - RNA, 31 nt, Homo sapiens
  source 1..31: mol_type = unassigned RNA
tccctattgtgaccaggcctatggggaggag

SEQ ID NO: 17355 - DNA, 31 bp, Homo sapiens
  source 1..31: mol_type = unassigned DNA
tccctattgtgaccaggcctatggggaggag

SEQ ID NO: 17356 - DNA, 31 bp, Homo sapiens
  source 1..31: mol_type = unassigned DNA
ctcctccccataggcctggtcacaataggga

SEQ ID NO: 17357 - RNA, 32 nt, Homo sapiens
  source 1..32: mol_type = unassigned RNA
tcttttaaggactgccactctcttcagacaga

SEQ ID NO: 17358 - DNA, 32 bp, Homo sapiens
  source 1..32: mol_type = unassigned DNA
tcttttaaggactgccactctcttcagacaga

SEQ ID NO: 17359 - DNA, 32 bp, Homo sapiens
  source 1..32: mol_type = unassigned DNA
tctgtctgaagagagtggcagtccttaaaaga

SEQ ID NO: 17360 - RNA, 33 nt, Homo sapiens
  source 1..33: mol_type = unassigned RNA
tccttttcagaacacatggacttggaggcagat

SEQ ID NO: 17361 - DNA, 33 bp, Homo sapiens
  source 1..33: mol_type = unassigned DNA
tccttttcagaacacatggacttggaggcagat

SEQ ID NO: 17362 - DNA, 33 bp, Homo sapiens
  source 1..33: mol_type = unassigned DNA
atctgcctccaagtccatgtgttctgaaaagga

SEQ ID NO: 17363 - RNA, 56 nt, Homo sapiens
  source 1..56: mol_type = unassigned RNA
atttggcactggtacaaaccactttttctaagccttcactgccttctctaccttgc

SEQ ID NO: 17364 - DNA, 56 bp, Homo sapiens
  source 1..56: mol_type = unassigned DNA
atttggcactggtacaaaccactttttctaagccttcactgccttctctaccttgc

SEQ ID NO: 17365 - DNA, 56 bp, Homo sapiens
  source 1..56: mol_type = unassigned DNA
gcaaggtagagaaggcagtgaaggcttagaaaaagtggtttgtaccagtgccaaat

SEQ ID NO: 17366 - RNA, 31 nt, Homo sapiens
  source 1..31: mol_type = unassigned RNA
ggctctggctctgagatgaggcagacggcac

SEQ ID NO: 17367 - DNA, 31 bp, Homo sapiens
  source 1..31: mol_type = unassigned DNA
ggctctggctctgagatgaggcagacggcac

SEQ ID NO: 17368 - DNA, 31 bp, Homo sapiens
  source 1..31: mol_type = unassigned DNA
gtgccgtctgcctcatctcagagccagagcc

SEQ ID NO: 17369 - RNA, 61 nt, Homo sapiens
  source 1..61: mol_type = unassigned RNA
cagatttttaaggaactggtagaatttatgctatgagaggaagagtttatcccggcttaga

SEQ ID NO: 17370 - DNA, 61 bp, Homo sapiens
  source 1..61: mol_type = unassigned DNA
cagatttttaaggaactggtagaatttatgctatgagaggaagagtttatcccggcttaga

SEQ ID NO: 17371 - DNA, 61 bp, Homo sapiens
  source 1..61: mol_type = unassigned DNA
tctaagccgggataaactcttcctctcatagcataaattctaccagttccttaaaaatctg

SEQ ID NO: 17372 - RNA, 24 nt, Homo sapiens
  source 1..24: mol_type = unassigned RNA
tttgagtgctgttataactgatat

SEQ ID NO: 17373 - DNA, 24 bp, Homo sapiens
  source 1..24: mol_type = unassigned DNA
tttgagtgctgttataactgatat

SEQ ID NO: 17374 - DNA, 24 bp, Homo sapiens
  source 1..24: mol_type = unassigned DNA
atatcagttataacagcactcaaa

SEQ ID NO: 17375 - RNA, 56 nt, Homo sapiens
  source 1..56: mol_type = unassigned RNA
gggggtgctggcagtgggaggctgggccagtgtgcactggattcatcaggcctgag

SEQ ID NO: 17376 - DNA, 56 bp, Homo sapiens
  source 1..56: mol_type = unassigned DNA
gggggtgctggcagtgggaggctgggccagtgtgcactggattcatcaggcctgag

SEQ ID NO: 17377 - DNA, 56 bp, Homo sapiens
  source 1..56: mol_type = unassigned DNA
ctcaggcctgatgaatccagtgcacactggcccagcctcccactgccagcaccccc

SEQ ID NO: 17378 - RNA, 86 nt, Homo sapiens
  source 1..86: mol_type = unassigned RNA
ttttccctcctgaatgctttgtggcttttactgtaataatctttctgtgatctgtagaccaataattaaatctccaaatggccttt

SEQ ID NO: 17379 - DNA, 86 bp, Homo sapiens
  source 1..86: mol_type = unassigned DNA
ttttccctcctgaatgctttgtggcttttactgtaataatctttctgtgatctgtagaccaataattaaatctccaaatggccttt

SEQ ID NO: 17380 - DNA, 86 bp, Homo sapiens
  source 1..86: mol_type = unassigned DNA
aaaggccatttggagatttaattattggtctacagatcacagaaagattattacagtaaaagccacaaagcattcaggagggaaaa

SEQ ID NO: 17381 - RNA, 30 nt, Homo sapiens
  source 1..30: mol_type = unassigned RNA
actgcctgagaatactggtgctgtagggca

SEQ ID NO: 17382 - DNA, 30 bp, Homo sapiens
  source 1..30: mol_type = unassigned DNA
actgcctgagaatactggtgctgtagggca

SEQ ID NO: 17383 - DNA, 30 bp, Homo sapiens
  source 1..30: mol_type = unassigned DNA
tgccctacagcaccagtattctcaggcagt

SEQ ID NO: 17384 - RNA, 80 nt, Homo sapiens
  source 1..80: mol_type = unassigned RNA
aaatgcgtgctctttgtcgaaaaagaaagcttcagcttcatgttccaggtgagttaattaggcaatgtatgaatgctaat

SEQ ID NO: 17385 - DNA, 80 bp, Homo sapiens
  source 1..80: mol_type = unassigned DNA
aaatgcgtgctctttgtcgaaaaagaaagcttcagcttcatgttccaggtgagttaattaggcaatgtatgaatgctaat

SEQ ID NO: 17386 - DNA, 80 bp, Homo sapiens
  source 1..80: mol_type = unassigned DNA
attagcattcatacattgcctaattaactcacctggaacatgaagctgaagctttctttttcgacaaagagcacgcattt

SEQ ID NO: 17387 - RNA, 31 nt, Homo sapiens
  source 1..31: mol_type = unassigned RNA
cagccttctccagagccggcactgtcccggc

SEQ ID NO: 17388 - DNA, 31 bp, Homo sapiens
  source 1..31: mol_type = unassigned DNA
cagccttctccagagccggcactgtcccggc

SEQ ID NO: 17389 - DNA, 31 bp, Homo sapiens
  source 1..31: mol_type = unassigned DNA
gccgggacagtgccggctctggagaaggctg

SEQ ID NO: 17390 - RNA, 45 nt, Homo sapiens
  source 1..45: mol_type = unassigned RNA
aatagttatcagactaaagttgcaatgaaagtgctgaacaggaaa

SEQ ID NO: 17391 - DNA, 45 bp, Homo sapiens
  source 1..45: mol_type = unassigned DNA
aatagttatcagactaaagttgcaatgaaagtgctgaacaggaaa

SEQ ID NO: 17392 - DNA, 45 bp, Homo sapiens
  source 1..45: mol_type = unassigned DNA
tttcctgttcagcactttcattgcaactttagtctgataactatt

SEQ ID NO: 17393 - RNA, 26 nt, Homo sapiens
  source 1..26: mol_type = unassigned RNA
tttatagcactgtgagaatgcactaa

SEQ ID NO: 17394 - DNA, 26 bp, Homo sapiens
  source 1..26: mol_type = unassigned DNA
tttatagcactgtgagaatgcactaa

SEQ ID NO: 17395 - DNA, 26 bp, Homo sapiens
  source 1..26: mol_type = unassigned DNA
ttagtgcattctcacagtgctataaa

SEQ ID NO: 17396 - RNA, 32 nt, Homo sapiens
  source 1..32: mol_type = unassigned RNA
ctaattatgtgatcgtcagagcctaccagtac

SEQ ID NO: 17397 - DNA, 32 bp, Homo sapiens
  source 1..32: mol_type = unassigned DNA
ctaattatgtgatcgtcagagcctaccagtac

SEQ ID NO: 17398 - DNA, 32 bp, Homo sapiens
  source 1..32: mol_type = unassigned DNA
gtactggtaggctctgacgatcacataattag

SEQ ID NO: 17399 - RNA, 34 nt, Homo sapiens
  source 1..34: mol_type = unassigned RNA
ttcagggcactggtaaaattactgaattctgtgc

SEQ ID NO: 17400 - DNA, 34 bp, Homo sapiens
  source 1..34: mol_type = unassigned DNA
ttcagggcactggtaaaattactgaattctgtgc

SEQ ID NO: 17401 - DNA, 34 bp, Homo sapiens
  source 1..34: mol_type = unassigned DNA
gcacagaattcagtaattttaccagtgccctgaa

SEQ ID NO: 17402 - RNA, 41 nt, Homo sapiens
  source 1..41: mol_type = unassigned RNA
gcatggtagggttttattagacaatggtataaagcacacag

SEQ ID NO: 17403 - DNA, 41 bp, Homo sapiens
  source 1..41: mol_type = unassigned DNA
gcatggtagggttttattagacaatggtataaagcacacag

SEQ ID NO: 17404 - DNA, 41 bp, Homo sapiens
  source 1..41: mol_type = unassigned DNA
ctgtgtgctttataccattgtctaataaaaccctaccatgc

SEQ ID NO: 17405 - RNA, 59 nt, Homo sapiens
  source 1..59: mol_type = unassigned RNA
ctggcctctctttgaggctccctattctcgtctgagaacttgatcagagtaatcttgac

SEQ ID NO: 17406 - DNA, 59 bp, Homo sapiens
  source 1..59: mol_type = unassigned DNA
ctggcctctctttgaggctccctattctcgtctgagaacttgatcagagtaatcttgac

SEQ ID NO: 17407 - DNA, 59 bp, Homo sapiens
  source 1..59: mol_type = unassigned DNA
gtcaagattactctgatcaagttctcagacgagaatagggagcctcaaagagaggccag

SEQ ID NO: 17408 - RNA, 56 nt, Homo sapiens
  source 1..56: mol_type = unassigned RNA
tgtgttatcacatcaagctgtaaatacctctttgcctttaccatactgctgtttaa

SEQ ID NO: 17409 - DNA, 56 bp, Homo sapiens
  source 1..56: mol_type = unassigned DNA
tgtgttatcacatcaagctgtaaatacctctttgcctttaccatactgctgtttaa

SEQ ID NO: 17410 - DNA, 56 bp, Homo sapiens
  source 1..56: mol_type = unassigned DNA
ttaaacagcagtatggtaaaggcaaagaggtatttacagcttgatgtgataacaca

SEQ ID NO: 17411 - RNA, 25 nt, Homo sapiens
  source 1..25: mol_type = unassigned RNA
tttttttccttctgctcgccgtttt

SEQ ID NO: 17412 - DNA, 25 bp, Homo sapiens
  source 1..25: mol_type = unassigned DNA
tttttttccttctgctcgccgtttt

SEQ ID NO: 17413 - DNA, 25 bp, Homo sapiens
  source 1..25: mol_type = unassigned DNA
aaaacggcgagcagaaggaaaaaaa

SEQ ID NO: 17414 - RNA, 50 nt, Homo sapiens
  source 1..50: mol_type = unassigned RNA
tcttttgttaactcctgtatgcatacaaatgcacttcttttctccagttc

SEQ ID NO: 17415 - DNA, 50 bp, Homo sapiens
  source 1..50: mol_type = unassigned DNA
tcttttgttaactcctgtatgcatacaaatgcacttcttttctccagttc

SEQ ID NO: 17416 - DNA, 50 bp, Homo sapiens
  source 1..50: mol_type = unassigned DNA
gaactggagaaaagaagtgcatttgtatgcatacaggagttaacaaaaga

SEQ ID NO: 17417 - RNA, 72 nt, Homo sapiens
  source 1..72: mol_type = unassigned RNA
caatgtcataggcttggactcgtcccaagggaactcggtgtatcagatcgccatggtgcattacatcaaaca

SEQ ID NO: 17418 - DNA, 72 bp, Homo sapiens
  source 1..72: mol_type = unassigned DNA
caatgtcataggcttggactcgtcccaagggaactcggtgtatcagatcgccatggtgcattacatcaaaca

SEQ ID NO: 17419 - DNA, 72 bp, Homo sapiens
  source 1..72: mol_type = unassigned DNA
tgtttgatgtaatgcaccatggcgatctgatacaccgagttcccttgggacgagtccaagcctatgacattg

SEQ ID NO: 17420 - RNA, 29 nt, Homo sapiens
  source 1..29: mol_type = unassigned RNA
caccatcggttcgtggctgacagcaaaga

SEQ ID NO: 17421 - DNA, 29 bp, Homo sapiens
  source 1..29: mol_type = unassigned DNA
caccatcggttcgtggctgacagcaaaga

SEQ ID NO: 17422 - DNA, 29 bp, Homo sapiens
  source 1..29: mol_type = unassigned DNA
tctttgctgtcagccacgaaccgatggtg

SEQ ID NO: 17423 - RNA, 32 nt, Homo sapiens
  source 1..32: mol_type = unassigned RNA
ctgctcttttcagctctctggaccttcctgtg

SEQ ID NO: 17424 - DNA, 32 bp, Homo sapiens
  source 1..32: mol_type = unassigned DNA
ctgctcttttcagctctctggaccttcctgtg

SEQ ID NO: 17425 - DNA, 32 bp, Homo sapiens
  source 1..32: mol_type = unassigned DNA
cacaggaaggtccagagagctgaaaagagcag

SEQ ID NO: 17426 - RNA, 31 nt, Homo sapiens
  source 1..31: mol_type = unassigned RNA
ctgtgcatttggacttgaggacactggtttc

SEQ ID NO: 17427 - DNA, 31 bp, Homo sapiens
  source 1..31: mol_type = unassigned DNA
ctgtgcatttggacttgaggacactggtttc

SEQ ID NO: 17428 - DNA, 31 bp, Homo sapiens
  source 1..31: mol_type = unassigned DNA
gaaaccagtgtcctcaagtccaaatgcacag

SEQ ID NO: 17429 - RNA, 23 nt, Homo sapiens
  source 1..23: mol_type = unassigned RNA
ttttgcacttgtcctgcctattt

SEQ ID NO: 17430 - DNA, 23 bp, Homo sapiens
  source 1..23: mol_type = unassigned DNA
ttttgcacttgtcctgcctattt

SEQ ID NO: 17431 - DNA, 23 bp, Homo sapiens
  source 1..23: mol_type = unassigned DNA
aaataggcaggacaagtgcaaaa

SEQ ID NO: 17432 - RNA, 22 nt, Homo sapiens
  source 1..22: mol_type = unassigned RNA
ggtttgtgcttactcaaatgga

SEQ ID NO: 17433 - DNA, 22 bp, Homo sapiens
  source 1..22: mol_type = unassigned DNA
ggtttgtgcttactcaaatgga

SEQ ID NO: 17434 - DNA, 22 bp, Homo sapiens
  source 1..22: mol_type = unassigned DNA
tccatttgagtaagcacaaacc

SEQ ID NO: 17435 - RNA, 32 nt, Homo sapiens
  source 1..32: mol_type = unassigned RNA
aaaattttagacttctcgaacatgaggctgtt

SEQ ID NO: 17436 - DNA, 32 bp, Homo sapiens
  source 1..32: mol_type = unassigned DNA
aaaattttagacttctcgaacatgaggctgtt

SEQ ID NO: 17437 - DNA, 32 bp, Homo sapiens
  source 1..32: mol_type = unassigned DNA
aacagcctcatgttcgagaagtctaaaatttt

SEQ ID NO: 17438 - RNA, 31 nt, Homo sapiens
  source 1..31: mol_type = unassigned RNA
aagtcacccagacagagctgcaggaccctca

SEQ ID NO: 17439 - DNA, 31 bp, Homo sapiens
  source 1..31: mol_type = unassigned DNA
aagtcacccagacagagctgcaggaccctca

SEQ ID NO: 17440 - DNA, 31 bp, Homo sapiens
  source 1..31: mol_type = unassigned DNA
tgagggtcctgcagctctgtctgggtgactt

SEQ ID NO: 17441 - RNA, 41 nt, Homo sapiens
  source 1..41: mol_type = unassigned RNA
tcagtagccaatcctcagtttcctgtggttgggaagaagat

SEQ ID NO: 17442 - DNA, 41 bp, Homo sapiens
  source 1..41: mol_type = unassigned DNA
tcagtagccaatcctcagtttcctgtggttgggaagaagat

SEQ ID NO: 17443 - DNA, 41 bp, Homo sapiens
  source 1..41: mol_type = unassigned DNA
atcttcttcccaaccacaggaaactgaggattggctactga

SEQ ID NO: 17444 - RNA, 25 nt, Homo sapiens
  source 1..25: mol_type = unassigned RNA
tgaggtatgtgactacttacttgga

SEQ ID NO: 17445 - DNA, 25 bp, Homo sapiens
  source 1..25: mol_type = unassigned DNA
tgaggtatgtgactacttacttgga

SEQ ID NO: 17446 - DNA, 25 bp, Homo sapiens
  source 1..25: mol_type = unassigned DNA
tccaagtaagtagtcacatacctca

SEQ ID NO: 17447 - RNA, 38 nt, Homo sapiens
  source 1..38: mol_type = unassigned RNA
acctctggacctgcctgaggcctgggggaattcactgc

SEQ ID NO: 17448 - DNA, 38 bp, Homo sapiens
  source 1..38: mol_type = unassigned DNA
acctctggacctgcctgaggcctgggggaattcactgc

SEQ ID NO: 17449 - DNA, 38 bp, Homo sapiens
  source 1..38: mol_type = unassigned DNA
gcagtgaattcccccaggcctcaggcaggtccagaggt

SEQ ID NO: 17450 - RNA, 168 nt, Homo sapiens
  source 1..168: mol_type = unassigned RNA
ccattacaagagttgagtggatagggaatgtaagaatgtagttttagaaaaattcaattatatttggttatcactggtattgtattgttattgagctaccttgttatcattttaagaaaaataagtttatatactgggaactatgttgggaaaatgttgccatagtaa

SEQ ID NO: 17451 - DNA, 168 bp, Homo sapiens
  source 1..168: mol_type = unassigned DNA
ccattacaagagttgagtggatagggaatgtaagaatgtagttttagaaaaattcaattatatttggttatcactggtattgtattgttattgagctaccttgttatcattttaagaaaaataagtttatatactgggaactatgttgggaaaatgttgccatagtaa

SEQ ID NO: 17452 - DNA, 168 bp, Homo sapiens
  source 1..168: mol_type = unassigned DNA
ttactatggcaacattttcccaacatagttcccagtatataaacttatttttcttaaaatgataacaaggtagctcaataacaatacaataccagtgataaccaaatataattgaatttttctaaaactacattcttacattccctatccactcaactcttgtaatgg

SEQ ID NO: 17453 - RNA, 23 nt, Homo sapiens
  source 1..23: mol_type = unassigned RNA
tttttttctttcggctagaatac

SEQ ID NO: 17454 - DNA, 23 bp, Homo sapiens
  source 1..23: mol_type = unassigned DNA
tttttttctttcggctagaatac

SEQ ID NO: 17455 - DNA, 23 bp, Homo sapiens
  source 1..23: mol_type = unassigned DNA
gtattctagccgaaagaaaaaaa

SEQ ID NO: 17456 - RNA, 36 nt, Homo sapiens
  source 1..36: mol_type = unassigned RNA
tctgattccatacatgatctatgactcgtacgccat

SEQ ID NO: 17457 - DNA, 36 bp, Homo sapiens
  source 1..36: mol_type = unassigned DNA
tctgattccatacatgatctatgactcgtacgccat

SEQ ID NO: 17458 - DNA, 36 bp, Homo sapiens
  source 1..36: mol_type = unassigned DNA
atggcgtacgagtcatagatcatgtatggaatcaga

SEQ ID NO: 17459 - RNA, 41 nt, Homo sapiens
  source 1..41: mol_type = unassigned RNA
agtgagtagtaggtggggtgtttgtggatgggatggatgaa

SEQ ID NO: 17460 - DNA, 41 bp, Homo sapiens
  source 1..41: mol_type = unassigned DNA
agtgagtagtaggtggggtgtttgtggatgggatggatgaa

SEQ ID NO: 17461 - DNA, 41 bp, Homo sapiens
  source 1..41: mol_type = unassigned DNA
ttcatccatcccatccacaaacaccccacctactactcact

SEQ ID NO: 17462 - RNA, 44 nt, Homo sapiens
  source 1..44: mol_type = unassigned RNA
agaatctctgagacacagctaaggccatgataagagggaagttt

SEQ ID NO: 17463 - DNA, 44 bp, Homo sapiens
  source 1..44: mol_type = unassigned DNA
agaatctctgagacacagctaaggccatgataagagggaagttt

SEQ ID NO: 17464 - DNA, 44 bp, Homo sapiens
  source 1..44: mol_type = unassigned DNA
aaacttccctcttatcatggccttagctgtgtctcagagattct

SEQ ID NO: 17465 - RNA, 30 nt, Homo sapiens
  source 1..30: mol_type = unassigned RNA
ttccgccgatcagaggtccagatagagctc

SEQ ID NO: 17466 - DNA, 30 bp, Homo sapiens
  source 1..30: mol_type = unassigned DNA
ttccgccgatcagaggtccagatagagctc

SEQ ID NO: 17467 - DNA, 30 bp, Homo sapiens
  source 1..30: mol_type = unassigned DNA
gagctctatctggacctctgatcggcggaa

SEQ ID NO: 17468 - RNA, 29 nt, Homo sapiens
  source 1..29: mol_type = unassigned RNA
atgtgtcatgttggaaatgtaggttattt

SEQ ID NO: 17469 - DNA, 29 bp, Homo sapiens
  source 1..29: mol_type = unassigned DNA
atgtgtcatgttggaaatgtaggttattt

SEQ ID NO: 17470 - DNA, 29 bp, Homo sapiens
  source 1..29: mol_type = unassigned DNA
aaataacctacatttccaacatgacacat

SEQ ID NO: 17471 - RNA, 176 nt, Homo sapiens
  source 1..176: mol_type = unassigned RNA
cacttcaagccgtgccaggtaccgtctctctgcactgactacttactgtatttgaaagtgcacccttcccccagccctctctagccctcttagcacagggcactgatataactcactttcagcttgtttctctttgtctcccagcccctagtagaatgtcggctccccagacaggg

SEQ ID NO: 17472 - DNA, 176 bp, Homo sapiens
  source 1..176: mol_type = unassigned DNA
cacttcaagccgtgccaggtaccgtctctctgcactgactacttactgtatttgaaagtgcacccttcccccagccctctctagccctcttagcacagggcactgatataactcactttcagcttgtttctctttgtctcccagcccctagtagaatgtcggctccccagacaggg

SEQ ID NO: 17473 - DNA, 176 bp, Homo sapiens
  source 1..176: mol_type = unassigned DNA
ccctgtctggggagccgacattctactaggggctgggagacaaagagaaacaagctgaaagtgagttatatcagtgccctgtgctaagagggctagagagggctgggggaagggtgcactttcaaatacagtaagtagtcagtgcagagagacggtacctggcacggcttgaagtg

SEQ ID NO: 17474 - RNA, 35 nt, Homo sapiens
  source 1..35: mol_type = unassigned RNA
atctgattcatgagatctatactgttggaaaacac

SEQ ID NO: 17475 - DNA, 35 bp, Homo sapiens
  source 1..35: mol_type = unassigned DNA
atctgattcatgagatctatactgttggaaaacac

SEQ ID NO: 17476 - DNA, 35 bp, Homo sapiens
  source 1..35: mol_type = unassigned DNA
gtgttttccaacagtatagatctcatgaatcagat

SEQ ID NO: 17477 - RNA, 22 nt, Homo sapiens
  source 1..22: mol_type = unassigned RNA
caagtgtgatgacttacattgt

SEQ ID NO: 17478 - DNA, 22 bp, Homo sapiens
  source 1..22: mol_type = unassigned DNA
caagtgtgatgacttacattgt

SEQ ID NO: 17479 - DNA, 22 bp, Homo sapiens
  source 1..22: mol_type = unassigned DNA
acaatgtaagtcatcacacttg

SEQ ID NO: 17480 - RNA, 40 nt, Homo sapiens
  source 1..40: mol_type = unassigned RNA
agatgggtcccaagtgggcattgttagaactcagtaagca

SEQ ID NO: 17481 - DNA, 40 bp, Homo sapiens
  source 1..40: mol_type = unassigned DNA
agatgggtcccaagtgggcattgttagaactcagtaagca

SEQ ID NO: 17482 - DNA, 40 bp, Homo sapiens
  source 1..40: mol_type = unassigned DNA
tgcttactgagttctaacaatgcccacttgggacccatct

SEQ ID NO: 17483 - RNA, 76 nt, Homo sapiens
  source 1..76: mol_type = unassigned RNA
cttaattccaaaagggaggagggtatgatgaggcatgtctgacccttccttcccatcatggcctgaaccagacgtt

SEQ ID NO: 17484 - DNA, 76 bp, Homo sapiens
  source 1..76: mol_type = unassigned DNA
cttaattccaaaagggaggagggtatgatgaggcatgtctgacccttccttcccatcatggcctgaaccagacgtt

SEQ ID NO: 17485 - DNA, 76 bp, Homo sapiens
  source 1..76: mol_type = unassigned DNA
aacgtctggttcaggccatgatgggaaggaagggtcagacatgcctcatcataccctcctcccttttggaattaag

SEQ ID NO: 17486 - RNA, 50 nt, Homo sapiens
  source 1..50: mol_type = unassigned RNA
gttgcctcagaagaggctacagaaagttgcctgagaataggctacatttg

SEQ ID NO: 17487 - DNA, 50 bp, Homo sapiens
  source 1..50: mol_type = unassigned DNA
gttgcctcagaagaggctacagaaagttgcctgagaataggctacatttg

SEQ ID NO: 17488 - DNA, 50 bp, Homo sapiens
  source 1..50: mol_type = unassigned DNA
caaatgtagcctattctcaggcaactttctgtagcctcttctgaggcaac

SEQ ID NO: 17489 - RNA, 27 nt, Homo sapiens
  source 1..27: mol_type = unassigned RNA
gaaccctacggagagtcggactgcatc

SEQ ID NO: 17490 - DNA, 27 bp, Homo sapiens
  source 1..27: mol_type = unassigned DNA
gaaccctacggagagtcggactgcatc

SEQ ID NO: 17491 - DNA, 27 bp, Homo sapiens
  source 1..27: mol_type = unassigned DNA
gatgcagtccgactctccgtagggttc

SEQ ID NO: 17492 - RNA, 23 nt, Homo sapiens
  source 1..23: mol_type = unassigned RNA
tttttttccttcggctcttgttt

SEQ ID NO: 17493 - DNA, 23 bp, Homo sapiens
  source 1..23: mol_type = unassigned DNA
tttttttccttcggctcttgttt

SEQ ID NO: 17494 - DNA, 23 bp, Homo sapiens
  source 1..23: mol_type = unassigned DNA
aaacaagagccgaaggaaaaaaa

SEQ ID NO: 17495 - RNA, 29 nt, Homo sapiens
  source 1..29: mol_type = unassigned RNA
atgcatttggcaaggccagaactcagtca

SEQ ID NO: 17496 - DNA, 29 bp, Homo sapiens
  source 1..29: mol_type = unassigned DNA
atgcatttggcaaggccagaactcagtca

SEQ ID NO: 17497 - DNA, 29 bp, Homo sapiens
  source 1..29: mol_type = unassigned DNA
tgactgagttctggccttgccaaatgcat

SEQ ID NO: 17498 - RNA, 30 nt, Homo sapiens
  source 1..30: mol_type = unassigned RNA
aattctggaaacagaactcctgagacctac

SEQ ID NO: 17499 - DNA, 30 bp, Homo sapiens
  source 1..30: mol_type = unassigned DNA
aattctggaaacagaactcctgagacctac

SEQ ID NO: 17500 - DNA, 30 bp, Homo sapiens
  source 1..30: mol_type = unassigned DNA
gtaggtctcaggagttctgtttccagaatt

SEQ ID NO: 17501 - RNA, 26 nt, Homo sapiens
  source 1..26: mol_type = unassigned RNA
aatctgtcaatgtagaactaacacaa

SEQ ID NO: 17502 - DNA, 26 bp, Homo sapiens
  source 1..26: mol_type = unassigned DNA
aatctgtcaatgtagaactaacacaa

SEQ ID NO: 17503 - DNA, 26 bp, Homo sapiens
  source 1..26: mol_type = unassigned DNA
ttgtgttagttctacattgacagatt

SEQ ID NO: 17504 - RNA, 55 nt, Homo sapiens
  source 1..55: mol_type = unassigned RNA
tcttttgtaaattgcccagtctcaggtatgttgttatcagcagtatgaatacaga

SEQ ID NO: 17505 - DNA, 55 bp, Homo sapiens
  source 1..55: mol_type = unassigned DNA
tcttttgtaaattgcccagtctcaggtatgttgttatcagcagtatgaatacaga

SEQ ID NO: 17506 - DNA, 55 bp, Homo sapiens
  source 1..55: mol_type = unassigned DNA
tctgtattcatactgctgataacaacatacctgagactgggcaatttacaaaaga

SEQ ID NO: 17507 - RNA, 25 nt, Homo sapiens
  source 1..25: mol_type = unassigned RNA
agcggtatgagtttgtaatagtttt

SEQ ID NO: 17508 - DNA, 25 bp, Homo sapiens
  source 1..25: mol_type = unassigned DNA
agcggtatgagtttgtaatagtttt

SEQ ID NO: 17509 - DNA, 25 bp, Homo sapiens
  source 1..25: mol_type = unassigned DNA
aaaactattacaaactcataccgct

SEQ ID NO: 17510 - RNA, 43 nt, Homo sapiens
  source 1..43: mol_type = unassigned RNA
agaaaggacttacagaatttgggcttgtgatgaattatttgga

SEQ ID NO: 17511 - DNA, 43 bp, Homo sapiens
  source 1..43: mol_type = unassigned DNA
agaaaggacttacagaatttgggcttgtgatgaattatttgga

SEQ ID NO: 17512 - DNA, 43 bp, Homo sapiens
  source 1..43: mol_type = unassigned DNA
tccaaataattcatcacaagcccaaattctgtaagtcctttct

SEQ ID NO: 17513 - RNA, 34 nt, Homo sapiens
  source 1..34: mol_type = unassigned RNA
ctgttggaagctttgttctttccgctcgttgcaa

SEQ ID NO: 17514 - DNA, 34 bp, Homo sapiens
  source 1..34: mol_type = unassigned DNA
ctgttggaagctttgttctttccgctcgttgcaa

SEQ ID NO: 17515 - DNA, 34 bp, Homo sapiens
  source 1..34: mol_type = unassigned DNA
ttgcaacgagcggaaagaacaaagcttccaacag

SEQ ID NO: 17516 - RNA, 80 nt, Homo sapiens
  source 1..80: mol_type = unassigned RNA
aagttacactccataattattgttattctgtagaaaactgtacagaaggtaaatagaatagcttcaatgggaatataatt

SEQ ID NO: 17517 - DNA, 80 bp, Homo sapiens
  source 1..80: mol_type = unassigned DNA
aagttacactccataattattgttattctgtagaaaactgtacagaaggtaaatagaatagcttcaatgggaatataatt

SEQ ID NO: 17518 - DNA, 80 bp, Homo sapiens
  source 1..80: mol_type = unassigned DNA
aattatattcccattgaagctattctatttaccttctgtacagttttctacagaataacaataattatggagtgtaactt

SEQ ID NO: 17519 - RNA, 31 nt, Homo sapiens
  source 1..31: mol_type = unassigned RNA
gtcttctttggaactttgtacacaaaccaag

SEQ ID NO: 17520 - DNA, 31 bp, Homo sapiens
  source 1..31: mol_type = unassigned DNA
gtcttctttggaactttgtacacaaaccaag

SEQ ID NO: 17521 - DNA, 31 bp, Homo sapiens
  source 1..31: mol_type = unassigned DNA
cttggtttgtgtacaaagttccaaagaagac

SEQ ID NO: 17522 - RNA, 25 nt, Homo sapiens
  source 1..25: mol_type = unassigned RNA
agaaattatcagactcattttgcag

SEQ ID NO: 17523 - DNA, 25 bp, Homo sapiens
  source 1..25: mol_type = unassigned DNA
agaaattatcagactcattttgcag

SEQ ID NO: 17524 - DNA, 25 bp, Homo sapiens
  source 1..25: mol_type = unassigned DNA
ctgcaaaatgagtctgataatttct

SEQ ID NO: 17525 - RNA, 28 nt, Homo sapiens
  source 1..28: mol_type = unassigned RNA
gtgggacagtgaggacaggaccagctct

SEQ ID NO: 17526 - DNA, 28 bp, Homo sapiens
  source 1..28: mol_type = unassigned DNA
gtgggacagtgaggacaggaccagctct

SEQ ID NO: 17527 - DNA, 28 bp, Homo sapiens
  source 1..28: mol_type = unassigned DNA
agagctggtcctgtcctcactgtcccac

SEQ ID NO: 17528 - RNA, 33 nt, Homo sapiens
  source 1..33: mol_type = unassigned RNA
gaaacaggctaggtcaatggtagggctcacctt

SEQ ID NO: 17529 - DNA, 33 bp, Homo sapiens
  source 1..33: mol_type = unassigned DNA
gaaacaggctaggtcaatggtagggctcacctt

SEQ ID NO: 17530 - DNA, 33 bp, Homo sapiens
  source 1..33: mol_type = unassigned DNA
aaggtgagccctaccattgacctagcctgtttc

SEQ ID NO: 17531 - RNA, 93 nt, Homo sapiens
  source 1..93: mol_type = unassigned RNA
gctctaacctgacttctaatcgcatcctgtaacctctgactttagtgatcttgacttctgtctgctgctatagactgaacaattattgcctgg

SEQ ID NO: 17532 - DNA, 93 bp, Homo sapiens
  source 1..93: mol_type = unassigned DNA
gctctaacctgacttctaatcgcatcctgtaacctctgactttagtgatcttgacttctgtctgctgctatagactgaacaattattgcctgg

SEQ ID NO: 17533 - DNA, 93 bp, Homo sapiens
  source 1..93: mol_type = unassigned DNA
ccaggcaataattgttcagtctatagcagcagacagaagtcaagatcactaaagtcagaggttacaggatgcgattagaagtcaggttagagc

SEQ ID NO: 17534 - RNA, 93 nt, Homo sapiens
  source 1..93: mol_type = unassigned RNA
tatggaggaataagaaggctgagaccctgctggcctgcccacttttcacgtgacctggggctaggccacaaatgcttaagggaatttacattt

SEQ ID NO: 17535 - DNA, 93 bp, Homo sapiens
  source 1..93: mol_type = unassigned DNA
tatggaggaataagaaggctgagaccctgctggcctgcccacttttcacgtgacctggggctaggccacaaatgcttaagggaatttacattt

SEQ ID NO: 17536 - DNA, 93 bp, Homo sapiens
  source 1..93: mol_type = unassigned DNA
aaatgtaaattcccttaagcatttgtggcctagccccaggtcacgtgaaaagtgggcaggccagcagggtctcagccttcttattcctccata

SEQ ID NO: 17537 - RNA, 70 nt, Homo sapiens
  source 1..70: mol_type = unassigned RNA
ccctggtgacaagtgctggcagttacttagctgctaattggcttcaatttaccgctctgattgtgtggtc

SEQ ID NO: 17538 - DNA, 70 bp, Homo sapiens
  source 1..70: mol_type = unassigned DNA
ccctggtgacaagtgctggcagttacttagctgctaattggcttcaatttaccgctctgattgtgtggtc

SEQ ID NO: 17539 - DNA, 70 bp, Homo sapiens
  source 1..70: mol_type = unassigned DNA
gaccacacaatcagagcggtaaattgaagccaattagcagctaagtaactgccagcacttgtcaccaggg

SEQ ID NO: 17540 - RNA, 25 nt, Homo sapiens
  source 1..25: mol_type = unassigned RNA
tttttttcgttcagctcagaaaagt

SEQ ID NO: 17541 - DNA, 25 bp, Homo sapiens
  source 1..25: mol_type = unassigned DNA
tttttttcgttcagctcagaaaagt

SEQ ID NO: 17542 - DNA, 25 bp, Homo sapiens
  source 1..25: mol_type = unassigned DNA
acttttctgagctgaacgaaaaaaa

SEQ ID NO: 17543 - RNA, 31 nt, Homo sapiens
  source 1..31: mol_type = unassigned RNA
gagagccacctgggctgggaccacagcagga

SEQ ID NO: 17544 - DNA, 31 bp, Homo sapiens
  source 1..31: mol_type = unassigned DNA
gagagccacctgggctgggaccacagcagga

SEQ ID NO: 17545 - DNA, 31 bp, Homo sapiens
  source 1..31: mol_type = unassigned DNA
tcctgctgtggtcccagcccaggtggctctc

SEQ ID NO: 17546 - RNA, 64 nt, Homo sapiens
  source 1..64: mol_type = unassigned RNA
agaggaacttgccactaaactgggttaaatgtacactgttgagttttctgtacataaaaataat

SEQ ID NO: 17547 - DNA, 64 bp, Homo sapiens
  source 1..64: mol_type = unassigned DNA
agaggaacttgccactaaactgggttaaatgtacactgttgagttttctgtacataaaaataat

SEQ ID NO: 17548 - DNA, 64 bp, Homo sapiens
  source 1..64: mol_type = unassigned DNA
attatttttatgtacagaaaactcaacagtgtacatttaacccagtttagtggcaagttcctct

SEQ ID NO: 17549 - RNA, 34 nt, Homo sapiens
  source 1..34: mol_type = unassigned RNA
catgcccattgtccagagagccttccaggaccgt

SEQ ID NO: 17550 - DNA, 34 bp, Homo sapiens
  source 1..34: mol_type = unassigned DNA
catgcccattgtccagagagccttccaggaccgt

SEQ ID NO: 17551 - DNA, 34 bp, Homo sapiens
  source 1..34: mol_type = unassigned DNA
acggtcctggaaggctctctggacaatgggcatg

SEQ ID NO: 17552 - RNA, 39 nt, Homo sapiens
  source 1..39: mol_type = unassigned RNA
tcaattaacgtactatagctcatcagtagaattaagtga

SEQ ID NO: 17553 - DNA, 39 bp, Homo sapiens
  source 1..39: mol_type = unassigned DNA
tcaattaacgtactatagctcatcagtagaattaagtga

SEQ ID NO: 17554 - DNA, 39 bp, Homo sapiens
  source 1..39: mol_type = unassigned DNA
tcacttaattctactgatgagctatagtacgttaattga

SEQ ID NO: 17555 - RNA, 30 nt, Homo sapiens
  source 1..30: mol_type = unassigned RNA
accacaagggttggattggcacccactaat

SEQ ID NO: 17556 - DNA, 30 bp, Homo sapiens
  source 1..30: mol_type = unassigned DNA
accacaagggttggattggcacccactaat

SEQ ID NO: 17557 - DNA, 30 bp, Homo sapiens
  source 1..30: mol_type = unassigned DNA
attagtgggtgccaatccaacccttgtggt

SEQ ID NO: 17558 - RNA, 30 nt, Homo sapiens
  source 1..30: mol_type = unassigned RNA
ttctcactgggacctcaggaagtagtaccg

SEQ ID NO: 17559 - DNA, 30 bp, Homo sapiens
  source 1..30: mol_type = unassigned DNA
ttctcactgggacctcaggaagtagtaccg

SEQ ID NO: 17560 - DNA, 30 bp, Homo sapiens
  source 1..30: mol_type = unassigned DNA
cggtactacttcctgaggtcccagtgagaa

SEQ ID NO: 17561 - RNA, 24 nt, Homo sapiens
  source 1..24: mol_type = unassigned RNA
aattaatttgaccaacacaggata

SEQ ID NO: 17562 - DNA, 24 bp, Homo sapiens
  source 1..24: mol_type = unassigned DNA
aattaatttgaccaacacaggata

SEQ ID NO: 17563 - DNA, 24 bp, Homo sapiens
  source 1..24: mol_type = unassigned DNA
tatcctgtgttggtcaaattaatt

SEQ ID NO: 17564 - RNA, 34 nt, Homo sapiens
  source 1..34: mol_type = unassigned RNA
ttttctgatttgacttttctcgccggccggtctc

SEQ ID NO: 17565 - DNA, 34 bp, Homo sapiens
  source 1..34: mol_type = unassigned DNA
ttttctgatttgacttttctcgccggccggtctc

SEQ ID NO: 17566 - DNA, 34 bp, Homo sapiens
  source 1..34: mol_type = unassigned DNA
gagaccggccggcgagaaaagtcaaatcagaaaa

SEQ ID NO: 17567 - RNA, 32 nt, Homo sapiens
  source 1..32: mol_type = unassigned RNA
taccgagggatgggtaggactttgttaggtag

SEQ ID NO: 17568 - DNA, 32 bp, Homo sapiens
  source 1..32: mol_type = unassigned DNA
taccgagggatgggtaggactttgttaggtag

SEQ ID NO: 17569 - DNA, 32 bp, Homo sapiens
  source 1..32: mol_type = unassigned DNA
ctacctaacaaagtcctacccatccctcggta

SEQ ID NO: 17570 - RNA, 23 nt, Homo sapiens
  source 1..23: mol_type = unassigned RNA
agggcattggtatattaactggt

SEQ ID NO: 17571 - DNA, 23 bp, Homo sapiens
  source 1..23: mol_type = unassigned DNA
agggcattggtatattaactggt

SEQ ID NO: 17572 - DNA, 23 bp, Homo sapiens
  source 1..23: mol_type = unassigned DNA
accagttaatataccaatgccct

SEQ ID NO: 17573 - RNA, 38 nt, Homo sapiens
  source 1..38: mol_type = unassigned RNA
ccagggacttgatcatgaaagaggactatgaacttgtt

SEQ ID NO: 17574 - DNA, 38 bp, Homo sapiens
  source 1..38: mol_type = unassigned DNA
ccagggacttgatcatgaaagaggactatgaacttgtt

SEQ ID NO: 17575 - DNA, 38 bp, Homo sapiens
  source 1..38: mol_type = unassigned DNA
aacaagttcatagtcctctttcatgatcaagtccctgg

SEQ ID NO: 17576 - RNA, 32 nt, Homo sapiens
  source 1..32: mol_type = unassigned RNA
ggcttgtttgaggctctggatcctgccaaact

SEQ ID NO: 17577 - DNA, 32 bp, Homo sapiens
  source 1..32: mol_type = unassigned DNA
ggcttgtttgaggctctggatcctgccaaact

SEQ ID NO: 17578 - DNA, 32 bp, Homo sapiens
  source 1..32: mol_type = unassigned DNA
agtttggcaggatccagagcctcaaacaagcc

SEQ ID NO: 17579 - RNA, 33 nt, Homo sapiens
  source 1..33: mol_type = unassigned RNA
atctgcgttctctgccaaagactcgtgggggcc

SEQ ID NO: 17580 - DNA, 33 bp, Homo sapiens
  source 1..33: mol_type = unassigned DNA
atctgcgttctctgccaaagactcgtgggggcc

SEQ ID NO: 17581 - DNA, 33 bp, Homo sapiens
  source 1..33: mol_type = unassigned DNA
ggcccccacgagtctttggcagagaacgcagat

SEQ ID NO: 17582 - RNA, 24 nt, Homo sapiens
  source 1..24: mol_type = unassigned RNA
taaagtggtgtttgtgcagttaat

SEQ ID NO: 17583 - DNA, 24 bp, Homo sapiens
  source 1..24: mol_type = unassigned DNA
taaagtggtgtttgtgcagttaat

SEQ ID NO: 17584 - DNA, 24 bp, Homo sapiens
  source 1..24: mol_type = unassigned DNA
attaactgcacaaacaccacttta

SEQ ID NO: 17585 - RNA, 31 nt, Homo sapiens
  source 1..31: mol_type = unassigned RNA
aaagtaaactcagagccagggacttggccca

SEQ ID NO: 17586 - DNA, 31 bp, Homo sapiens
  source 1..31: mol_type = unassigned DNA
aaagtaaactcagagccagggacttggccca

SEQ ID NO: 17587 - DNA, 31 bp, Homo sapiens
  source 1..31: mol_type = unassigned DNA
tgggccaagtccctggctctgagtttacttt

SEQ ID NO: 17588 - RNA, 58 nt, Homo sapiens
  source 1..58: mol_type = unassigned RNA
tttctcaacccctaagtcatgcccaaatcctgttctctgacattttctcatctctctt

SEQ ID NO: 17589 - DNA, 58 bp, Homo sapiens
  source 1..58: mol_type = unassigned DNA
tttctcaacccctaagtcatgcccaaatcctgttctctgacattttctcatctctctt

SEQ ID NO: 17590 - DNA, 58 bp, Homo sapiens
  source 1..58: mol_type = unassigned DNA
aagagagatgagaaaatgtcagagaacaggatttgggcatgacttaggggttgagaaa

SEQ ID NO: 17591 - RNA, 59 nt, Homo sapiens
  source 1..59: mol_type = unassigned RNA
ctcccaaagtgctaggattgcagacgtgagccactgcacgtgcccggcctgtttttcta

SEQ ID NO: 17592 - DNA, 59 bp, Homo sapiens
  source 1..59: mol_type = unassigned DNA
ctcccaaagtgctaggattgcagacgtgagccactgcacgtgcccggcctgtttttcta

SEQ ID NO: 17593 - DNA, 59 bp, Homo sapiens
  source 1..59: mol_type = unassigned DNA
tagaaaaacaggccgggcacgtgcagtggctcacgtctgcaatcctagcactttgggag

SEQ ID NO: 17594 - RNA, 32 nt, Homo sapiens
  source 1..32: mol_type = unassigned RNA
aagttacttagctcttcagagtaatgaaggag

SEQ ID NO: 17595 - DNA, 32 bp, Homo sapiens
  source 1..32: mol_type = unassigned DNA
aagttacttagctcttcagagtaatgaaggag

SEQ ID NO: 17596 - DNA, 32 bp, Homo sapiens
  source 1..32: mol_type = unassigned DNA
ctccttcattactctgaagagctaagtaactt

SEQ ID NO: 17597 - RNA, 30 nt, Homo sapiens
  source 1..30: mol_type = unassigned RNA
gcccattcaaaggaggccgggctcggtggc

SEQ ID NO: 17598 - DNA, 30 bp, Homo sapiens
  source 1..30: mol_type = unassigned DNA
gcccattcaaaggaggccgggctcggtggc

SEQ ID NO: 17599 - DNA, 30 bp, Homo sapiens
  source 1..30: mol_type = unassigned DNA
gccaccgagcccggcctcctttgaatgggc

SEQ ID NO: 17600 - RNA, 23 nt, Homo sapiens
  source 1..23: mol_type = unassigned RNA
tccattccctccagaactgtgag

SEQ ID NO: 17601 - DNA, 23 bp, Homo sapiens
  source 1..23: mol_type = unassigned DNA
tccattccctccagaactgtgag

SEQ ID NO: 17602 - DNA, 23 bp, Homo sapiens
  source 1..23: mol_type = unassigned DNA
ctcacagttctggagggaatgga

SEQ ID NO: 17603 - RNA, 27 nt, Homo sapiens
  source 1..27: mol_type = unassigned RNA
ttgtgacaatgttagcactcaaaactg

SEQ ID NO: 17604 - DNA, 27 bp, Homo sapiens
  source 1..27: mol_type = unassigned DNA
ttgtgacaatgttagcactcaaaactg

SEQ ID NO: 17605 - DNA, 27 bp, Homo sapiens
  source 1..27: mol_type = unassigned DNA
cagttttgagtgctaacattgtcacaa

SEQ ID NO: 17606 - RNA, 78 nt, Homo sapiens
  source 1..78: mol_type = unassigned RNA
gacctcttggtaaatacagcatcatctgcatggaggttctgattcatgagatctatactgttggaaaactcttcaaaa

SEQ ID NO: 17607 - DNA, 78 bp, Homo sapiens
  source 1..78: mol_type = unassigned DNA
gacctcttggtaaatacagcatcatctgcatggaggttctgattcatgagatctatactgttggaaaactcttcaaaa

SEQ ID NO: 17608 - DNA, 78 bp, Homo sapiens
  source 1..78: mol_type = unassigned DNA
ttttgaagagttttccaacagtatagatctcatgaatcagaacctccatgcagatgatgctgtatttaccaagaggtc

SEQ ID NO: 17609 - RNA, 39 nt, Homo sapiens
  source 1..39: mol_type = unassigned RNA
taattacaattgtagcattcactgtagaaaggggctaat

SEQ ID NO: 17610 - DNA, 39 bp, Homo sapiens
  source 1..39: mol_type = unassigned DNA
taattacaattgtagcattcactgtagaaaggggctaat

SEQ ID NO: 17611 - DNA, 39 bp, Homo sapiens
  source 1..39: mol_type = unassigned DNA
attagcccctttctacagtgaatgctacaattgtaatta

SEQ ID NO: 17612 - RNA, 138 nt, Homo sapiens
  source 1..138: mol_type = unassigned RNA
atattttcagcctaagattctttctagtgcctgatctgaaaggggaaagaaccttggacttgctatcagaagagctgccacttactggctgggaaaccataggcaggttactttatttctctgaacctcagtttcctc

SEQ ID NO: 17613 - DNA, 138 bp, Homo sapiens
  source 1..138: mol_type = unassigned DNA
atattttcagcctaagattctttctagtgcctgatctgaaaggggaaagaaccttggacttgctatcagaagagctgccacttactggctgggaaaccataggcaggttactttatttctctgaacctcagtttcctc

SEQ ID NO: 17614 - DNA, 138 bp, Homo sapiens
  source 1..138: mol_type = unassigned DNA
gaggaaactgaggttcagagaaataaagtaacctgcctatggtttcccagccagtaagtggcagctcttctgatagcaagtccaaggttctttcccctttcagatcaggcactagaaagaatcttaggctgaaaatat

SEQ ID NO: 17615 - RNA, 35 nt, Homo sapiens
  source 1..35: mol_type = unassigned RNA
tggggtattgcagagggatatgaagcaacaaaagc

SEQ ID NO: 17616 - DNA, 35 bp, Homo sapiens
  source 1..35: mol_type = unassigned DNA
tggggtattgcagagggatatgaagcaacaaaagc

SEQ ID NO: 17617 - DNA, 35 bp, Homo sapiens
  source 1..35: mol_type = unassigned DNA
gcttttgttgcttcatatccctctgcaatacccca

SEQ ID NO: 17618 - RNA, 30 nt, Homo sapiens
  source 1..30: mol_type = unassigned RNA
cattcaattcgtctttctggagtggaagac

SEQ ID NO: 17619 - DNA, 30 bp, Homo sapiens
  source 1..30: mol_type = unassigned DNA
cattcaattcgtctttctggagtggaagac

SEQ ID NO: 17620 - DNA, 30 bp, Homo sapiens
  source 1..30: mol_type = unassigned DNA
gtcttccactccagaaagacgaattgaatg

SEQ ID NO: 17621 - RNA, 27 nt, Homo sapiens
  source 1..27: mol_type = unassigned RNA
attttgcaatgacagaacttccactga

SEQ ID NO: 17622 - DNA, 27 bp, Homo sapiens
  source 1..27: mol_type = unassigned DNA
attttgcaatgacagaacttccactga

SEQ ID NO: 17623 - DNA, 27 bp, Homo sapiens
  source 1..27: mol_type = unassigned DNA
tcagtggaagttctgtcattgcaaaat

SEQ ID NO: 17624 - RNA, 26 nt, Homo sapiens
  source 1..26: mol_type = unassigned RNA
aattgaaaggagtcggcttcagaagg

SEQ ID NO: 17625 - DNA, 26 bp, Homo sapiens
  source 1..26: mol_type = unassigned DNA
aattgaaaggagtcggcttcagaagg

SEQ ID NO: 17626 - DNA, 26 bp, Homo sapiens
  source 1..26: mol_type = unassigned DNA
ccttctgaagccgactcctttcaatt

SEQ ID NO: 17627 - RNA, 22 nt, Homo sapiens
  source 1..22: mol_type = unassigned RNA
tttggcaatggcctaacccaag

SEQ ID NO: 17628 - DNA, 22 bp, Homo sapiens
  source 1..22: mol_type = unassigned DNA
tttggcaatggcctaacccaag

SEQ ID NO: 17629 - DNA, 22 bp, Homo sapiens
  source 1..22: mol_type = unassigned DNA
cttgggttaggccattgccaaa

SEQ ID NO: 17630 - RNA, 149 nt, Homo sapiens
  source 1..149: mol_type = unassigned RNA
aaatgggtaagatcaccacgattccaagggaccagctcagagaactcatcctcactcacatcctttgaacatccgagtacagactccagggagccaaaacagaattctctgatacaatacaatcctagctgtgtttaggcttaaaaaaa

SEQ ID NO: 17631 - DNA, 149 bp, Homo sapiens
  source 1..149: mol_type = unassigned DNA
aaatgggtaagatcaccacgattccaagggaccagctcagagaactcatcctcactcacatcctttgaacatccgagtacagactccagggagccaaaacagaattctctgatacaatacaatcctagctgtgtttaggcttaaaaaaa

SEQ ID NO: 17632 - DNA, 149 bp, Homo sapiens
  source 1..149: mol_type = unassigned DNA
tttttttaagcctaaacacagctaggattgtattgtatcagagaattctgttttggctccctggagtctgtactcggatgttcaaaggatgtgagtgaggatgagttctctgagctggtcccttggaatcgtggtgatcttacccattt

SEQ ID NO: 17633 - RNA, 37 nt, Homo sapiens
  source 1..37: mol_type = unassigned RNA
gttagagaagactttcatggaggtaggaggtaagcta

SEQ ID NO: 17634 - DNA, 37 bp, Homo sapiens
  source 1..37: mol_type = unassigned DNA
gttagagaagactttcatggaggtaggaggtaagcta

SEQ ID NO: 17635 - DNA, 37 bp, Homo sapiens
  source 1..37: mol_type = unassigned DNA
tagcttacctcctacctccatgaaagtcttctctaac

SEQ ID NO: 17636 - RNA, 57 nt, Homo sapiens
  source 1..57: mol_type = unassigned RNA
ctgcacaaggtaggatgatgacaaaaggttttcactgctggggaatggatgattgcg

SEQ ID NO: 17637 - DNA, 57 bp, Homo sapiens
  source 1..57: mol_type = unassigned DNA
ctgcacaaggtaggatgatgacaaaaggttttcactgctggggaatggatgattgcg

SEQ ID NO: 17638 - DNA, 57 bp, Homo sapiens
  source 1..57: mol_type = unassigned DNA
cgcaatcatccattccccagcagtgaaaaccttttgtcatcatcctaccttgtgcag

SEQ ID NO: 17639 - RNA, 25 nt, Homo sapiens
  source 1..25: mol_type = unassigned RNA
aaatattatcaaactgattttggag

SEQ ID NO: 17640 - DNA, 25 bp, Homo sapiens
  source 1..25: mol_type = unassigned DNA
aaatattatcaaactgattttggag

SEQ ID NO: 17641 - DNA, 25 bp, Homo sapiens
  source 1..25: mol_type = unassigned DNA
ctccaaaatcagtttgataatattt

SEQ ID NO: 17642 - RNA, 30 nt, Homo sapiens
  source 1..30: mol_type = unassigned RNA
ctaggccccccagaaagctgccagagccgg

SEQ ID NO: 17643 - DNA, 30 bp, Homo sapiens
  source 1..30: mol_type = unassigned DNA
ctaggccccccagaaagctgccagagccgg

SEQ ID NO: 17644 - DNA, 30 bp, Homo sapiens
  source 1..30: mol_type = unassigned DNA
ccggctctggcagctttctggggggcctag

SEQ ID NO: 17645 - RNA, 26 nt, Homo sapiens
  source 1..26: mol_type = unassigned RNA
ttcatggcccttttctgtgtctgaaa

SEQ ID NO: 17646 - DNA, 26 bp, Homo sapiens
  source 1..26: mol_type = unassigned DNA
ttcatggcccttttctgtgtctgaaa

SEQ ID NO: 17647 - DNA, 26 bp, Homo sapiens
  source 1..26: mol_type = unassigned DNA
tttcagacacagaaaagggccatgaa

SEQ ID NO: 17648 - RNA, 30 nt, Homo sapiens
  source 1..30: mol_type = unassigned RNA
cagagtttggcacatggtagagctcaataa

SEQ ID NO: 17649 - DNA, 30 bp, Homo sapiens
  source 1..30: mol_type = unassigned DNA
cagagtttggcacatggtagagctcaataa

SEQ ID NO: 17650 - DNA, 30 bp, Homo sapiens
  source 1..30: mol_type = unassigned DNA
ttattgagctctaccatgtgccaaactctg

SEQ ID NO: 17651 - RNA, 22 nt, Homo sapiens
  source 1..22: mol_type = unassigned RNA
ttccatatcagactggtattgt

SEQ ID NO: 17652 - DNA, 22 bp, Homo sapiens
  source 1..22: mol_type = unassigned DNA
ttccatatcagactggtattgt

SEQ ID NO: 17653 - DNA, 22 bp, Homo sapiens
  source 1..22: mol_type = unassigned DNA
acaataccagtctgatatggaa

SEQ ID NO: 17654 - RNA, 32 nt, Homo sapiens
  source 1..32: mol_type = unassigned RNA
catattcctttgaccaaatagtttgtgggtta

SEQ ID NO: 17655 - DNA, 32 bp, Homo sapiens
  source 1..32: mol_type = unassigned DNA
catattcctttgaccaaatagtttgtgggtta

SEQ ID NO: 17656 - DNA, 32 bp, Homo sapiens
  source 1..32: mol_type = unassigned DNA
taacccacaaactatttggtcaaaggaatatg

SEQ ID NO: 17657 - RNA, 47 nt, Homo sapiens
  source 1..47: mol_type = unassigned RNA
ttattttagtcctccttattgaactttccaggtctgtactacctact

SEQ ID NO: 17658 - DNA, 47 bp, Homo sapiens
  source 1..47: mol_type = unassigned DNA
ttattttagtcctccttattgaactttccaggtctgtactacctact

SEQ ID NO: 17659 - DNA, 47 bp, Homo sapiens
  source 1..47: mol_type = unassigned DNA
agtaggtagtacagacctggaaagttcaataaggaggactaaaataa

SEQ ID NO: 17660 - RNA, 30 nt, Homo sapiens
  source 1..30: mol_type = unassigned RNA
acttgccaccacaggtagtgtccagtggtg

SEQ ID NO: 17661 - DNA, 30 bp, Homo sapiens
  source 1..30: mol_type = unassigned DNA
acttgccaccacaggtagtgtccagtggtg

SEQ ID NO: 17662 - DNA, 30 bp, Homo sapiens
  source 1..30: mol_type = unassigned DNA
caccactggacactacctgtggtggcaagt

SEQ ID NO: 17663 - RNA, 32 nt, Homo sapiens
  source 1..32: mol_type = unassigned RNA
gaattcactgaccacctcgtcaagacccacac

SEQ ID NO: 17664 - DNA, 32 bp, Homo sapiens
  source 1..32: mol_type = unassigned DNA
gaattcactgaccacctcgtcaagacccacac

SEQ ID NO: 17665 - DNA, 32 bp, Homo sapiens
  source 1..32: mol_type = unassigned DNA
gtgtgggtcttgacgaggtggtcagtgaattc

SEQ ID NO: 17666 - RNA, 30 nt, Homo sapiens
  source 1..30: mol_type = unassigned RNA
ttttaggacggtgaactttgacataataaa

SEQ ID NO: 17667 - DNA, 30 bp, Homo sapiens
  source 1..30: mol_type = unassigned DNA
ttttaggacggtgaactttgacataataaa

SEQ ID NO: 17668 - DNA, 30 bp, Homo sapiens
  source 1..30: mol_type = unassigned DNA
tttattatgtcaaagttcaccgtcctaaaa

SEQ ID NO: 17669 - RNA, 28 nt, Homo sapiens
  source 1..28: mol_type = unassigned RNA
cctgggcttgcacgaccagagccagcgc

SEQ ID NO: 17670 - DNA, 28 bp, Homo sapiens
  source 1..28: mol_type = unassigned DNA
cctgggcttgcacgaccagagccagcgc

SEQ ID NO: 17671 - DNA, 28 bp, Homo sapiens
  source 1..28: mol_type = unassigned DNA
gcgctggctctggtcgtgcaagcccagg

SEQ ID NO: 17672 - RNA, 178 nt, Homo sapiens
  source 1..178: mol_type = unassigned RNA
ttttgtgtagtctaaagtgtggtactgccttgaccagcaatgttagcaccatctggaaacttgttagaaatgcatatgctttgccgggtgctgtggcttacgcctgtaatcctagcactttgggaggctgaggcttgtggatcacctgaggtcaggaactcgagaccagcttggccaa

SEQ ID NO: 17673 - DNA, 178 bp, Homo sapiens
  source 1..178: mol_type = unassigned DNA
ttttgtgtagtctaaagtgtggtactgccttgaccagcaatgttagcaccatctggaaacttgttagaaatgcatatgctttgccgggtgctgtggcttacgcctgtaatcctagcactttgggaggctgaggcttgtggatcacctgaggtcaggaactcgagaccagcttggccaa

SEQ ID NO: 17674 - DNA, 178 bp, Homo sapiens
  source 1..178: mol_type = unassigned DNA
ttggccaagctggtctcgagttcctgacctcaggtgatccacaagcctcagcctcccaaagtgctaggattacaggcgtaagccacagcacccggcaaagcatatgcatttctaacaagtttccagatggtgctaacattgctggtcaaggcagtaccacactttagactacacaaaa

SEQ ID NO: 17675 - RNA, 50 nt, Homo sapiens
  source 1..50: mol_type = unassigned RNA
gtgtgttttgaagtataggaagtatagaagtttgggatcacttatataga

SEQ ID NO: 17676 - DNA, 50 bp, Homo sapiens
  source 1..50: mol_type = unassigned DNA
gtgtgttttgaagtataggaagtatagaagtttgggatcacttatataga

SEQ ID NO: 17677 - DNA, 50 bp, Homo sapiens
  source 1..50: mol_type = unassigned DNA
tctatataagtgatcccaaacttctatacttcctatacttcaaaacacac

SEQ ID NO: 17678 - RNA, 24 nt, Homo sapiens
  source 1..24: mol_type = unassigned RNA
tcctgcactgagagaattcacttt

SEQ ID NO: 17679 - DNA, 24 bp, Homo sapiens
  source 1..24: mol_type = unassigned DNA
tcctgcactgagagaattcacttt

SEQ ID NO: 17680 - DNA, 24 bp, Homo sapiens
  source 1..24: mol_type = unassigned DNA
aaagtgaattctctcagtgcagga

SEQ ID NO: 17681 - RNA, 31 nt, Homo sapiens
  source 1..31: mol_type = unassigned RNA
atttgtgctgttgtgcaggtaaagggagtgc

SEQ ID NO: 17682 - DNA, 31 bp, Homo sapiens
  source 1..31: mol_type = unassigned DNA
atttgtgctgttgtgcaggtaaagggagtgc

SEQ ID NO: 17683 - DNA, 31 bp, Homo sapiens
  source 1..31: mol_type = unassigned DNA
gcactccctttacctgcacaacagcacaaat

SEQ ID NO: 17684 - RNA, 32 nt, Homo sapiens
  source 1..32: mol_type = unassigned RNA
agagaaagactgctttccttgaccagagggag

SEQ ID NO: 17685 - DNA, 32 bp, Homo sapiens
  source 1..32: mol_type = unassigned DNA
agagaaagactgctttccttgaccagagggag

SEQ ID NO: 17686 - DNA, 32 bp, Homo sapiens
  source 1..32: mol_type = unassigned DNA
ctccctctggtcaaggaaagcagtctttctct

SEQ ID NO: 17687 - RNA, 30 nt, Homo sapiens
  source 1..30: mol_type = unassigned RNA
aggatgagaagaagactctgaacactttgt

SEQ ID NO: 17688 - DNA, 30 bp, Homo sapiens
  source 1..30: mol_type = unassigned DNA
aggatgagaagaagactctgaacactttgt

SEQ ID NO: 17689 - DNA, 30 bp, Homo sapiens
  source 1..30: mol_type = unassigned DNA
acaaagtgttcagagtcttcttctcatcct

SEQ ID NO: 17690 - RNA, 24 nt, Homo sapiens
  source 1..24: mol_type = unassigned RNA
gtctgttctcatactgctgatgaa

SEQ ID NO: 17691 - DNA, 24 bp, Homo sapiens
  source 1..24: mol_type = unassigned DNA
gtctgttctcatactgctgatgaa

SEQ ID NO: 17692 - DNA, 24 bp, Homo sapiens
  source 1..24: mol_type = unassigned DNA
ttcatcagcagtatgagaacagac

SEQ ID NO: 17693 - RNA, 39 nt, Homo sapiens
  source 1..39: mol_type = unassigned RNA
taagctaaattcctgttgttgggaactgacttttgaaaa

SEQ ID NO: 17694 - DNA, 39 bp, Homo sapiens
  source 1..39: mol_type = unassigned DNA
taagctaaattcctgttgttgggaactgacttttgaaaa

SEQ ID NO: 17695 - DNA, 39 bp, Homo sapiens
  source 1..39: mol_type = unassigned DNA
ttttcaaaagtcagttcccaacaacaggaatttagctta

SEQ ID NO: 17696 - RNA, 35 nt, Homo sapiens
  source 1..35: mol_type = unassigned RNA
cagcgggctgtgaggacgctctgggccaggctgca

SEQ ID NO: 17697 - DNA, 35 bp, Homo sapiens
  source 1..35: mol_type = unassigned DNA
cagcgggctgtgaggacgctctgggccaggctgca

SEQ ID NO: 17698 - DNA, 35 bp, Homo sapiens
  source 1..35: mol_type = unassigned DNA
tgcagcctggcccagagcgtcctcacagcccgctg

SEQ ID NO: 17699 - RNA, 42 nt, Homo sapiens
  source 1..42: mol_type = unassigned RNA
cttattgtgctgttctgcaggtaactgaaaccacagaaagcc

SEQ ID NO: 17700 - DNA, 42 bp, Homo sapiens
  source 1..42: mol_type = unassigned DNA
cttattgtgctgttctgcaggtaactgaaaccacagaaagcc

SEQ ID NO: 17701 - DNA, 42 bp, Homo sapiens
  source 1..42: mol_type = unassigned DNA
ggctttctgtggtttcagttacctgcagaacagcacaataag

SEQ ID NO: 17702 - RNA, 31 nt, Homo sapiens
  source 1..31: mol_type = unassigned RNA
cgacatacaggtcacggagctctcagatgca

SEQ ID NO: 17703 - DNA, 31 bp, Homo sapiens
  source 1..31: mol_type = unassigned DNA
cgacatacaggtcacggagctctcagatgca

SEQ ID NO: 17704 - DNA, 31 bp, Homo sapiens
  source 1..31: mol_type = unassigned DNA
tgcatctgagagctccgtgacctgtatgtcg

SEQ ID NO: 17705 - RNA, 25 nt, Homo sapiens
  source 1..25: mol_type = unassigned RNA
gtgttgcacagggagaatccactga

SEQ ID NO: 17706 - DNA, 25 bp, Homo sapiens
  source 1..25: mol_type = unassigned DNA
gtgttgcacagggagaatccactga

SEQ ID NO: 17707 - DNA, 25 bp, Homo sapiens
  source 1..25: mol_type = unassigned DNA
tcagtggattctccctgtgcaacac

SEQ ID NO: 17708 - RNA, 37 nt, Homo sapiens
  source 1..37: mol_type = unassigned RNA
tgaggcaatggtagacctagactgtgatcaagatcat

SEQ ID NO: 17709 - DNA, 37 bp, Homo sapiens
  source 1..37: mol_type = unassigned DNA
tgaggcaatggtagacctagactgtgatcaagatcat

SEQ ID NO: 17710 - DNA, 37 bp, Homo sapiens
  source 1..37: mol_type = unassigned DNA
atgatcttgatcacagtctaggtctaccattgcctca

SEQ ID NO: 17711 - RNA, 31 nt, Homo sapiens
  source 1..31: mol_type = unassigned RNA
agcacatcatcgtcagggacctgcagacggc

SEQ ID NO: 17712 - DNA, 31 bp, Homo sapiens
  source 1..31: mol_type = unassigned DNA
agcacatcatcgtcagggacctgcagacggc

SEQ ID NO: 17713 - DNA, 31 bp, Homo sapiens
  source 1..31: mol_type = unassigned DNA
gccgtctgcaggtccctgacgatgatgtgct

SEQ ID NO: 17714 - RNA, 32 nt, Homo sapiens
  source 1..32: mol_type = unassigned RNA
cagatatcagtcaagggctcttcaagacacag

SEQ ID NO: 17715 - DNA, 32 bp, Homo sapiens
  source 1..32: mol_type = unassigned DNA
cagatatcagtcaagggctcttcaagacacag

SEQ ID NO: 17716 - DNA, 32 bp, Homo sapiens
  source 1..32: mol_type = unassigned DNA
ctgtgtcttgaagagcccttgactgatatctg

SEQ ID NO: 17717 - RNA, 29 nt, Homo sapiens
  source 1..29: mol_type = unassigned RNA
aggaccgctgtgggaatcaaatgagatca

SEQ ID NO: 17718 - DNA, 29 bp, Homo sapiens
  source 1..29: mol_type = unassigned DNA
aggaccgctgtgggaatcaaatgagatca

SEQ ID NO: 17719 - DNA, 29 bp, Homo sapiens
  source 1..29: mol_type = unassigned DNA
tgatctcatttgattcccacagcggtcct

SEQ ID NO: 17720 - RNA, 31 nt, Homo sapiens
  source 1..31: mol_type = unassigned RNA
aagtcctgaatatccagaaggccgagatatc

SEQ ID NO: 17721 - DNA, 31 bp, Homo sapiens
  source 1..31: mol_type = unassigned DNA
aagtcctgaatatccagaaggccgagatatc

SEQ ID NO: 17722 - DNA, 31 bp, Homo sapiens
  source 1..31: mol_type = unassigned DNA
gatatctcggccttctggatattcaggactt

SEQ ID NO: 17723 - RNA, 24 nt, Homo sapiens
  source 1..24: mol_type = unassigned RNA
ttcacattgagactgatgttgaga

SEQ ID NO: 17724 - DNA, 24 bp, Homo sapiens
  source 1..24: mol_type = unassigned DNA
ttcacattgagactgatgttgaga

SEQ ID NO: 17725 - DNA, 24 bp, Homo sapiens
  source 1..24: mol_type = unassigned DNA
tctcaacatcagtctcaatgtgaa

SEQ ID NO: 17726 - RNA, 147 nt, Homo sapiens
  source 1..147: mol_type = unassigned RNA
atagaaatgaaggctgtgtaaacaaagtacctgtactgtctctagtttccatggcacactgaaccaagcacaaagggaccacagtagacagcctgcaatccacaaacagtctttttatagggtggagtggggtgggaaagatttctg

SEQ ID NO: 17727 - DNA, 147 bp, Homo sapiens
  source 1..147: mol_type = unassigned DNA
atagaaatgaaggctgtgtaaacaaagtacctgtactgtctctagtttccatggcacactgaaccaagcacaaagggaccacagtagacagcctgcaatccacaaacagtctttttatagggtggagtggggtgggaaagatttctg

SEQ ID NO: 17728 - DNA, 147 bp, Homo sapiens
  source 1..147: mol_type = unassigned DNA
cagaaatctttcccaccccactccaccctataaaaagactgtttgtggattgcaggctgtctactgtggtccctttgtgcttggttcagtgtgccatggaaactagagacagtacaggtactttgtttacacagccttcatttctat

SEQ ID NO: 17729 - RNA, 27 nt, Homo sapiens
  source 1..27: mol_type = unassigned RNA
ggatttggcaagtgtagagctcatttt

SEQ ID NO: 17730 - DNA, 27 bp, Homo sapiens
  source 1..27: mol_type = unassigned DNA
ggatttggcaagtgtagagctcatttt

SEQ ID NO: 17731 - DNA, 27 bp, Homo sapiens
  source 1..27: mol_type = unassigned DNA
aaaatgagctctacacttgccaaatcc

SEQ ID NO: 17732 - RNA, 38 nt, Homo sapiens
  source 1..38: mol_type = unassigned RNA
atgagtgattagttttatagttattgtgaactatgata

SEQ ID NO: 17733 - DNA, 38 bp, Homo sapiens
  source 1..38: mol_type = unassigned DNA
atgagtgattagttttatagttattgtgaactatgata

SEQ ID NO: 17734 - DNA, 38 bp, Homo sapiens
  source 1..38: mol_type = unassigned DNA
tatcatagttcacaataactataaaactaatcactcat

SEQ ID NO: 17735 - RNA, 22 nt, Homo sapiens
  source 1..22: mol_type = unassigned RNA
ggtttgtgataaatttcatgga

SEQ ID NO: 17736 - DNA, 22 bp, Homo sapiens
  source 1..22: mol_type = unassigned DNA
ggtttgtgataaatttcatgga

SEQ ID NO: 17737 - DNA, 22 bp, Homo sapiens
  source 1..22: mol_type = unassigned DNA
tccatgaaatttatcacaaacc

SEQ ID NO: 17738 - RNA, 40 nt, Homo sapiens
  source 1..40: mol_type = unassigned RNA
cagcatcctgcagtgtccaggacagtcccaccactcgcta

SEQ ID NO: 17739 - DNA, 40 bp, Homo sapiens
  source 1..40: mol_type = unassigned DNA
cagcatcctgcagtgtccaggacagtcccaccactcgcta

SEQ ID NO: 17740 - DNA, 40 bp, Homo sapiens
  source 1..40: mol_type = unassigned DNA
tagcgagtggtgggactgtcctggacactgcaggatgctg

SEQ ID NO: 17741 - RNA, 44 nt, Homo sapiens
  source 1..44: mol_type = unassigned RNA
tctctttcctcttgacttactgcactggctagaactcacattac

SEQ ID NO: 17742 - DNA, 44 bp, Homo sapiens
  source 1..44: mol_type = unassigned DNA
tctctttcctcttgacttactgcactggctagaactcacattac

SEQ ID NO: 17743 - DNA, 44 bp, Homo sapiens
  source 1..44: mol_type = unassigned DNA
gtaatgtgagttctagccagtgcagtaagtcaagaggaaagaga

SEQ ID NO: 17744 - RNA, 61 nt, Homo sapiens
  source 1..61: mol_type = unassigned RNA
atttagcactggtctgaactcacacaggtgtgagatgaggctctgggaagcaggcaagtgg

SEQ ID NO: 17745 - DNA, 61 bp, Homo sapiens
  source 1..61: mol_type = unassigned DNA
atttagcactggtctgaactcacacaggtgtgagatgaggctctgggaagcaggcaagtgg

SEQ ID NO: 17746 - DNA, 61 bp, Homo sapiens
  source 1..61: mol_type = unassigned DNA
ccacttgcctgcttcccagagcctcatctcacacctgtgtgagttcagaccagtgctaaat

SEQ ID NO: 17747 - RNA, 23 nt, Homo sapiens
  source 1..23: mol_type = unassigned RNA
ggaaaatgtttctgatcactaga

SEQ ID NO: 17748 - DNA, 23 bp, Homo sapiens
  source 1..23: mol_type = unassigned DNA
ggaaaatgtttctgatcactaga

SEQ ID NO: 17749 - DNA, 23 bp, Homo sapiens
  source 1..23: mol_type = unassigned DNA
tctagtgatcagaaacattttcc

SEQ ID NO: 17750 - RNA, 25 nt, Homo sapiens
  source 1..25: mol_type = unassigned RNA
tcttttgttatcaaggatatgatgg

SEQ ID NO: 17751 - DNA, 25 bp, Homo sapiens
  source 1..25: mol_type = unassigned DNA
tcttttgttatcaaggatatgatgg

SEQ ID NO: 17752 - DNA, 25 bp, Homo sapiens
  source 1..25: mol_type = unassigned DNA
ccatcatatccttgataacaaaaga

SEQ ID NO: 17753 - RNA, 23 nt, Homo sapiens
  source 1..23: mol_type = unassigned RNA
tccactctcagactcctgtgtaa

SEQ ID NO: 17754 - DNA, 23 bp, Homo sapiens
  source 1..23: mol_type = unassigned DNA
tccactctcagactcctgtgtaa

SEQ ID NO: 17755 - DNA, 23 bp, Homo sapiens
  source 1..23: mol_type = unassigned DNA
ttacacaggagtctgagagtgga

SEQ ID NO: 17756 - RNA, 30 nt, Homo sapiens
  source 1..30: mol_type = unassigned RNA
actccagtatgtcccagtagaacactcatt

SEQ ID NO: 17757 - DNA, 30 bp, Homo sapiens
  source 1..30: mol_type = unassigned DNA
actccagtatgtcccagtagaacactcatt

SEQ ID NO: 17758 - DNA, 30 bp, Homo sapiens
  source 1..30: mol_type = unassigned DNA
aatgagtgttctactgggacatactggagt

SEQ ID NO: 17759 - RNA, 74 nt, Homo sapiens
  source 1..74: mol_type = unassigned RNA
tttgttatttctgctcacctgcagagacagccctcctgggagtggaccccagagtctgtatcatcagaactcac

SEQ ID NO: 17760 - DNA, 74 bp, Homo sapiens
  source 1..74: mol_type = unassigned DNA
tttgttatttctgctcacctgcagagacagccctcctgggagtggaccccagagtctgtatcatcagaactcac

SEQ ID NO: 17761 - DNA, 74 bp, Homo sapiens
  source 1..74: mol_type = unassigned DNA
gtgagttctgatgatacagactctggggtccactcccaggagggctgtctctgcaggtgagcagaaataacaaa

SEQ ID NO: 17762 - RNA, 37 nt, Homo sapiens
  source 1..37: mol_type = unassigned RNA
tttgttgtcccactgttcctggtagcattcactttgt

SEQ ID NO: 17763 - DNA, 37 bp, Homo sapiens
  source 1..37: mol_type = unassigned DNA
tttgttgtcccactgttcctggtagcattcactttgt

SEQ ID NO: 17764 - DNA, 37 bp, Homo sapiens
  source 1..37: mol_type = unassigned DNA
acaaagtgaatgctaccaggaacagtgggacaacaaa

SEQ ID NO: 17765 - RNA, 25 nt, Homo sapiens
  source 1..25: mol_type = unassigned RNA
gtccttcatttgtttagatgatgta

SEQ ID NO: 17766 - DNA, 25 bp, Homo sapiens
  source 1..25: mol_type = unassigned DNA
gtccttcatttgtttagatgatgta

SEQ ID NO: 17767 - DNA, 25 bp, Homo sapiens
  source 1..25: mol_type = unassigned DNA
tacatcatctaaacaaatgaaggac

SEQ ID NO: 17768 - RNA, 33 nt, Homo sapiens
  source 1..33: mol_type = unassigned RNA
cgatgcctggatcgcctgtggaagtgaagatac

SEQ ID NO: 17769 - DNA, 33 bp, Homo sapiens
  source 1..33: mol_type = unassigned DNA
cgatgcctggatcgcctgtggaagtgaagatac

SEQ ID NO: 17770 - DNA, 33 bp, Homo sapiens
  source 1..33: mol_type = unassigned DNA
gtatcttcacttccacaggcgatccaggcatcg

SEQ ID NO: 17771 - RNA, 43 nt, Homo sapiens
  source 1..43: mol_type = unassigned RNA
tctattgctggacctaagctaggttttcggatgctgtttactt

SEQ ID NO: 17772 - DNA, 43 bp, Homo sapiens
  source 1..43: mol_type = unassigned DNA
tctattgctggacctaagctaggttttcggatgctgtttactt

SEQ ID NO: 17773 - DNA, 43 bp, Homo sapiens
  source 1..43: mol_type = unassigned DNA
aagtaaacagcatccgaaaacctagcttaggtccagcaataga

SEQ ID NO: 17774 - RNA, 24 nt, Homo sapiens
  source 1..24: mol_type = unassigned RNA
cttgttctgagccttgctactgag

SEQ ID NO: 17775 - DNA, 24 bp, Homo sapiens
  source 1..24: mol_type = unassigned DNA
cttgttctgagccttgctactgag

SEQ ID NO: 17776 - DNA, 24 bp, Homo sapiens
  source 1..24: mol_type = unassigned DNA
ctcagtagcaaggctcagaacaag

SEQ ID NO: 17777 - RNA, 47 nt, Homo sapiens
  source 1..47: mol_type = unassigned RNA
atgtttacttagcttatctccttatcttgagtgacttggggcagatg

SEQ ID NO: 17778 - DNA, 47 bp, Homo sapiens
  source 1..47: mol_type = unassigned DNA
atgtttacttagcttatctccttatcttgagtgacttggggcagatg

SEQ ID NO: 17779 - DNA, 47 bp, Homo sapiens
  source 1..47: mol_type = unassigned DNA
catctgccccaagtcactcaagataaggagataagctaagtaaacat

SEQ ID NO: 17780 - RNA, 30 nt, Homo sapiens
  source 1..30: mol_type = unassigned RNA
tggactttcagtccccagatctgtgaaaaa

SEQ ID NO: 17781 - DNA, 30 bp, Homo sapiens
  source 1..30: mol_type = unassigned DNA
tggactttcagtccccagatctgtgaaaaa

SEQ ID NO: 17782 - DNA, 30 bp, Homo sapiens
  source 1..30: mol_type = unassigned DNA
tttttcacagatctggggactgaaagtcca

SEQ ID NO: 17783 - RNA, 34 nt, Homo sapiens
  source 1..34: mol_type = unassigned RNA
gtcatttgccagtgtcgatgttgacaggattgtg

SEQ ID NO: 17784 - DNA, 34 bp, Homo sapiens
  source 1..34: mol_type = unassigned DNA
gtcatttgccagtgtcgatgttgacaggattgtg

SEQ ID NO: 17785 - DNA, 34 bp, Homo sapiens
  source 1..34: mol_type = unassigned DNA
cacaatcctgtcaacatcgacactggcaaatgac

SEQ ID NO: 17786 - RNA, 31 nt, Homo sapiens
  source 1..31: mol_type = unassigned RNA
gggtagatcccaggactcggcagtggatggg

SEQ ID NO: 17787 - DNA, 31 bp, Homo sapiens
  source 1..31: mol_type = unassigned DNA
gggtagatcccaggactcggcagtggatggg

SEQ ID NO: 17788 - DNA, 31 bp, Homo sapiens
  source 1..31: mol_type = unassigned DNA
cccatccactgccgagtcctgggatctaccc

SEQ ID NO: 17789 - RNA, 21 nt, Homo sapiens
  source 1..21: mol_type = unassigned RNA
ttgtttgatgacttacttgaa

SEQ ID NO: 17790 - DNA, 21 bp, Homo sapiens
  source 1..21: mol_type = unassigned DNA
ttgtttgatgacttacttgaa

SEQ ID NO: 17791 - DNA, 21 bp, Homo sapiens
  source 1..21: mol_type = unassigned DNA
ttcaagtaagtcatcaaacaa

SEQ ID NO: 17792 - RNA, 38 nt, Homo sapiens
  source 1..38: mol_type = unassigned RNA
cacagcactccatgttctgtttgtgtgactttcaggga

SEQ ID NO: 17793 - DNA, 38 bp, Homo sapiens
  source 1..38: mol_type = unassigned DNA
cacagcactccatgttctgtttgtgtgactttcaggga

SEQ ID NO: 17794 - DNA, 38 bp, Homo sapiens
  source 1..38: mol_type = unassigned DNA
tccctgaaagtcacacaaacagaacatggagtgctgtg

SEQ ID NO: 17795 - RNA, 86 nt, Homo sapiens
  source 1..86: mol_type = unassigned RNA
gcccataaaggactagatgaaactctgaggattaaagctgagtctgaaggggatggcattccttctgtatctgtggcagtggtagg

SEQ ID NO: 17796 - DNA, 86 bp, Homo sapiens
  source 1..86: mol_type = unassigned DNA
gcccataaaggactagatgaaactctgaggattaaagctgagtctgaaggggatggcattccttctgtatctgtggcagtggtagg

SEQ ID NO: 17797 - DNA, 86 bp, Homo sapiens
  source 1..86: mol_type = unassigned DNA
cctaccactgccacagatacagaaggaatgccatccccttcagactcagctttaatcctcagagtttcatctagtcctttatgggc

SEQ ID NO: 17798 - RNA, 35 nt, Homo sapiens
  source 1..35: mol_type = unassigned RNA
ggagtgtatttttctgactgatgctgactctccct

SEQ ID NO: 17799 - DNA, 35 bp, Homo sapiens
  source 1..35: mol_type = unassigned DNA
ggagtgtatttttctgactgatgctgactctccct

SEQ ID NO: 17800 - DNA, 35 bp, Homo sapiens
  source 1..35: mol_type = unassigned DNA
agggagagtcagcatcagtcagaaaaatacactcc

SEQ ID NO: 17801 - RNA, 31 nt, Homo sapiens
  source 1..31: mol_type = unassigned RNA
cccaggaactgtatggcctgatctgctatgg

SEQ ID NO: 17802 - DNA, 31 bp, Homo sapiens
  source 1..31: mol_type = unassigned DNA
cccaggaactgtatggcctgatctgctatgg

SEQ ID NO: 17803 - DNA, 31 bp, Homo sapiens
  source 1..31: mol_type = unassigned DNA
ccatagcagatcaggccatacagttcctggg

SEQ ID NO: 17804 - RNA, 38 nt, Homo sapiens
  source 1..38: mol_type = unassigned RNA
aataagcttcagatgtagttggatctgggagtgcaagc

SEQ ID NO: 17805 - DNA, 38 bp, Homo sapiens
  source 1..38: mol_type = unassigned DNA
aataagcttcagatgtagttggatctgggagtgcaagc

SEQ ID NO: 17806 - DNA, 38 bp, Homo sapiens
  source 1..38: mol_type = unassigned DNA
gcttgcactcccagatccaactacatctgaagcttatt

SEQ ID NO: 17807 - RNA, 21 nt, Homo sapiens
  source 1..21: mol_type = unassigned RNA
cacctgtgtgacttacatgga

SEQ ID NO: 17808 - DNA, 21 bp, Homo sapiens
  source 1..21: mol_type = unassigned DNA
cacctgtgtgacttacatgga

SEQ ID NO: 17809 - DNA, 21 bp, Homo sapiens
  source 1..21: mol_type = unassigned DNA
tccatgtaagtcacacaggtg

SEQ ID NO: 17810 - RNA, 34 nt, Homo sapiens
  source 1..34: mol_type = unassigned RNA
agtcaactcaaagttggttcggaactgagtttgt

SEQ ID NO: 17811 - DNA, 34 bp, Homo sapiens
  source 1..34: mol_type = unassigned DNA
agtcaactcaaagttggttcggaactgagtttgt

SEQ ID NO: 17812 - DNA, 34 bp, Homo sapiens
  source 1..34: mol_type = unassigned DNA
acaaactcagttccgaaccaactttgagttgact

SEQ ID NO: 17813 - RNA, 196 nt, Homo sapiens
  source 1..196: mol_type = unassigned RNA
atcacttactatgaagctgctctgaaaactggacaaaagaattatctttgctatgacctggctgagctcttattaaaattgaaatggtatgacaaagcagaaaaagttcttcagcatgctctggctcatgaacctggtatgaaagtctttctggtttgaaaaaagtctgataactctgatccattttatttttata

SEQ ID NO: 17814 - DNA, 196 bp, Homo sapiens
  source 1..196: mol_type = unassigned DNA
atcacttactatgaagctgctctgaaaactggacaaaagaattatctttgctatgacctggctgagctcttattaaaattgaaatggtatgacaaagcagaaaaagttcttcagcatgctctggctcatgaacctggtatgaaagtctttctggtttgaaaaaagtctgataactctgatccattttatttttata

SEQ ID NO: 17815 - DNA, 196 bp, Homo sapiens
  source 1..196: mol_type = unassigned DNA
tataaaaataaaatggatcagagttatcagacttttttcaaaccagaaagactttcataccaggttcatgagccagagcatgctgaagaactttttctgctttgtcataccatttcaattttaataagagctcagccaggtcatagcaaagataattcttttgtccagttttcagagcagcttcatagtaagtgat

SEQ ID NO: 17816 - RNA, 23 nt, Homo sapiens
  source 1..23: mol_type = unassigned RNA
tgagatatgagattgttttgttt

SEQ ID NO: 17817 - DNA, 23 bp, Homo sapiens
  source 1..23: mol_type = unassigned DNA
tgagatatgagattgttttgttt

SEQ ID NO: 17818 - DNA, 23 bp, Homo sapiens
  source 1..23: mol_type = unassigned DNA
aaacaaaacaatctcatatctca

SEQ ID NO: 17819 - RNA, 30 nt, Homo sapiens
  source 1..30: mol_type = unassigned RNA
tctgcccaagctgtgccctctggggaatga

SEQ ID NO: 17820 - DNA, 30 bp, Homo sapiens
  source 1..30: mol_type = unassigned DNA
tctgcccaagctgtgccctctggggaatga

SEQ ID NO: 17821 - DNA, 30 bp, Homo sapiens
  source 1..30: mol_type = unassigned DNA
tcattccccagagggcacagcttgggcaga

SEQ ID NO: 17822 - RNA, 31 nt, Homo sapiens
  source 1..31: mol_type = unassigned RNA
gcagcatcgggaagttggccatgatctttgt

SEQ ID NO: 17823 - DNA, 31 bp, Homo sapiens
  source 1..31: mol_type = unassigned DNA
gcagcatcgggaagttggccatgatctttgt

SEQ ID NO: 17824 - DNA, 31 bp, Homo sapiens
  source 1..31: mol_type = unassigned DNA
acaaagatcatggccaacttcccgatgctgc

SEQ ID NO: 17825 - RNA, 31 nt, Homo sapiens
  source 1..31: mol_type = unassigned RNA
aaagaaaccccttccgaggatgacagaagcc

SEQ ID NO: 17826 - DNA, 31 bp, Homo sapiens
  source 1..31: mol_type = unassigned DNA
aaagaaaccccttccgaggatgacagaagcc

SEQ ID NO: 17827 - DNA, 31 bp, Homo sapiens
  source 1..31: mol_type = unassigned DNA
ggcttctgtcatcctcggaaggggtttcttt

SEQ ID NO: 17828 - RNA, 31 nt, Homo sapiens
  source 1..31: mol_type = unassigned RNA
ctgcccatggattctgcaggacctagaagag

SEQ ID NO: 17829 - DNA, 31 bp, Homo sapiens
  source 1..31: mol_type = unassigned DNA
ctgcccatggattctgcaggacctagaagag

SEQ ID NO: 17830 - DNA, 31 bp, Homo sapiens
  source 1..31: mol_type = unassigned DNA
ctcttctaggtcctgcagaatccatgggcag

SEQ ID NO: 17831 - RNA, 45 nt, Homo sapiens
  source 1..45: mol_type = unassigned RNA
gccagtggctgccagaaactcattgaagtggacagtgaatgcaaa

SEQ ID NO: 17832 - DNA, 45 bp, Homo sapiens
  source 1..45: mol_type = unassigned DNA
gccagtggctgccagaaactcattgaagtggacagtgaatgcaaa

SEQ ID NO: 17833 - DNA, 45 bp, Homo sapiens
  source 1..45: mol_type = unassigned DNA
tttgcattcactgtccacttcaatgagtttctggcagccactggc

SEQ ID NO: 17834 - RNA, 29 nt, Homo sapiens
  source 1..29: mol_type = unassigned RNA
ttcccatgccaggccgcggcgaggccggg

SEQ ID NO: 17835 - DNA, 29 bp, Homo sapiens
  source 1..29: mol_type = unassigned DNA
ttcccatgccaggccgcggcgaggccggg

SEQ ID NO: 17836 - DNA, 29 bp, Homo sapiens
  source 1..29: mol_type = unassigned DNA
cccggcctcgccgcggcctggcatgggaa

SEQ ID NO: 17837 - RNA, 30 nt, Homo sapiens
  source 1..30: mol_type = unassigned RNA
gcgcccttccccctctgagcctggcacata

SEQ ID NO: 17838 - DNA, 30 bp, Homo sapiens
  source 1..30: mol_type = unassigned DNA
gcgcccttccccctctgagcctggcacata

SEQ ID NO: 17839 - DNA, 30 bp, Homo sapiens
  source 1..30: mol_type = unassigned DNA
tatgtgccaggctcagagggggaagggcgc

SEQ ID NO: 17840 - RNA, 32 nt, Homo sapiens
  source 1..32: mol_type = unassigned RNA
gcaacatgcttggcaatgggagaacaccccta

SEQ ID NO: 17841 - DNA, 32 bp, Homo sapiens
  source 1..32: mol_type = unassigned DNA
gcaacatgcttggcaatgggagaacaccccta

SEQ ID NO: 17842 - DNA, 32 bp, Homo sapiens
  source 1..32: mol_type = unassigned DNA
taggggtgttctcccattgccaagcatgttgc

SEQ ID NO: 17843 - RNA, 162 nt, Homo sapiens
  source 1..162: mol_type = unassigned RNA
ttaggcatctacttgattggattgagagacacacatagctgatcaaacacaatttcagccatgaatcaggcataaatattctgacggttaattttagacatctacttgactggattaagggacacacacagctggtcaaacaatttcagccatgaatcaggc

SEQ ID NO: 17844 - DNA, 162 bp, Homo sapiens
  source 1..162: mol_type = unassigned DNA
ttaggcatctacttgattggattgagagacacacatagctgatcaaacacaatttcagccatgaatcaggcataaatattctgacggttaattttagacatctacttgactggattaagggacacacacagctggtcaaacaatttcagccatgaatcaggc

SEQ ID NO: 17845 - DNA, 162 bp, Homo sapiens
  source 1..162: mol_type = unassigned DNA
gcctgattcatggctgaaattgtttgaccagctgtgtgtgtcccttaatccagtcaagtagatgtctaaaattaaccgtcagaatatttatgcctgattcatggctgaaattgtgtttgatcagctatgtgtgtctctcaatccaatcaagtagatgcctaa

SEQ ID NO: 17846 - RNA, 29 nt, Homo sapiens
  source 1..29: mol_type = unassigned RNA
cttaacactagacaccaggtcgaaaattt

SEQ ID NO: 17847 - DNA, 29 bp, Homo sapiens
  source 1..29: mol_type = unassigned DNA
cttaacactagacaccaggtcgaaaattt

SEQ ID NO: 17848 - DNA, 29 bp, Homo sapiens
  source 1..29: mol_type = unassigned DNA
aaattttcgacctggtgtctagtgttaag

SEQ ID NO: 17849 - RNA, 35 nt, Homo sapiens
  source 1..35: mol_type = unassigned RNA
taataaaggctcgtccgttatcagactgtattgag

SEQ ID NO: 17850 - DNA, 35 bp, Homo sapiens
  source 1..35: mol_type = unassigned DNA
taataaaggctcgtccgttatcagactgtattgag

SEQ ID NO: 17851 - DNA, 35 bp, Homo sapiens
  source 1..35: mol_type = unassigned DNA
ctcaatacagtctgataacggacgagcctttatta

SEQ ID NO: 17852 - RNA, 45 nt, Homo sapiens
  source 1..45: mol_type = unassigned RNA
ggagcaggagagaatcagcaaatggtagaagtcacacaggtattt

SEQ ID NO: 17853 - DNA, 45 bp, Homo sapiens
  source 1..45: mol_type = unassigned DNA
ggagcaggagagaatcagcaaatggtagaagtcacacaggtattt

SEQ ID NO: 17854 - DNA, 45 bp, Homo sapiens
  source 1..45: mol_type = unassigned DNA
aaatacctgtgtgacttctaccatttgctgattctctcctgctcc

SEQ ID NO: 17855 - RNA, 37 nt, Homo sapiens
  source 1..37: mol_type = unassigned RNA
aaggaaaaccacacaaccttatcaacagatgtagaaa

SEQ ID NO: 17856 - DNA, 37 bp, Homo sapiens
  source 1..37: mol_type = unassigned DNA
aaggaaaaccacacaaccttatcaacagatgtagaaa

SEQ ID NO: 17857 - DNA, 37 bp, Homo sapiens
  source 1..37: mol_type = unassigned DNA
tttctacatctgttgataaggttgtgtggttttcctt

SEQ ID NO: 17858 - RNA, 28 nt, Homo sapiens
  source 1..28: mol_type = unassigned RNA
taatttgccagagggagaactcactacc

SEQ ID NO: 17859 - DNA, 28 bp, Homo sapiens
  source 1..28: mol_type = unassigned DNA
taatttgccagagggagaactcactacc

SEQ ID NO: 17860 - DNA, 28 bp, Homo sapiens
  source 1..28: mol_type = unassigned DNA
ggtagtgagttctccctctggcaaatta

SEQ ID NO: 17861 - RNA, 28 nt, Homo sapiens
  source 1..28: mol_type = unassigned RNA
tttcttctttctgctctgttgatgcagc

SEQ ID NO: 17862 - DNA, 28 bp, Homo sapiens
  source 1..28: mol_type = unassigned DNA
tttcttctttctgctctgttgatgcagc

SEQ ID NO: 17863 - DNA, 28 bp, Homo sapiens
  source 1..28: mol_type = unassigned DNA
gctgcatcaacagagcagaaagaagaaa

SEQ ID NO: 17864 - RNA, 93 nt, Homo sapiens
  source 1..93: mol_type = unassigned RNA
tgttggagaggtgggttggttattaggttgatggtgagtaggtagagattggggttgaggagcagggagcagtttggtgccagtggaatcagg

SEQ ID NO: 17865 - DNA, 93 bp, Homo sapiens
  source 1..93: mol_type = unassigned DNA
tgttggagaggtgggttggttattaggttgatggtgagtaggtagagattggggttgaggagcagggagcagtttggtgccagtggaatcagg

SEQ ID NO: 17866 - DNA, 93 bp, Homo sapiens
  source 1..93: mol_type = unassigned DNA
cctgattccactggcaccaaactgctccctgctcctcaaccccaatctctacctactcaccatcaacctaataaccaacccacctctccaaca

SEQ ID NO: 17867 - RNA, 34 nt, Homo sapiens
  source 1..34: mol_type = unassigned RNA
attttgtgaagaattacattgatagtttgatagg

SEQ ID NO: 17868 - DNA, 34 bp, Homo sapiens
  source 1..34: mol_type = unassigned DNA
attttgtgaagaattacattgatagtttgatagg

SEQ ID NO: 17869 - DNA, 34 bp, Homo sapiens
  source 1..34: mol_type = unassigned DNA
cctatcaaactatcaatgtaattcttcacaaaat

SEQ ID NO: 17870 - RNA, 36 nt, Homo sapiens
  source 1..36: mol_type = unassigned RNA
ttgataatactcactttatcagactgttgtgggaga

SEQ ID NO: 17871 - DNA, 36 bp, Homo sapiens
  source 1..36: mol_type = unassigned DNA
ttgataatactcactttatcagactgttgtgggaga

SEQ ID NO: 17872 - DNA, 36 bp, Homo sapiens
  source 1..36: mol_type = unassigned DNA
tctcccacaacagtctgataaagtgagtattatcaa

SEQ ID NO: 17873 - RNA, 54 nt, Homo sapiens
  source 1..54: mol_type = unassigned RNA
tgggagaatattgatcatagagtcatagaattttggcattgggaaaagtcacaa

SEQ ID NO: 17874 - DNA, 54 bp, Homo sapiens
  source 1..54: mol_type = unassigned DNA
tgggagaatattgatcatagagtcatagaattttggcattgggaaaagtcacaa

SEQ ID NO: 17875 - DNA, 54 bp, Homo sapiens
  source 1..54: mol_type = unassigned DNA
ttgtgacttttcccaatgccaaaattctatgactctatgatcaatattctccca

SEQ ID NO: 17876 - RNA, 30 nt, Homo sapiens
  source 1..30: mol_type = unassigned RNA
ctgagattccagaacgccctgtgtccacag

SEQ ID NO: 17877 - DNA, 30 bp, Homo sapiens
  source 1..30: mol_type = unassigned DNA
ctgagattccagaacgccctgtgtccacag

SEQ ID NO: 17878 - DNA, 30 bp, Homo sapiens
  source 1..30: mol_type = unassigned DNA
ctgtggacacagggcgttctggaatctcag

SEQ ID NO: 17879 - RNA, 30 nt, Homo sapiens
  source 1..30: mol_type = unassigned RNA
gagatgaagatcaagtccctggaggagatc

SEQ ID NO: 17880 - DNA, 30 bp, Homo sapiens
  source 1..30: mol_type = unassigned DNA
gagatgaagatcaagtccctggaggagatc

SEQ ID NO: 17881 - DNA, 30 bp, Homo sapiens
  source 1..30: mol_type = unassigned DNA
gatctcctccagggacttgatcttcatctc

SEQ ID NO: 17882 - RNA, 43 nt, Homo sapiens
  source 1..43: mol_type = unassigned RNA
aaagattattctggctgctgatggatatttggccataggagag

SEQ ID NO: 17883 - DNA, 43 bp, Homo sapiens
  source 1..43: mol_type = unassigned DNA
aaagattattctggctgctgatggatatttggccataggagag

SEQ ID NO: 17884 - DNA, 43 bp, Homo sapiens
  source 1..43: mol_type = unassigned DNA
ctctcctatggccaaatatccatcagcagccagaataatcttt

SEQ ID NO: 17885 - RNA, 41 nt, Homo sapiens
  source 1..41: mol_type = unassigned RNA
ttccagctgagatattgtttatgtagtagggtgaacatttg

SEQ ID NO: 17886 - DNA, 41 bp, Homo sapiens
  source 1..41: mol_type = unassigned DNA
ttccagctgagatattgtttatgtagtagggtgaacatttg

SEQ ID NO: 17887 - DNA, 41 bp, Homo sapiens
  source 1..41: mol_type = unassigned DNA
caaatgttcaccctactacataaacaatatctcagctggaa

SEQ ID NO: 17888 - RNA, 56 nt, Homo sapiens
  source 1..56: mol_type = unassigned RNA
agcaagcatcattttagatggctatggttcctcttccgcatctgtcagtagttcac

SEQ ID NO: 17889 - DNA, 56 bp, Homo sapiens
  source 1..56: mol_type = unassigned DNA
agcaagcatcattttagatggctatggttcctcttccgcatctgtcagtagttcac

SEQ ID NO: 17890 - DNA, 56 bp, Homo sapiens
  source 1..56: mol_type = unassigned DNA
gtgaactactgacagatgcggaagaggaaccatagccatctaaaatgatgcttgct

SEQ ID NO: 17891 - RNA, 29 nt, Homo sapiens
  source 1..29: mol_type = unassigned RNA
aatttcttttatccaatgatgttgttcca

SEQ ID NO: 17892 - DNA, 29 bp, Homo sapiens
  source 1..29: mol_type = unassigned DNA
aatttcttttatccaatgatgttgttcca

SEQ ID NO: 17893 - DNA, 29 bp, Homo sapiens
  source 1..29: mol_type = unassigned DNA
tggaacaacatcattggataaaagaaatt

SEQ ID NO: 17894 - RNA, 46 nt, Homo sapiens
  source 1..46: mol_type = unassigned RNA
ctgcttttttgtttatcagaccaaagctgaatgtgaatctgatggc

SEQ ID NO: 17895 - DNA, 46 bp, Homo sapiens
  source 1..46: mol_type = unassigned DNA
ctgcttttttgtttatcagaccaaagctgaatgtgaatctgatggc

SEQ ID NO: 17896 - DNA, 46 bp, Homo sapiens
  source 1..46: mol_type = unassigned DNA
gccatcagattcacattcagctttggtctgataaacaaaaaagcag

SEQ ID NO: 17897 - RNA, 39 nt, Homo sapiens
  source 1..39: mol_type = unassigned RNA
acacaccagctccatgggctgtaaaatgtgctgctgttc

SEQ ID NO: 17898 - DNA, 39 bp, Homo sapiens
  source 1..39: mol_type = unassigned DNA
acacaccagctccatgggctgtaaaatgtgctgctgttc

SEQ ID NO: 17899 - DNA, 39 bp, Homo sapiens
  source 1..39: mol_type = unassigned DNA
gaacagcagcacattttacagcccatggagctggtgtgt

SEQ ID NO: 17900 - RNA, 27 nt, Homo sapiens
  source 1..27: mol_type = unassigned RNA
aggcaccatgagttcccactctgatcc

SEQ ID NO: 17901 - DNA, 27 bp, Homo sapiens
  source 1..27: mol_type = unassigned DNA
aggcaccatgagttcccactctgatcc

SEQ ID NO: 17902 - DNA, 27 bp, Homo sapiens
  source 1..27: mol_type = unassigned DNA
ggatcagagtgggaactcatggtgcct

SEQ ID NO: 17903 - RNA, 22 nt, Homo sapiens
  source 1..22: mol_type = unassigned RNA
ttttgttcattcggctaatgga

SEQ ID NO: 17904 - DNA, 22 bp, Homo sapiens
  source 1..22: mol_type = unassigned DNA
ttttgttcattcggctaatgga

SEQ ID NO: 17905 - DNA, 22 bp, Homo sapiens
  source 1..22: mol_type = unassigned DNA
tccattagccgaatgaacaaaa

SEQ ID NO: 17906 - RNA, 52 nt, Homo sapiens
  source 1..52: mol_type = unassigned RNA
atttagcactggtctgaactcacacaggtgtgagatgaggctctgggaagca

SEQ ID NO: 17907 - DNA, 52 bp, Homo sapiens
  source 1..52: mol_type = unassigned DNA
atttagcactggtctgaactcacacaggtgtgagatgaggctctgggaagca

SEQ ID NO: 17908 - DNA, 52 bp, Homo sapiens
  source 1..52: mol_type = unassigned DNA
tgcttcccagagcctcatctcacacctgtgtgagttcagaccagtgctaaat

SEQ ID NO: 17909 - RNA, 161 nt, Homo sapiens
  source 1..161: mol_type = unassigned RNA
cctccctcccactgggcagtccccattgctccaactgcctcctctgttgcacccaggaactcatctgggctccagcctgagggagtcaggcccatctcattctccaggcaggactgaaactgggcaggcaagaatttgggtctgaccccaggctgcctgcc

SEQ ID NO: 17910 - DNA, 161 bp, Homo sapiens
  source 1..161: mol_type = unassigned DNA
cctccctcccactgggcagtccccattgctccaactgcctcctctgttgcacccaggaactcatctgggctccagcctgagggagtcaggcccatctcattctccaggcaggactgaaactgggcaggcaagaatttgggtctgaccccaggctgcctgcc

SEQ ID NO: 17911 - DNA, 161 bp, Homo sapiens
  source 1..161: mol_type = unassigned DNA
ggcaggcagcctggggtcagacccaaattcttgcctgcccagtttcagtcctgcctggagaatgagatgggcctgactccctcaggctggagcccagatgagttcctgggtgcaacagaggaggcagttggagcaatggggactgcccagtgggagggagg

SEQ ID NO: 17912 - RNA, 31 nt, Homo sapiens
  source 1..31: mol_type = unassigned RNA
ccttaatgatttgtggaatttctgagtatta

SEQ ID NO: 17913 - DNA, 31 bp, Homo sapiens
  source 1..31: mol_type = unassigned DNA
ccttaatgatttgtggaatttctgagtatta

SEQ ID NO: 17914 - DNA, 31 bp, Homo sapiens
  source 1..31: mol_type = unassigned DNA
taatactcagaaattccacaaatcattaagg

SEQ ID NO: 17915 - RNA, 25 nt, Homo sapiens
  source 1..25: mol_type = unassigned RNA
cttagattttgatgtcttacatgaa

SEQ ID NO: 17916 - DNA, 25 bp, Homo sapiens
  source 1..25: mol_type = unassigned DNA
cttagattttgatgtcttacatgaa

SEQ ID NO: 17917 - DNA, 25 bp, Homo sapiens
  source 1..25: mol_type = unassigned DNA
ttcatgtaagacatcaaaatctaag

SEQ ID NO: 17918 - RNA, 41 nt, Homo sapiens
  source 1..41: mol_type = unassigned RNA
gaacctgaaagcttctgtgatggcactgaagaattctctta

SEQ ID NO: 17919 - DNA, 41 bp, Homo sapiens
  source 1..41: mol_type = unassigned DNA
gaacctgaaagcttctgtgatggcactgaagaattctctta

SEQ ID NO: 17920 - DNA, 41 bp, Homo sapiens
  source 1..41: mol_type = unassigned DNA
taagagaattcttcagtgccatcacagaagctttcaggttc

SEQ ID NO: 17921 - RNA, 25 nt, Homo sapiens
  source 1..25: mol_type = unassigned RNA
ttagatttgagactgatgatgacac

SEQ ID NO: 17922 - DNA, 25 bp, Homo sapiens
  source 1..25: mol_type = unassigned DNA
ttagatttgagactgatgatgacac

SEQ ID NO: 17923 - DNA, 25 bp, Homo sapiens
  source 1..25: mol_type = unassigned DNA
gtgtcatcatcagtctcaaatctaa

SEQ ID NO: 17924 - RNA, 33 nt, Homo sapiens
  source 1..33: mol_type = unassigned RNA
tagcttattagtttgttagttctgtttttgtga

SEQ ID NO: 17925 - DNA, 33 bp, Homo sapiens
  source 1..33: mol_type = unassigned DNA
tagcttattagtttgttagttctgtttttgtga

SEQ ID NO: 17926 - DNA, 33 bp, Homo sapiens
  source 1..33: mol_type = unassigned DNA
tcacaaaaacagaactaacaaactaataagcta

SEQ ID NO: 17927 - RNA, 41 nt, Homo sapiens
  source 1..41: mol_type = unassigned RNA
aagcaagttgtaaggactttttggtttctcactgtatgtaa

SEQ ID NO: 17928 - DNA, 41 bp, Homo sapiens
  source 1..41: mol_type = unassigned DNA
aagcaagttgtaaggactttttggtttctcactgtatgtaa

SEQ ID NO: 17929 - DNA, 41 bp, Homo sapiens
  source 1..41: mol_type = unassigned DNA
ttacatacagtgagaaaccaaaaagtccttacaacttgctt

SEQ ID NO: 17930 - RNA, 23 nt, Homo sapiens
  source 1..23: mol_type = unassigned RNA
cattttccagtgctgtgttggct

SEQ ID NO: 17931 - DNA, 23 bp, Homo sapiens
  source 1..23: mol_type = unassigned DNA
cattttccagtgctgtgttggct

SEQ ID NO: 17932 - DNA, 23 bp, Homo sapiens
  source 1..23: mol_type = unassigned DNA
agccaacacagcactggaaaatg

SEQ ID NO: 17933 - RNA, 34 nt, Homo sapiens
  source 1..34: mol_type = unassigned RNA
ttatatgctcaaatggtagaacccacaataatgc

SEQ ID NO: 17934 - DNA, 34 bp, Homo sapiens
  source 1..34: mol_type = unassigned DNA
ttatatgctcaaatggtagaacccacaataatgc

SEQ ID NO: 17935 - DNA, 34 bp, Homo sapiens
  source 1..34: mol_type = unassigned DNA
gcattattgtgggttctaccatttgagcatataa

SEQ ID NO: 17936 - RNA, 45 nt, Homo sapiens
  source 1..45: mol_type = unassigned RNA
tctaaaatcggagtgatgttgaccagtcatttgttctgtttcctg

SEQ ID NO: 17937 - DNA, 45 bp, Homo sapiens
  source 1..45: mol_type = unassigned DNA
tctaaaatcggagtgatgttgaccagtcatttgttctgtttcctg

SEQ ID NO: 17938 - DNA, 45 bp, Homo sapiens
  source 1..45: mol_type = unassigned DNA
caggaaacagaacaaatgactggtcaacatcactccgattttaga

SEQ ID NO: 17939 - RNA, 46 nt, Homo sapiens
  source 1..46: mol_type = unassigned RNA
ctcagcacagtataaaccactctctgggaactccagaattttgtct

SEQ ID NO: 17940 - DNA, 46 bp, Homo sapiens
  source 1..46: mol_type = unassigned DNA
ctcagcacagtataaaccactctctgggaactccagaattttgtct

SEQ ID NO: 17941 - DNA, 46 bp, Homo sapiens
  source 1..46: mol_type = unassigned DNA
agacaaaattctggagttcccagagagtggtttatactgtgctgag

SEQ ID NO: 17942 - RNA, 74 nt, Homo sapiens
  source 1..74: mol_type = unassigned RNA
ccttgcctcccaccctcccgctctgcgctcctgctgtacctggaagcaggtgatggccctggtagacgtccccc

SEQ ID NO: 17943 - DNA, 74 bp, Homo sapiens
  source 1..74: mol_type = unassigned DNA
ccttgcctcccaccctcccgctctgcgctcctgctgtacctggaagcaggtgatggccctggtagacgtccccc

SEQ ID NO: 17944 - DNA, 74 bp, Homo sapiens
  source 1..74: mol_type = unassigned DNA
gggggacgtctaccagggccatcacctgcttccaggtacagcaggagcgcagagcgggagggtgggaggcaagg

SEQ ID NO: 17945 - RNA, 26 nt, Homo sapiens
  source 1..26: mol_type = unassigned RNA
tcctttaatggtagaattcactggtg

SEQ ID NO: 17946 - DNA, 26 bp, Homo sapiens
  source 1..26: mol_type = unassigned DNA
tcctttaatggtagaattcactggtg

SEQ ID NO: 17947 - DNA, 26 bp, Homo sapiens
  source 1..26: mol_type = unassigned DNA
caccagtgaattctaccattaaagga

SEQ ID NO: 17948 - RNA, 33 nt, Homo sapiens
  source 1..33: mol_type = unassigned RNA
ccctactccagtccattctcacagtgatgttta

SEQ ID NO: 17949 - DNA, 33 bp, Homo sapiens
  source 1..33: mol_type = unassigned DNA
ccctactccagtccattctcacagtgatgttta

SEQ ID NO: 17950 - DNA, 33 bp, Homo sapiens
  source 1..33: mol_type = unassigned DNA
taaacatcactgtgagaatggactggagtaggg

SEQ ID NO: 17951 - RNA, 29 nt, Homo sapiens
  source 1..29: mol_type = unassigned RNA
gaactctcagataccacactgatgctgat

SEQ ID NO: 17952 - DNA, 29 bp, Homo sapiens
  source 1..29: mol_type = unassigned DNA
gaactctcagataccacactgatgctgat

SEQ ID NO: 17953 - DNA, 29 bp, Homo sapiens
  source 1..29: mol_type = unassigned DNA
atcagcatcagtgtggtatctgagagttc

SEQ ID NO: 17954 - RNA, 23 nt, Homo sapiens
  source 1..23: mol_type = unassigned RNA
ttacagtactcttataatttagt

SEQ ID NO: 17955 - DNA, 23 bp, Homo sapiens
  source 1..23: mol_type = unassigned DNA
ttacagtactcttataatttagt

SEQ ID NO: 17956 - DNA, 23 bp, Homo sapiens
  source 1..23: mol_type = unassigned DNA
actaaattataagagtactgtaa

SEQ ID NO: 17957 - RNA, 186 nt, Homo sapiens
  source 1..186: mol_type = unassigned RNA
agcgccgtgccttaccttcagggtctcaaggcactttcctgtgttgcagtcccagactttgacctggaaaaggaggggggcatgtcaggaagcctcaccaggccactgtggcatctgaagccacctccaggaaagtcccagacaaaatatgagatgagtcttcgcctgaactcctgacctcaggtg

SEQ ID NO: 17958 - DNA, 186 bp, Homo sapiens
  source 1..186: mol_type = unassigned DNA
agcgccgtgccttaccttcagggtctcaaggcactttcctgtgttgcagtcccagactttgacctggaaaaggaggggggcatgtcaggaagcctcaccaggccactgtggcatctgaagccacctccaggaaagtcccagacaaaatatgagatgagtcttcgcctgaactcctgacctcaggtg

SEQ ID NO: 17959 - DNA, 186 bp, Homo sapiens
  source 1..186: mol_type = unassigned DNA
cacctgaggtcaggagttcaggcgaagactcatctcatattttgtctgggactttcctggaggtggcttcagatgccacagtggcctggtgaggcttcctgacatgcccccctccttttccaggtcaaagtctgggactgcaacacaggaaagtgccttgagaccctgaaggtaaggcacggcgct

SEQ ID NO: 17960 - RNA, 37 nt, Homo sapiens
  source 1..37: mol_type = unassigned RNA
gagaaggccagggccttgcccaggacgggtgggcact

SEQ ID NO: 17961 - DNA, 37 bp, Homo sapiens
  source 1..37: mol_type = unassigned DNA
gagaaggccagggccttgcccaggacgggtgggcact

SEQ ID NO: 17962 - DNA, 37 bp, Homo sapiens
  source 1..37: mol_type = unassigned DNA
agtgcccacccgtcctgggcaaggccctggccttctc

SEQ ID NO: 17963 - RNA, 31 nt, Homo sapiens
  source 1..31: mol_type = unassigned RNA
cccagtgttggctgtggctatgggcagcaac

SEQ ID NO: 17964 - DNA, 31 bp, Homo sapiens
  source 1..31: mol_type = unassigned DNA
cccagtgttggctgtggctatgggcagcaac

SEQ ID NO: 17965 - DNA, 31 bp, Homo sapiens
  source 1..31: mol_type = unassigned DNA
gttgctgcccatagccacagccaacactggg

SEQ ID NO: 17966 - RNA, 29 nt, Homo sapiens
  source 1..29: mol_type = unassigned RNA
agatctttgaagattttgcccagtcctgg

SEQ ID NO: 17967 - DNA, 29 bp, Homo sapiens
  source 1..29: mol_type = unassigned DNA
agatctttgaagattttgcccagtcctgg

SEQ ID NO: 17968 - DNA, 29 bp, Homo sapiens
  source 1..29: mol_type = unassigned DNA
ccaggactgggcaaaatcttcaaagatct

SEQ ID NO: 17969 - RNA, 32 nt, Homo sapiens
  source 1..32: mol_type = unassigned RNA
caaaccagaactcttggtggaacagaccagcc

SEQ ID NO: 17970 - DNA, 32 bp, Homo sapiens
  source 1..32: mol_type = unassigned DNA
caaaccagaactcttggtggaacagaccagcc

SEQ ID NO: 17971 - DNA, 32 bp, Homo sapiens
  source 1..32: mol_type = unassigned DNA
ggctggtctgttccaccaagagttctggtttg

SEQ ID NO: 17972 - RNA, 32 nt, Homo sapiens
  source 1..32: mol_type = unassigned RNA
gcaatcagctgagttgagactttggaataaga

SEQ ID NO: 17973 - DNA, 32 bp, Homo sapiens
  source 1..32: mol_type = unassigned DNA
gcaatcagctgagttgagactttggaataaga

SEQ ID NO: 17974 - DNA, 32 bp, Homo sapiens
  source 1..32: mol_type = unassigned DNA
tcttattccaaagtctcaactcagctgattgc

SEQ ID NO: 17975 - RNA, 22 nt, Homo sapiens
  source 1..22: mol_type = unassigned RNA
tagcctctcgagtgatgttgga

SEQ ID NO: 17976 - DNA, 22 bp, Homo sapiens
  source 1..22: mol_type = unassigned DNA
tagcctctcgagtgatgttgga

SEQ ID NO: 17977 - DNA, 22 bp, Homo sapiens
  source 1..22: mol_type = unassigned DNA
tccaacatcactcgagaggcta

SEQ ID NO: 17978 - RNA, 50 nt, Homo sapiens
  source 1..50: mol_type = unassigned RNA
gattgccaacttaacatgccagctctgaatgcagatgaactgccccttgt

SEQ ID NO: 17979 - DNA, 50 bp, Homo sapiens
  source 1..50: mol_type = unassigned DNA
gattgccaacttaacatgccagctctgaatgcagatgaactgccccttgt

SEQ ID NO: 17980 - DNA, 50 bp, Homo sapiens
  source 1..50: mol_type = unassigned DNA
acaaggggcagttcatctgcattcagagctggcatgttaagttggcaatc

SEQ ID NO: 17981 - RNA, 41 nt, Homo sapiens
  source 1..41: mol_type = unassigned RNA
tcccaaaacctgaaaactcagcattgttcatggctatcatc

SEQ ID NO: 17982 - DNA, 41 bp, Homo sapiens
  source 1..41: mol_type = unassigned DNA
tcccaaaacctgaaaactcagcattgttcatggctatcatc

SEQ ID NO: 17983 - DNA, 41 bp, Homo sapiens
  source 1..41: mol_type = unassigned DNA
gatgatagccatgaacaatgctgagttttcaggttttggga

SEQ ID NO: 17984 - RNA, 31 nt, Homo sapiens
  source 1..31: mol_type = unassigned RNA
tgttctctttgactggagatccttgaggatt

SEQ ID NO: 17985 - DNA, 31 bp, Homo sapiens
  source 1..31: mol_type = unassigned DNA
tgttctctttgactggagatccttgaggatt

SEQ ID NO: 17986 - DNA, 31 bp, Homo sapiens
  source 1..31: mol_type = unassigned DNA
aatcctcaaggatctccagtcaaagagaaca

SEQ ID NO: 17987 - RNA, 52 nt, Homo sapiens
  source 1..52: mol_type = unassigned RNA
caataattttgagaggcaaaaagtagatactctgtttgaataatgacacatc

SEQ ID NO: 17988 - DNA, 52 bp, Homo sapiens
  source 1..52: mol_type = unassigned DNA
caataattttgagaggcaaaaagtagatactctgtttgaataatgacacatc

SEQ ID NO: 17989 - DNA, 52 bp, Homo sapiens
  source 1..52: mol_type = unassigned DNA
gatgtgtcattattcaaacagagtatctactttttgcctctcaaaattattg

SEQ ID NO: 17990 - RNA, 70 nt, Homo sapiens
  source 1..70: mol_type = unassigned RNA
aggggaactgtgacgttgcctcacccaggcagtgaccagggttgacatctagtctccgactctgttttct

SEQ ID NO: 17991 - DNA, 70 bp, Homo sapiens
  source 1..70: mol_type = unassigned DNA
aggggaactgtgacgttgcctcacccaggcagtgaccagggttgacatctagtctccgactctgttttct

SEQ ID NO: 17992 - DNA, 70 bp, Homo sapiens
  source 1..70: mol_type = unassigned DNA
agaaaacagagtcggagactagatgtcaaccctggtcactgcctgggtgaggcaacgtcacagttcccct

SEQ ID NO: 17993 - RNA, 42 nt, Homo sapiens
  source 1..42: mol_type = unassigned RNA
gacttcagtggaagaattcactgtggatagggtagaaatagc

SEQ ID NO: 17994 - DNA, 42 bp, Homo sapiens
  source 1..42: mol_type = unassigned DNA
gacttcagtggaagaattcactgtggatagggtagaaatagc

SEQ ID NO: 17995 - DNA, 42 bp, Homo sapiens
  source 1..42: mol_type = unassigned DNA
gctatttctaccctatccacagtgaattcttccactgaagtc

SEQ ID NO: 17996 - RNA, 35 nt, Homo sapiens
  source 1..35: mol_type = unassigned RNA
caactatcagctctgctccgagatcagcgagcctg

SEQ ID NO: 17997 - DNA, 35 bp, Homo sapiens
  source 1..35: mol_type = unassigned DNA
caactatcagctctgctccgagatcagcgagcctg

SEQ ID NO: 17998 - DNA, 35 bp, Homo sapiens
  source 1..35: mol_type = unassigned DNA
caggctcgctgatctcggagcagagctgatagttg

SEQ ID NO: 17999 - RNA, 63 nt, Homo sapiens
  source 1..63: mol_type = unassigned RNA
ctcccggacacgacaatgggttcggcgcgcctcctccccccaccgcggggcagacgcaggtgc

SEQ ID NO: 18000 - DNA, 63 bp, Homo sapiens
  source 1..63: mol_type = unassigned DNA
ctcccggacacgacaatgggttcggcgcgcctcctccccccaccgcggggcagacgcaggtgc

SEQ ID NO: 18001 - DNA, 63 bp, Homo sapiens
  source 1..63: mol_type = unassigned DNA
gcacctgcgtctgccccgcggtggggggaggaggcgcgccgaacccattgtcgtgtccgggag

SEQ ID NO: 18002 - RNA, 27 nt, Homo sapiens
  source 1..27: mol_type = unassigned RNA
cttccaggtaaaggctggaaggcttta

SEQ ID NO: 18003 - DNA, 27 bp, Homo sapiens
  source 1..27: mol_type = unassigned DNA
cttccaggtaaaggctggaaggcttta

SEQ ID NO: 18004 - DNA, 27 bp, Homo sapiens
  source 1..27: mol_type = unassigned DNA
taaagccttccagcctttacctggaag

SEQ ID NO: 18005 - RNA, 44 nt, Homo sapiens
  source 1..44: mol_type = unassigned RNA
attctactccccagatcctctcccctggacacaggagacccaca

SEQ ID NO: 18006 - DNA, 44 bp, Homo sapiens
  source 1..44: mol_type = unassigned DNA
attctactccccagatcctctcccctggacacaggagacccaca

SEQ ID NO: 18007 - DNA, 44 bp, Homo sapiens
  source 1..44: mol_type = unassigned DNA
tgtgggtctcctgtgtccaggggagaggatctggggagtagaat

SEQ ID NO: 18008 - RNA, 27 nt, Homo sapiens
  source 1..27: mol_type = unassigned RNA
ctcaagccccattgacctcatggaggg

SEQ ID NO: 18009 - DNA, 27 bp, Homo sapiens
  source 1..27: mol_type = unassigned DNA
ctcaagccccattgacctcatggaggg

SEQ ID NO: 18010 - DNA, 27 bp, Homo sapiens
  source 1..27: mol_type = unassigned DNA
ccctccatgaggtcaatggggcttgag

SEQ ID NO: 18011 - RNA, 50 nt, Homo sapiens
  source 1..50: mol_type = unassigned RNA
gttgcagagccaccagagccatcttttcatactgatgtagaaataaagac

SEQ ID NO: 18012 - DNA, 50 bp, Homo sapiens
  source 1..50: mol_type = unassigned DNA
gttgcagagccaccagagccatcttttcatactgatgtagaaataaagac

SEQ ID NO: 18013 - DNA, 50 bp, Homo sapiens
  source 1..50: mol_type = unassigned DNA
gtctttatttctacatcagtatgaaaagatggctctggtggctctgcaac

SEQ ID NO: 18014 - RNA, 39 nt, Homo sapiens
  source 1..39: mol_type = unassigned RNA
ttcccttatcaaactgcttttgcaccttagccaaaaacc

SEQ ID NO: 18015 - DNA, 39 bp, Homo sapiens
  source 1..39: mol_type = unassigned DNA
ttcccttatcaaactgcttttgcaccttagccaaaaacc

SEQ ID NO: 18016 - DNA, 39 bp, Homo sapiens
  source 1..39: mol_type = unassigned DNA
ggtttttggctaaggtgcaaaagcagtttgataagggaa

SEQ ID NO: 18017 - RNA, 31 nt, Homo sapiens
  source 1..31: mol_type = unassigned RNA
tatacaggactgaaaaccgcctgaaacctgc

SEQ ID NO: 18018 - DNA, 31 bp, Homo sapiens
  source 1..31: mol_type = unassigned DNA
tatacaggactgaaaaccgcctgaaacctgc

SEQ ID NO: 18019 - DNA, 31 bp, Homo sapiens
  source 1..31: mol_type = unassigned DNA
gcaggtttcaggcggttttcagtcctgtata

SEQ ID NO: 18020 - RNA, 52 nt, Homo sapiens
  source 1..52: mol_type = unassigned RNA
tcttgcttatatggcttatgttgacatttggaccctgtgtactcaatactat

SEQ ID NO: 18021 - DNA, 52 bp, Homo sapiens
  source 1..52: mol_type = unassigned DNA
tcttgcttatatggcttatgttgacatttggaccctgtgtactcaatactat

SEQ ID NO: 18022 - DNA, 52 bp, Homo sapiens
  source 1..52: mol_type = unassigned DNA
atagtattgagtacacagggtccaaatgtcaacataagccatataagcaaga

SEQ ID NO: 18023 - RNA, 30 nt, Homo sapiens
  source 1..30: mol_type = unassigned RNA
caacaggctgtagaaggggatgacgaggac

SEQ ID NO: 18024 - DNA, 30 bp, Homo sapiens
  source 1..30: mol_type = unassigned DNA
caacaggctgtagaaggggatgacgaggac

SEQ ID NO: 18025 - DNA, 30 bp, Homo sapiens
  source 1..30: mol_type = unassigned DNA
gtcctcgtcatccccttctacagcctgttg

SEQ ID NO: 18026 - RNA, 24 nt, Homo sapiens
  source 1..24: mol_type = unassigned RNA
tgagttccttcggcttacgtgttt

SEQ ID NO: 18027 - DNA, 24 bp, Homo sapiens
  source 1..24: mol_type = unassigned DNA
tgagttccttcggcttacgtgttt

SEQ ID NO: 18028 - DNA, 24 bp, Homo sapiens
  source 1..24: mol_type = unassigned DNA
aaacacgtaagccgaaggaactca

SEQ ID NO: 18029 - RNA, 32 nt, Homo sapiens
  source 1..32: mol_type = unassigned RNA
ttgttcttgtcaccagatgtgttcagacattg

SEQ ID NO: 18030 - DNA, 32 bp, Homo sapiens
  source 1..32: mol_type = unassigned DNA
ttgttcttgtcaccagatgtgttcagacattg

SEQ ID NO: 18031 - DNA, 32 bp, Homo sapiens
  source 1..32: mol_type = unassigned DNA
caatgtctgaacacatctggtgacaagaacaa

SEQ ID NO: 18032 - RNA, 33 nt, Homo sapiens
  source 1..33: mol_type = unassigned RNA
tgctcttgtgggctgtggttgctgtgacagttt

SEQ ID NO: 18033 - DNA, 33 bp, Homo sapiens
  source 1..33: mol_type = unassigned DNA
tgctcttgtgggctgtggttgctgtgacagttt

SEQ ID NO: 18034 - DNA, 33 bp, Homo sapiens
  source 1..33: mol_type = unassigned DNA
aaactgtcacagcaaccacagcccacaagagca

SEQ ID NO: 18035 - RNA, 185 nt, Homo sapiens
  source 1..185: mol_type = unassigned RNA
cccacatcagttcaacatcctctggtttttctaaagggctattcatctgtttgctccagttttctgttttgttttgttcttagtggtcacagtcatctaaccaaagtgatctagtgtgatagatcgaaattaacatatttttgaccatggaaggaaataaggaaattcaacccaaatttcccaag

SEQ ID NO: 18036 - DNA, 185 bp, Homo sapiens
  source 1..185: mol_type = unassigned DNA
cccacatcagttcaacatcctctggtttttctaaagggctattcatctgtttgctccagttttctgttttgttttgttcttagtggtcacagtcatctaaccaaagtgatctagtgtgatagatcgaaattaacatatttttgaccatggaaggaaataaggaaattcaacccaaatttcccaag

SEQ ID NO: 18037 - DNA, 185 bp, Homo sapiens
  source 1..185: mol_type = unassigned DNA
cttgggaaatttgggttgaatttccttatttccttccatggtcaaaaatatgttaatttcgatctatcacactagatcactttggttagatgactgtgaccactaagaacaaaacaaaacagaaaactggagcaaacagatgaatagccctttagaaaaaccagaggatgttgaactgatgtggg

SEQ ID NO: 18038 - RNA, 50 nt, Homo sapiens
  source 1..50: mol_type = unassigned RNA
catattagactgaacaatgctgacactgagatagtgaactgcagctattg

SEQ ID NO: 18039 - DNA, 50 bp, Homo sapiens
  source 1..50: mol_type = unassigned DNA
catattagactgaacaatgctgacactgagatagtgaactgcagctattg

SEQ ID NO: 18040 - DNA, 50 bp, Homo sapiens
  source 1..50: mol_type = unassigned DNA
caatagctgcagttcactatctcagtgtcagcattgttcagtctaatatg

SEQ ID NO: 18041 - RNA, 42 nt, Homo sapiens
  source 1..42: mol_type = unassigned RNA
ccctgagatgctgaaagcactgtgaacaaagaaaatttggga

SEQ ID NO: 18042 - DNA, 42 bp, Homo sapiens
  source 1..42: mol_type = unassigned DNA
ccctgagatgctgaaagcactgtgaacaaagaaaatttggga

SEQ ID NO: 18043 - DNA, 42 bp, Homo sapiens
  source 1..42: mol_type = unassigned DNA
tcccaaattttctttgttcacagtgctttcagcatctcaggg

SEQ ID NO: 18044 - RNA, 32 nt, Homo sapiens
  source 1..32: mol_type = unassigned RNA
cacacgacacgggcagcttcacaagccatctc

SEQ ID NO: 18045 - DNA, 32 bp, Homo sapiens
  source 1..32: mol_type = unassigned DNA
cacacgacacgggcagcttcacaagccatctc

SEQ ID NO: 18046 - DNA, 32 bp, Homo sapiens
  source 1..32: mol_type = unassigned DNA
gagatggcttgtgaagctgcccgtgtcgtgtg

SEQ ID NO: 18047 - RNA, 22 nt, Homo sapiens
  source 1..22: mol_type = unassigned RNA
ctttttttatgatttacatgga

SEQ ID NO: 18048 - DNA, 22 bp, Homo sapiens
  source 1..22: mol_type = unassigned DNA
ctttttttatgatttacatgga

SEQ ID NO: 18049 - DNA, 22 bp, Homo sapiens
  source 1..22: mol_type = unassigned DNA
tccatgtaaatcataaaaaaag

SEQ ID NO: 18050 - RNA, 22 nt, Homo sapiens
  source 1..22: mol_type = unassigned RNA
ggtttgtgtttacttaaatgta

SEQ ID NO: 18051 - DNA, 22 bp, Homo sapiens
  source 1..22: mol_type = unassigned DNA
ggtttgtgtttacttaaatgta

SEQ ID NO: 18052 - DNA, 22 bp, Homo sapiens
  source 1..22: mol_type = unassigned DNA
tacatttaagtaaacacaaacc

SEQ ID NO: 18053 - RNA, 128 nt, Homo sapiens
  source 1..128: mol_type = unassigned RNA
tcatttggctgtgagtgatagagggatgaaatgggatttttgttgggattgaagactgtaatctaagagtttcaatcagacatgactgtgacgtgcatcctcaattagaattaaagtgatgtataaat

SEQ ID NO: 18054 - DNA, 128 bp, Homo sapiens
  source 1..128: mol_type = unassigned DNA
tcatttggctgtgagtgatagagggatgaaatgggatttttgttgggattgaagactgtaatctaagagtttcaatcagacatgactgtgacgtgcatcctcaattagaattaaagtgatgtataaat

SEQ ID NO: 18055 - DNA, 128 bp, Homo sapiens
  source 1..128: mol_type = unassigned DNA
atttatacatcactttaattctaattgaggatgcacgtcacagtcatgtctgattgaaactcttagattacagtcttcaatcccaacaaaaatcccatttcatccctctatcactcacagccaaatga

SEQ ID NO: 18056 - RNA, 45 nt, Homo sapiens
  source 1..45: mol_type = unassigned RNA
tacccagagcactttgaacaaaggtcagtggggattgttgaatac

SEQ ID NO: 18057 - DNA, 45 bp, Homo sapiens
  source 1..45: mol_type = unassigned DNA
tacccagagcactttgaacaaaggtcagtggggattgttgaatac

SEQ ID NO: 18058 - DNA, 45 bp, Homo sapiens
  source 1..45: mol_type = unassigned DNA
gtattcaacaatccccactgacctttgttcaaagtgctctgggta

SEQ ID NO: 18059 - RNA, 47 nt, Homo sapiens
  source 1..47: mol_type = unassigned RNA
tagctgatgcaactaatccagagagtaaggtcttctaattgaaaatg

SEQ ID NO: 18060 - DNA, 47 bp, Homo sapiens
  source 1..47: mol_type = unassigned DNA
tagctgatgcaactaatccagagagtaaggtcttctaattgaaaatg

SEQ ID NO: 18061 - DNA, 47 bp, Homo sapiens
  source 1..47: mol_type = unassigned DNA
cattttcaattagaagaccttactctctggattagttgcatcagcta

SEQ ID NO: 18062 - RNA, 31 nt, Homo sapiens
  source 1..31: mol_type = unassigned RNA
ggacactccagctcggggactgctggcgtgt

SEQ ID NO: 18063 - DNA, 31 bp, Homo sapiens
  source 1..31: mol_type = unassigned DNA
ggacactccagctcggggactgctggcgtgt

SEQ ID NO: 18064 - DNA, 31 bp, Homo sapiens
  source 1..31: mol_type = unassigned DNA
acacgccagcagtccccgagctggagtgtcc

SEQ ID NO: 18065 - RNA, 24 nt, Homo sapiens
  source 1..24: mol_type = unassigned RNA
tcagttaacagagtgctgcttaat

SEQ ID NO: 18066 - DNA, 24 bp, Homo sapiens
  source 1..24: mol_type = unassigned DNA
tcagttaacagagtgctgcttaat

SEQ ID NO: 18067 - DNA, 24 bp, Homo sapiens
  source 1..24: mol_type = unassigned DNA
attaagcagcactctgttaactga

SEQ ID NO: 18068 - RNA, 34 nt, Homo sapiens
  source 1..34: mol_type = unassigned RNA
cctctcggaaggtcgtgccatgcctagtgacacc

SEQ ID NO: 18069 - DNA, 34 bp, Homo sapiens
  source 1..34: mol_type = unassigned DNA
cctctcggaaggtcgtgccatgcctagtgacacc

SEQ ID NO: 18070 - DNA, 34 bp, Homo sapiens
  source 1..34: mol_type = unassigned DNA
ggtgtcactaggcatggcacgaccttccgagagg

SEQ ID NO: 18071 - RNA, 34 nt, Homo sapiens
  source 1..34: mol_type = unassigned RNA
aggagaacatgactggggacccacttaagaaagc

SEQ ID NO: 18072 - DNA, 34 bp, Homo sapiens
  source 1..34: mol_type = unassigned DNA
aggagaacatgactggggacccacttaagaaagc

SEQ ID NO: 18073 - DNA, 34 bp, Homo sapiens
  source 1..34: mol_type = unassigned DNA
gctttcttaagtgggtccccagtcatgttctcct

SEQ ID NO: 18074 - RNA, 27 nt, Homo sapiens
  source 1..27: mol_type = unassigned RNA
gcaaggcactgggagaaggcactgtgc

SEQ ID NO: 18075 - DNA, 27 bp, Homo sapiens
  source 1..27: mol_type = unassigned DNA
gcaaggcactgggagaaggcactgtgc

SEQ ID NO: 18076 - DNA, 27 bp, Homo sapiens
  source 1..27: mol_type = unassigned DNA
gcacagtgccttctcccagtgccttgc

SEQ ID NO: 18077 - RNA, 100 nt, Homo sapiens
  source 1..100: mol_type = unassigned RNA
cttgttttgcaccacacagatctgattagaactagaattagttgggctggcaggacccaggggcgagcagagagttcctgaaggaagaggagacaataac

SEQ ID NO: 18078 - DNA, 100 bp, Homo sapiens
  source 1..100: mol_type = unassigned DNA
cttgttttgcaccacacagatctgattagaactagaattagttgggctggcaggacccaggggcgagcagagagttcctgaaggaagaggagacaataac

SEQ ID NO: 18079 - DNA, 100 bp, Homo sapiens
  source 1..100: mol_type = unassigned DNA
gttattgtctcctcttccttcaggaactctctgctcgcccctgggtcctgccagcccaactaattctagttctaatcagatctgtgtggtgcaaaacaag

SEQ ID NO: 18080 - RNA, 59 nt, Homo sapiens
  source 1..59: mol_type = unassigned RNA
tttccttaaatgactggtagaattcacatgtgaaactacctggtcctgagattttcttt

SEQ ID NO: 18081 - DNA, 59 bp, Homo sapiens
  source 1..59: mol_type = unassigned DNA
tttccttaaatgactggtagaattcacatgtgaaactacctggtcctgagattttcttt

SEQ ID NO: 18082 - DNA, 59 bp, Homo sapiens
  source 1..59: mol_type = unassigned DNA
aaagaaaatctcaggaccaggtagtttcacatgtgaattctaccagtcatttaaggaaa

SEQ ID NO: 18083 - RNA, 58 nt, Homo sapiens
  source 1..58: mol_type = unassigned RNA
atttgagagaaaggctctggtgcactggatgtgggggcaacagatgactccactgtgg

SEQ ID NO: 18084 - DNA, 58 bp, Homo sapiens
  source 1..58: mol_type = unassigned DNA
atttgagagaaaggctctggtgcactggatgtgggggcaacagatgactccactgtgg

SEQ ID NO: 18085 - DNA, 58 bp, Homo sapiens
  source 1..58: mol_type = unassigned DNA
ccacagtggagtcatctgttgcccccacatccagtgcaccagagcctttctctcaaat

SEQ ID NO: 18086 - RNA, 37 nt, Homo sapiens
  source 1..37: mol_type = unassigned RNA
cgtgtgcgtgagaccagagcccaggactgagggctcc

SEQ ID NO: 18087 - DNA, 37 bp, Homo sapiens
  source 1..37: mol_type = unassigned DNA
cgtgtgcgtgagaccagagcccaggactgagggctcc

SEQ ID NO: 18088 - DNA, 37 bp, Homo sapiens
  source 1..37: mol_type = unassigned DNA
ggagccctcagtcctgggctctggtctcacgcacacg

SEQ ID NO: 18089 - RNA, 31 nt, Homo sapiens
  source 1..31: mol_type = unassigned RNA
tcacattgtcccggttgctgtagctttatgg

SEQ ID NO: 18090 - DNA, 31 bp, Homo sapiens
  source 1..31: mol_type = unassigned DNA
tcacattgtcccggttgctgtagctttatgg

SEQ ID NO: 18091 - DNA, 31 bp, Homo sapiens
  source 1..31: mol_type = unassigned DNA
ccataaagctacagcaaccgggacaatgtga

SEQ ID NO: 18092 - RNA, 143 nt, Homo sapiens
  source 1..143: mol_type = unassigned RNA
ttaaacaacttcactttgcatttaaaaactcgaaggacagcgaaggtgaaatcaattcacgggccacctagactttccagtctaggactagagctgtagcaatgatctgttgtgctgtacaagaaaagagaaagaggtgttca

SEQ ID NO: 18093 - DNA, 143 bp, Homo sapiens
  source 1..143: mol_type = unassigned DNA
ttaaacaacttcactttgcatttaaaaactcgaaggacagcgaaggtgaaatcaattcacgggccacctagactttccagtctaggactagagctgtagcaatgatctgttgtgctgtacaagaaaagagaaagaggtgttca

SEQ ID NO: 18094 - DNA, 143 bp, Homo sapiens
  source 1..143: mol_type = unassigned DNA
tgaacacctctttctcttttcttgtacagcacaacagatcattgctacagctctagtcctagactggaaagtctaggtggcccgtgaattgatttcaccttcgctgtccttcgagtttttaaatgcaaagtgaagttgtttaa

SEQ ID NO: 18095 - RNA, 28 nt, Homo sapiens
  source 1..28: mol_type = unassigned RNA
ctacaggaaggaactcgtgggccacgcg

SEQ ID NO: 18096 - DNA, 28 bp, Homo sapiens
  source 1..28: mol_type = unassigned DNA
ctacaggaaggaactcgtgggccacgcg

SEQ ID NO: 18097 - DNA, 28 bp, Homo sapiens
  source 1..28: mol_type = unassigned DNA
cgcgtggcccacgagttccttcctgtag

SEQ ID NO: 18098 - RNA, 22 nt, Homo sapiens
  source 1..22: mol_type = unassigned RNA
caactgtgaaatcttggaccga

SEQ ID NO: 18099 - DNA, 22 bp, Homo sapiens
  source 1..22: mol_type = unassigned DNA
caactgtgaaatcttggaccga

SEQ ID NO: 18100 - DNA, 22 bp, Homo sapiens
  source 1..22: mol_type = unassigned DNA
tcggtccaagatttcacagttg

SEQ ID NO: 18101 - RNA, 29 nt, Homo sapiens
  source 1..29: mol_type = unassigned RNA
ttctcccaggtatccagtcggaattcttt

SEQ ID NO: 18102 - DNA, 29 bp, Homo sapiens
  source 1..29: mol_type = unassigned DNA
ttctcccaggtatccagtcggaattcttt

SEQ ID NO: 18103 - DNA, 29 bp, Homo sapiens
  source 1..29: mol_type = unassigned DNA
aaagaattccgactggatacctgggagaa

SEQ ID NO: 18104 - RNA, 32 nt, Homo sapiens
  source 1..32: mol_type = unassigned RNA
agacttctacctgtaacatctctgtagaaatt

SEQ ID NO: 18105 - DNA, 32 bp, Homo sapiens
  source 1..32: mol_type = unassigned DNA
agacttctacctgtaacatctctgtagaaatt

SEQ ID NO: 18106 - DNA, 32 bp, Homo sapiens
  source 1..32: mol_type = unassigned DNA
aatttctacagagatgttacaggtagaagtct

SEQ ID NO: 18107 - RNA, 30 nt, Homo sapiens
  source 1..30: mol_type = unassigned RNA
ttcctgttacccagattgttcggaaagtat

SEQ ID NO: 18108 - DNA, 30 bp, Homo sapiens
  source 1..30: mol_type = unassigned DNA
ttcctgttacccagattgttcggaaagtat

SEQ ID NO: 18109 - DNA, 30 bp, Homo sapiens
  source 1..30: mol_type = unassigned DNA
atactttccgaacaatctgggtaacaggaa

SEQ ID NO: 18110 - RNA, 31 nt, Homo sapiens
  source 1..31: mol_type = unassigned RNA
cataggactccatctttagcgagacaccaga

SEQ ID NO: 18111 - DNA, 31 bp, Homo sapiens
  source 1..31: mol_type = unassigned DNA
cataggactccatctttagcgagacaccaga

SEQ ID NO: 18112 - DNA, 31 bp, Homo sapiens
  source 1..31: mol_type = unassigned DNA
tctggtgtctcgctaaagatggagtcctatg

SEQ ID NO: 18113 - RNA, 31 nt, Homo sapiens
  source 1..31: mol_type = unassigned RNA
tgtaaacgtaaaggaaaccagaccgcgctac

SEQ ID NO: 18114 - DNA, 31 bp, Homo sapiens
  source 1..31: mol_type = unassigned DNA
tgtaaacgtaaaggaaaccagaccgcgctac

SEQ ID NO: 18115 - DNA, 31 bp, Homo sapiens
  source 1..31: mol_type = unassigned DNA
gtagcgcggtctggtttcctttacgtttaca

SEQ ID NO: 18116 - RNA, 31 nt, Homo sapiens
  source 1..31: mol_type = unassigned RNA
ttctctctcccagataagttggtcctccctc

SEQ ID NO: 18117 - DNA, 31 bp, Homo sapiens
  source 1..31: mol_type = unassigned DNA
ttctctctcccagataagttggtcctccctc

SEQ ID NO: 18118 - DNA, 31 bp, Homo sapiens
  source 1..31: mol_type = unassigned DNA
gagggaggaccaacttatctgggagagagaa

SEQ ID NO: 18119 - RNA, 54 nt, Homo sapiens
  source 1..54: mol_type = unassigned RNA
tattttataggctgtagatgattggtaaactctccattgtagaactcacatagt

SEQ ID NO: 18120 - DNA, 54 bp, Homo sapiens
  source 1..54: mol_type = unassigned DNA
tattttataggctgtagatgattggtaaactctccattgtagaactcacatagt

SEQ ID NO: 18121 - DNA, 54 bp, Homo sapiens
  source 1..54: mol_type = unassigned DNA
actatgtgagttctacaatggagagtttaccaatcatctacagcctataaaata

SEQ ID NO: 18122 - RNA, 26 nt, Homo sapiens
  source 1..26: mol_type = unassigned RNA
tttttttggttcggctgcctgcctgc

SEQ ID NO: 18123 - DNA, 26 bp, Homo sapiens
  source 1..26: mol_type = unassigned DNA
tttttttggttcggctgcctgcctgc

SEQ ID NO: 18124 - DNA, 26 bp, Homo sapiens
  source 1..26: mol_type = unassigned DNA
gcaggcaggcagccgaaccaaaaaaa

SEQ ID NO: 18125 - RNA, 29 nt, Homo sapiens
  source 1..29: mol_type = unassigned RNA
atttcccaagctctgttcaagttaaactt

SEQ ID NO: 18126 - DNA, 29 bp, Homo sapiens
  source 1..29: mol_type = unassigned DNA
atttcccaagctctgttcaagttaaactt

SEQ ID NO: 18127 - DNA, 29 bp, Homo sapiens
  source 1..29: mol_type = unassigned DNA
aagtttaacttgaacagagcttgggaaat

SEQ ID NO: 18128 - RNA, 49 nt, Homo sapiens
  source 1..49: mol_type = unassigned RNA
cacctgtgtgacttacatggatttatcagacttacctggatttatcaga

SEQ ID NO: 18129 - DNA, 49 bp, Homo sapiens
  source 1..49: mol_type = unassigned DNA
cacctgtgtgacttacatggatttatcagacttacctggatttatcaga

SEQ ID NO: 18130 - DNA, 49 bp, Homo sapiens
  source 1..49: mol_type = unassigned DNA
tctgataaatccaggtaagtctgataaatccatgtaagtcacacaggtg

SEQ ID NO: 18131 - RNA, 28 nt, Homo sapiens
  source 1..28: mol_type = unassigned RNA
aagaatacagtactgttaaaaataaaga

SEQ ID NO: 18132 - DNA, 28 bp, Homo sapiens
  source 1..28: mol_type = unassigned DNA
aagaatacagtactgttaaaaataaaga

SEQ ID NO: 18133 - DNA, 28 bp, Homo sapiens
  source 1..28: mol_type = unassigned DNA
tctttatttttaacagtactgtattctt

SEQ ID NO: 18134 - RNA, 73 nt, Homo sapiens
  source 1..73: mol_type = unassigned RNA
ggccctgtggcctatttctggttcattgctgtaggggaggaaagataattttttcttcggctctcataaattc

SEQ ID NO: 18135 - DNA, 73 bp, Homo sapiens
  source 1..73: mol_type = unassigned DNA
ggccctgtggcctatttctggttcattgctgtaggggaggaaagataattttttcttcggctctcataaattc

SEQ ID NO: 18136 - DNA, 73 bp, Homo sapiens
  source 1..73: mol_type = unassigned DNA
gaatttatgagagccgaagaaaaaattatctttcctcccctacagcaatgaaccagaaataggccacagggcc

SEQ ID NO: 18137 - RNA, 116 nt, Homo sapiens
  source 1..116: mol_type = unassigned RNA
gcttataaaatagtgaaaattagtatgtggacctctctgtgacctcttgttttaatcttagattgattgtggaatataaggatattgccagcattcattgggactggaaaattggt

SEQ ID NO: 18138 - DNA, 116 bp, Homo sapiens
  source 1..116: mol_type = unassigned DNA
gcttataaaatagtgaaaattagtatgtggacctctctgtgacctcttgttttaatcttagattgattgtggaatataaggatattgccagcattcattgggactggaaaattggt

SEQ ID NO: 18139 - DNA, 116 bp, Homo sapiens
  source 1..116: mol_type = unassigned DNA
accaattttccagtcccaatgaatgctggcaatatccttatattccacaatcaatctaagattaaaacaagaggtcacagagaggtccacatactaattttcactattttataagc

SEQ ID NO: 18140 - RNA, 35 nt, Homo sapiens
  source 1..35: mol_type = unassigned RNA
ccagcctgagcaacatagcgagacctcatctctaa

SEQ ID NO: 18141 - DNA, 35 bp, Homo sapiens
  source 1..35: mol_type = unassigned DNA
ccagcctgagcaacatagcgagacctcatctctaa

SEQ ID NO: 18142 - DNA, 35 bp, Homo sapiens
  source 1..35: mol_type = unassigned DNA
ttagagatgaggtctcgctatgttgctcaggctgg

SEQ ID NO: 18143 - RNA, 26 nt, Homo sapiens
  source 1..26: mol_type = unassigned RNA
aacattgtcctagttaccctgactcc

SEQ ID NO: 18144 - DNA, 26 bp, Homo sapiens
  source 1..26: mol_type = unassigned DNA
aacattgtcctagttaccctgactcc

SEQ ID NO: 18145 - DNA, 26 bp, Homo sapiens
  source 1..26: mol_type = unassigned DNA
ggagtcagggtaactaggacaatgtt

SEQ ID NO: 18146 - RNA, 33 nt, Homo sapiens
  source 1..33: mol_type = unassigned RNA
caccacactagaatggagcactacagaggtaag

SEQ ID NO: 18147 - DNA, 33 bp, Homo sapiens
  source 1..33: mol_type = unassigned DNA
caccacactagaatggagcactacagaggtaag

SEQ ID NO: 18148 - DNA, 33 bp, Homo sapiens
  source 1..33: mol_type = unassigned DNA
cttacctctgtagtgctccattctagtgtggtg

SEQ ID NO: 18149 - RNA, 25 nt, Homo sapiens
  source 1..25: mol_type = unassigned RNA
agattgcacttttagaattcatttt

SEQ ID NO: 18150 - DNA, 25 bp, Homo sapiens
  source 1..25: mol_type = unassigned DNA
agattgcacttttagaattcatttt

SEQ ID NO: 18151 - DNA, 25 bp, Homo sapiens
  source 1..25: mol_type = unassigned DNA
aaaatgaattctaaaagtgcaatct

SEQ ID NO: 18152 - RNA, 32 nt, Homo sapiens
  source 1..32: mol_type = unassigned RNA
tcactcctgaagatcggaaatatggaacaaca

SEQ ID NO: 18153 - DNA, 32 bp, Homo sapiens
  source 1..32: mol_type = unassigned DNA
tcactcctgaagatcggaaatatggaacaaca

SEQ ID NO: 18154 - DNA, 32 bp, Homo sapiens
  source 1..32: mol_type = unassigned DNA
tgttgttccatatttccgatcttcaggagtga

SEQ ID NO: 18155 - RNA, 28 nt, Homo sapiens
  source 1..28: mol_type = unassigned RNA
ttagatttcagactgaagtttctagaaa

SEQ ID NO: 18156 - DNA, 28 bp, Homo sapiens
  source 1..28: mol_type = unassigned DNA
ttagatttcagactgaagtttctagaaa

SEQ ID NO: 18157 - DNA, 28 bp, Homo sapiens
  source 1..28: mol_type = unassigned DNA
tttctagaaacttcagtctgaaatctaa

SEQ ID NO: 18158 - RNA, 27 nt, Homo sapiens
  source 1..27: mol_type = unassigned RNA
gtaagttccagtcccagtccaagtctg

SEQ ID NO: 18159 - DNA, 27 bp, Homo sapiens
  source 1..27: mol_type = unassigned DNA
gtaagttccagtcccagtccaagtctg

SEQ ID NO: 18160 - DNA, 27 bp, Homo sapiens
  source 1..27: mol_type = unassigned DNA
cagacttggactgggactggaacttac

SEQ ID NO: 18161 - RNA, 58 nt, Homo sapiens
  source 1..58: mol_type = unassigned RNA
tctgtagaaatggcactggtatgattatcttatcattttttggtgaccaagtgaggta

SEQ ID NO: 18162 - DNA, 58 bp, Homo sapiens
  source 1..58: mol_type = unassigned DNA
tctgtagaaatggcactggtatgattatcttatcattttttggtgaccaagtgaggta

SEQ ID NO: 18163 - DNA, 58 bp, Homo sapiens
  source 1..58: mol_type = unassigned DNA
tacctcacttggtcaccaaaaaatgataagataatcataccagtgccatttctacaga

SEQ ID NO: 18164 - RNA, 60 nt, Homo sapiens
  source 1..60: mol_type = unassigned RNA
catgttccagtcctggctctgtgactttgggcaacttactttccctctctgacctcaatt

SEQ ID NO: 18165 - DNA, 60 bp, Homo sapiens
  source 1..60: mol_type = unassigned DNA
catgttccagtcctggctctgtgactttgggcaacttactttccctctctgacctcaatt

SEQ ID NO: 18166 - DNA, 60 bp, Homo sapiens
  source 1..60: mol_type = unassigned DNA
aattgaggtcagagagggaaagtaagttgcccaaagtcacagagccaggactggaacatg

SEQ ID NO: 18167 - RNA, 31 nt, Homo sapiens
  source 1..31: mol_type = unassigned RNA
gtagaacttaccttgtccctttgaccatgtg

SEQ ID NO: 18168 - DNA, 31 bp, Homo sapiens
  source 1..31: mol_type = unassigned DNA
gtagaacttaccttgtccctttgaccatgtg

SEQ ID NO: 18169 - DNA, 31 bp, Homo sapiens
  source 1..31: mol_type = unassigned DNA
cacatggtcaaagggacaaggtaagttctac

SEQ ID NO: 18170 - RNA, 55 nt, Homo sapiens
  source 1..55: mol_type = unassigned RNA
actattaggatagaacactgagagaagatattcgttgggacactgaagggagatc

SEQ ID NO: 18171 - DNA, 55 bp, Homo sapiens
  source 1..55: mol_type = unassigned DNA
actattaggatagaacactgagagaagatattcgttgggacactgaagggagatc

SEQ ID NO: 18172 - DNA, 55 bp, Homo sapiens
  source 1..55: mol_type = unassigned DNA
gatctcccttcagtgtcccaacgaatatcttctctcagtgttctatcctaatagt

SEQ ID NO: 18173 - RNA, 27 nt, Homo sapiens
  source 1..27: mol_type = unassigned RNA
ggccagtgccagccaggctgtggggga

SEQ ID NO: 18174 - DNA, 27 bp, Homo sapiens
  source 1..27: mol_type = unassigned DNA
ggccagtgccagccaggctgtggggga

SEQ ID NO: 18175 - DNA, 27 bp, Homo sapiens
  source 1..27: mol_type = unassigned DNA
tcccccacagcctggctggcactggcc

SEQ ID NO: 18176 - RNA, 37 nt, Homo sapiens
  source 1..37: mol_type = unassigned RNA
gcacaggttggcacttggactctgaaacaaaaaatgg

SEQ ID NO: 18177 - DNA, 37 bp, Homo sapiens
  source 1..37: mol_type = unassigned DNA
gcacaggttggcacttggactctgaaacaaaaaatgg

SEQ ID NO: 18178 - DNA, 37 bp, Homo sapiens
  source 1..37: mol_type = unassigned DNA
ccattttttgtttcagagtccaagtgccaacctgtgc

SEQ ID NO: 18179 - RNA, 21 nt, Homo sapiens
  source 1..21: mol_type = unassigned RNA
tgccacaggggcccaatggaa

SEQ ID NO: 18180 - DNA, 21 bp, Homo sapiens
  source 1..21: mol_type = unassigned DNA
tgccacaggggcccaatggaa

SEQ ID NO: 18181 - DNA, 21 bp, Homo sapiens
  source 1..21: mol_type = unassigned DNA
ttccattgggcccctgtggca

SEQ ID NO: 18182 - RNA, 99 nt, Homo sapiens
  source 1..99: mol_type = unassigned RNA
aggtgaagagtttgagtaggttattagacacatgatgaatctggagctagggagaagttagggctgccatagtaatttgggagtcagcagtgaataata

SEQ ID NO: 18183 - DNA, 99 bp, Homo sapiens
  source 1..99: mol_type = unassigned DNA
aggtgaagagtttgagtaggttattagacacatgatgaatctggagctagggagaagttagggctgccatagtaatttgggagtcagcagtgaataata

SEQ ID NO: 18184 - DNA, 99 bp, Homo sapiens
  source 1..99: mol_type = unassigned DNA
tattattcactgctgactcccaaattactatggcagccctaacttctccctagctccagattcatcatgtgtctaataacctactcaaactcttcacct

SEQ ID NO: 18185 - RNA, 37 nt, Homo sapiens
  source 1..37: mol_type = unassigned RNA
aagtatatgatgactgaaaaagagatggagatgcatc

SEQ ID NO: 18186 - DNA, 37 bp, Homo sapiens
  source 1..37: mol_type = unassigned DNA
aagtatatgatgactgaaaaagagatggagatgcatc

SEQ ID NO: 18187 - DNA, 37 bp, Homo sapiens
  source 1..37: mol_type = unassigned DNA
gatgcatctccatctctttttcagtcatcatatactt

SEQ ID NO: 18188 - RNA, 165 nt, Homo sapiens
  source 1..165: mol_type = unassigned RNA
ttctggcataatcttcttgaagggaaaattaagaagagtgactaaatttttttcccagtgtctgaggtatgcataattctgaccaaaaagcttcaatacaactgtagcgaatcaagaaaagatttttagaacttttaaatccatctgtttgcctttattttattt

SEQ ID NO: 18189 - DNA, 165 bp, Homo sapiens
  source 1..165: mol_type = unassigned DNA
ttctggcataatcttcttgaagggaaaattaagaagagtgactaaatttttttcccagtgtctgaggtatgcataattctgaccaaaaagcttcaatacaactgtagcgaatcaagaaaagatttttagaacttttaaatccatctgtttgcctttattttattt

SEQ ID NO: 18190 - DNA, 165 bp, Homo sapiens
  source 1..165: mol_type = unassigned DNA
aaataaaataaaggcaaacagatggatttaaaagttctaaaaatcttttcttgattcgctacagttgtattgaagctttttggtcagaattatgcatacctcagacactgggaaaaaaatttagtcactcttcttaattttcccttcaagaagattatgccagaa

SEQ ID NO: 18191 - RNA, 24 nt, Homo sapiens
  source 1..24: mol_type = unassigned RNA
catttttgtggtgacttccataga

SEQ ID NO: 18192 - DNA, 24 bp, Homo sapiens
  source 1..24: mol_type = unassigned DNA
catttttgtggtgacttccataga

SEQ ID NO: 18193 - DNA, 24 bp, Homo sapiens
  source 1..24: mol_type = unassigned DNA
tctatggaagtcaccacaaaaatg

SEQ ID NO: 18194 - RNA, 62 nt, Homo sapiens
  source 1..62: mol_type = unassigned RNA
accagcgtcctggtcccggaactgccaaagccaagaactgaccggggccagggctgccatgg

SEQ ID NO: 18195 - DNA, 62 bp, Homo sapiens
  source 1..62: mol_type = unassigned DNA
accagcgtcctggtcccggaactgccaaagccaagaactgaccggggccagggctgccatgg

SEQ ID NO: 18196 - DNA, 62 bp, Homo sapiens
  source 1..62: mol_type = unassigned DNA
ccatggcagccctggccccggtcagttcttggctttggcagttccgggaccaggacgctggt

SEQ ID NO: 18197 - RNA, 38 nt, Homo sapiens
  source 1..38: mol_type = unassigned RNA
ctggcgcctgcgggctgccccgtggcctgctggacaga

SEQ ID NO: 18198 - DNA, 38 bp, Homo sapiens
  source 1..38: mol_type = unassigned DNA
ctggcgcctgcgggctgccccgtggcctgctggacaga

SEQ ID NO: 18199 - DNA, 38 bp, Homo sapiens
  source 1..38: mol_type = unassigned DNA
tctgtccagcaggccacggggcagcccgcaggcgccag

SEQ ID NO: 18200 - RNA, 32 nt, Homo sapiens
  source 1..32: mol_type = unassigned RNA
tcacaggcttccaggttaggcactgtgaatag

SEQ ID NO: 18201 - DNA, 32 bp, Homo sapiens
  source 1..32: mol_type = unassigned DNA
tcacaggcttccaggttaggcactgtgaatag

SEQ ID NO: 18202 - DNA, 32 bp, Homo sapiens
  source 1..32: mol_type = unassigned DNA
ctattcacagtgcctaacctggaagcctgtga

SEQ ID NO: 18203 - RNA, 74 nt, Homo sapiens
  source 1..74: mol_type = unassigned RNA
ctaaactcttgggacacaggtcgtttaagacagagagttcttagtcctcctaaaaaccttctgcccacattctt

SEQ ID NO: 18204 - DNA, 74 bp, Homo sapiens
  source 1..74: mol_type = unassigned DNA
ctaaactcttgggacacaggtcgtttaagacagagagttcttagtcctcctaaaaaccttctgcccacattctt

SEQ ID NO: 18205 - DNA, 74 bp, Homo sapiens
  source 1..74: mol_type = unassigned DNA
aagaatgtgggcagaaggtttttaggaggactaagaactctctgtcttaaacgacctgtgtcccaagagtttag

SEQ ID NO: 18206 - RNA, 54 nt, Homo sapiens
  source 1..54: mol_type = unassigned RNA
aattttcaagtacagtggtggtggttaatactatttggtttccagaatcatttc

SEQ ID NO: 18207 - DNA, 54 bp, Homo sapiens
  source 1..54: mol_type = unassigned DNA
aattttcaagtacagtggtggtggttaatactatttggtttccagaatcatttc

SEQ ID NO: 18208 - DNA, 54 bp, Homo sapiens
  source 1..54: mol_type = unassigned DNA
gaaatgattctggaaaccaaatagtattaaccaccaccactgtacttgaaaatt

SEQ ID NO: 18209 - RNA, 32 nt, Homo sapiens
  source 1..32: mol_type = unassigned RNA
aatataaggacctgttctggacacagcactgg

SEQ ID NO: 18210 - DNA, 32 bp, Homo sapiens
  source 1..32: mol_type = unassigned DNA
aatataaggacctgttctggacacagcactgg

SEQ ID NO: 18211 - DNA, 32 bp, Homo sapiens
  source 1..32: mol_type = unassigned DNA
ccagtgctgtgtccagaacaggtccttatatt

SEQ ID NO: 18212 - RNA, 32 nt, Homo sapiens
  source 1..32: mol_type = unassigned RNA
acaacttatctgcctgaagttgacaccagagg

SEQ ID NO: 18213 - DNA, 32 bp, Homo sapiens
  source 1..32: mol_type = unassigned DNA
acaacttatctgcctgaagttgacaccagagg

SEQ ID NO: 18214 - DNA, 32 bp, Homo sapiens
  source 1..32: mol_type = unassigned DNA
cctctggtgtcaacttcaggcagataagttgt

SEQ ID NO: 18215 - RNA, 56 nt, Homo sapiens
  source 1..56: mol_type = unassigned RNA
ccacaacctcaggtcgtggagaatctacaacctcacgcatcagtccaggctcaact

SEQ ID NO: 18216 - DNA, 56 bp, Homo sapiens
  source 1..56: mol_type = unassigned DNA
ccacaacctcaggtcgtggagaatctacaacctcacgcatcagtccaggctcaact

SEQ ID NO: 18217 - DNA, 56 bp, Homo sapiens
  source 1..56: mol_type = unassigned DNA
agttgagcctggactgatgcgtgaggttgtagattctccacgacctgaggttgtgg

SEQ ID NO: 18218 - RNA, 71 nt, Homo sapiens
  source 1..71: mol_type = unassigned RNA
agtgaatataggtgagagatgtacaagtaggtgttcattgtgctactattttgacacttgtagactcaaaa

SEQ ID NO: 18219 - DNA, 71 bp, Homo sapiens
  source 1..71: mol_type = unassigned DNA
agtgaatataggtgagagatgtacaagtaggtgttcattgtgctactattttgacacttgtagactcaaaa

SEQ ID NO: 18220 - DNA, 71 bp, Homo sapiens
  source 1..71: mol_type = unassigned DNA
ttttgagtctacaagtgtcaaaatagtagcacaatgaacacctacttgtacatctctcacctatattcact

SEQ ID NO: 18221 - RNA, 36 nt, Homo sapiens
  source 1..36: mol_type = unassigned RNA
cgactcattgacttgcacagtccttctgagattgtt

SEQ ID NO: 18222 - DNA, 36 bp, Homo sapiens
  source 1..36: mol_type = unassigned DNA
cgactcattgacttgcacagtccttctgagattgtt

SEQ ID NO: 18223 - DNA, 36 bp, Homo sapiens
  source 1..36: mol_type = unassigned DNA
aacaatctcagaaggactgtgcaagtcaatgagtcg

SEQ ID NO: 18224 - RNA, 128 nt, Homo sapiens
  source 1..128: mol_type = unassigned RNA
actttattcaggtttcagatcacgtctcactttatcaggcaggccttctatgaacacccaatctcagtagcacctcctcccatggcactctcttgccctttaccctgccttttcttgttagaaaaatc

SEQ ID NO: 18225 - DNA, 128 bp, Homo sapiens
  source 1..128: mol_type = unassigned DNA
actttattcaggtttcagatcacgtctcactttatcaggcaggccttctatgaacacccaatctcagtagcacctcctcccatggcactctcttgccctttaccctgccttttcttgttagaaaaatc

SEQ ID NO: 18226 - DNA, 128 bp, Homo sapiens
  source 1..128: mol_type = unassigned DNA
gatttttctaacaagaaaaggcagggtaaagggcaagagagtgccatgggaggaggtgctactgagattgggtgttcatagaaggcctgcctgataaagtgagacgtgatctgaaacctgaataaagt

SEQ ID NO: 18227 - RNA, 48 nt, Homo sapiens
  source 1..48: mol_type = unassigned RNA
gccccgtcagtgattctgtgattatttgtgtgtttctgctcacgtgat

SEQ ID NO: 18228 - DNA, 48 bp, Homo sapiens
  source 1..48: mol_type = unassigned DNA
gccccgtcagtgattctgtgattatttgtgtgtttctgctcacgtgat

SEQ ID NO: 18229 - DNA, 48 bp, Homo sapiens
  source 1..48: mol_type = unassigned DNA
atcacgtgagcagaaacacacaaataatcacagaatcactgacggggc

SEQ ID NO: 18230 - RNA, 25 nt, Homo sapiens
  source 1..25: mol_type = unassigned RNA
tttggcaatggtgaagtgccacttg

SEQ ID NO: 18231 - DNA, 25 bp, Homo sapiens
  source 1..25: mol_type = unassigned DNA
tttggcaatggtgaagtgccacttg

SEQ ID NO: 18232 - DNA, 25 bp, Homo sapiens
  source 1..25: mol_type = unassigned DNA
caagtggcacttcaccattgccaaa

SEQ ID NO: 18233 - RNA, 34 nt, Homo sapiens
  source 1..34: mol_type = unassigned RNA
gagtcccgagcctcagtttctgactgcagaagag

SEQ ID NO: 18234 - DNA, 34 bp, Homo sapiens
  source 1..34: mol_type = unassigned DNA
gagtcccgagcctcagtttctgactgcagaagag

SEQ ID NO: 18235 - DNA, 34 bp, Homo sapiens
  source 1..34: mol_type = unassigned DNA
ctcttctgcagtcagaaactgaggctcgggactc

SEQ ID NO: 18236 - RNA, 45 nt, Homo sapiens
  source 1..45: mol_type = unassigned RNA
ctcccacttataaatgagaacatgaggtattggttttgtgtttct

SEQ ID NO: 18237 - DNA, 45 bp, Homo sapiens
  source 1..45: mol_type = unassigned DNA
ctcccacttataaatgagaacatgaggtattggttttgtgtttct

SEQ ID NO: 18238 - DNA, 45 bp, Homo sapiens
  source 1..45: mol_type = unassigned DNA
agaaacacaaaaccaatacctcatgttctcatttataagtgggag

SEQ ID NO: 18239 - RNA, 33 nt, Homo sapiens
  source 1..33: mol_type = unassigned RNA
gatatttgcggagggatagtgtctgaataccat

SEQ ID NO: 18240 - DNA, 33 bp, Homo sapiens
  source 1..33: mol_type = unassigned DNA
gatatttgcggagggatagtgtctgaataccat

SEQ ID NO: 18241 - DNA, 33 bp, Homo sapiens
  source 1..33: mol_type = unassigned DNA
atggtattcagacactatccctccgcaaatatc

SEQ ID NO: 18242 - RNA, 196 nt, Homo sapiens
  source 1..196: mol_type = unassigned RNA
ctaataaggccatggagttctgcacatttggggctgggactcaaggcagtacaatcatattgggactgtactgcaagatatcttccaaattagtttaagttcacaggtcatggagtccagactaccggcacagattggcatcctgctgaggatgaaacaaagaagatgttctcttttctcctatgttttatctgtc

SEQ ID NO: 18243 - DNA, 196 bp, Homo sapiens
  source 1..196: mol_type = unassigned DNA
ctaataaggccatggagttctgcacatttggggctgggactcaaggcagtacaatcatattgggactgtactgcaagatatcttccaaattagtttaagttcacaggtcatggagtccagactaccggcacagattggcatcctgctgaggatgaaacaaagaagatgttctcttttctcctatgttttatctgtc

SEQ ID NO: 18244 - DNA, 196 bp, Homo sapiens
  source 1..196: mol_type = unassigned DNA
gacagataaaacataggagaaaagagaacatcttctttgtttcatcctcagcaggatgccaatctgtgccggtagtctggactccatgacctgtgaacttaaactaatttggaagatatcttgcagtacagtcccaatatgattgtactgccttgagtcccagccccaaatgtgcagaactccatggccttattag

SEQ ID NO: 18245 - RNA, 23 nt, Homo sapiens
  source 1..23: mol_type = unassigned RNA
atgtttatgagactatgttgaga

SEQ ID NO: 18246 - DNA, 23 bp, Homo sapiens
  source 1..23: mol_type = unassigned DNA
atgtttatgagactatgttgaga

SEQ ID NO: 18247 - DNA, 23 bp, Homo sapiens
  source 1..23: mol_type = unassigned DNA
tctcaacatagtctcataaacat

SEQ ID NO: 18248 - RNA, 28 nt, Homo sapiens
  source 1..28: mol_type = unassigned RNA
ttttatagttcagtctgtaggagcttgg

SEQ ID NO: 18249 - DNA, 28 bp, Homo sapiens
  source 1..28: mol_type = unassigned DNA
ttttatagttcagtctgtaggagcttgg

SEQ ID NO: 18250 - DNA, 28 bp, Homo sapiens
  source 1..28: mol_type = unassigned DNA
ccaagctcctacagactgaactataaaa

SEQ ID NO: 18251 - RNA, 29 nt, Homo sapiens
  source 1..29: mol_type = unassigned RNA
tcttcaccacttactcggacgtctggtat

SEQ ID NO: 18252 - DNA, 29 bp, Homo sapiens
  source 1..29: mol_type = unassigned DNA
tcttcaccacttactcggacgtctggtat

SEQ ID NO: 18253 - DNA, 29 bp, Homo sapiens
  source 1..29: mol_type = unassigned DNA
ataccagacgtccgagtaagtggtgaaga

SEQ ID NO: 18254 - RNA, 20 nt, Homo sapiens
  source 1..20: mol_type = unassigned RNA
taatctcgtcagttctgcca

SEQ ID NO: 18255 - DNA, 20 bp, Homo sapiens
  source 1..20: mol_type = unassigned DNA
taatctcgtcagttctgcca

SEQ ID NO: 18256 - DNA, 20 bp, Homo sapiens
  source 1..20: mol_type = unassigned DNA
tggcagaactgacgagatta

SEQ ID NO: 18257 - RNA, 32 nt, Homo sapiens
  source 1..32: mol_type = unassigned RNA
tgttgtttatctgaataatgttgatgaaatcg

SEQ ID NO: 18258 - DNA, 32 bp, Homo sapiens
  source 1..32: mol_type = unassigned DNA
tgttgtttatctgaataatgttgatgaaatcg

SEQ ID NO: 18259 - DNA, 32 bp, Homo sapiens
  source 1..32: mol_type = unassigned DNA
cgatttcatcaacattattcagataaacaaca

SEQ ID NO: 18260 - RNA, 34 nt, Homo sapiens
  source 1..34: mol_type = unassigned RNA
aacagaagaacattgaccacatgctgtggcttga

SEQ ID NO: 18261 - DNA, 34 bp, Homo sapiens
  source 1..34: mol_type = unassigned DNA
aacagaagaacattgaccacatgctgtggcttga

SEQ ID NO: 18262 - DNA, 34 bp, Homo sapiens
  source 1..34: mol_type = unassigned DNA
tcaagccacagcatgtggtcaatgttcttctgtt

SEQ ID NO: 18263 - RNA, 53 nt, Homo sapiens
  source 1..53: mol_type = unassigned RNA
atttatgcttgagttgttatgtgctttgaactctgattatcagaagttttact

SEQ ID NO: 18264 - DNA, 53 bp, Homo sapiens
  source 1..53: mol_type = unassigned DNA
atttatgcttgagttgttatgtgctttgaactctgattatcagaagttttact

SEQ ID NO: 18265 - DNA, 53 bp, Homo sapiens
  source 1..53: mol_type = unassigned DNA
agtaaaacttctgataatcagagttcaaagcacataacaactcaagcataaat

SEQ ID NO: 18266 - RNA, 29 nt, Homo sapiens
  source 1..29: mol_type = unassigned RNA
gatacagaggtttctctgcagtgtgttta

SEQ ID NO: 18267 - DNA, 29 bp, Homo sapiens
  source 1..29: mol_type = unassigned DNA
gatacagaggtttctctgcagtgtgttta

SEQ ID NO: 18268 - DNA, 29 bp, Homo sapiens
  source 1..29: mol_type = unassigned DNA
taaacacactgcagagaaacctctgtatc

SEQ ID NO: 18269 - RNA, 31 nt, Homo sapiens
  source 1..31: mol_type = unassigned RNA
agtgcctgaatgctctgaaatcaagcatatg

SEQ ID NO: 18270 - DNA, 31 bp, Homo sapiens
  source 1..31: mol_type = unassigned DNA
agtgcctgaatgctctgaaatcaagcatatg

SEQ ID NO: 18271 - DNA, 31 bp, Homo sapiens
  source 1..31: mol_type = unassigned DNA
catatgcttgatttcagagcattcaggcact

SEQ ID NO: 18272 - RNA, 30 nt, Homo sapiens
  source 1..30: mol_type = unassigned RNA
attattatttgggggaactggacacaatag

SEQ ID NO: 18273 - DNA, 30 bp, Homo sapiens
  source 1..30: mol_type = unassigned DNA
attattatttgggggaactggacacaatag

SEQ ID NO: 18274 - DNA, 30 bp, Homo sapiens
  source 1..30: mol_type = unassigned DNA
ctattgtgtccagttcccccaaataataat

SEQ ID NO: 18275 - RNA, 30 nt, Homo sapiens
  source 1..30: mol_type = unassigned RNA
agtcattggtcatgagactgaggttgcata

SEQ ID NO: 18276 - DNA, 30 bp, Homo sapiens
  source 1..30: mol_type = unassigned DNA
agtcattggtcatgagactgaggttgcata

SEQ ID NO: 18277 - DNA, 30 bp, Homo sapiens
  source 1..30: mol_type = unassigned DNA
tatgcaacctcagtctcatgaccaatgact

SEQ ID NO: 18278 - RNA, 35 nt, Homo sapiens
  source 1..35: mol_type = unassigned RNA
ccctaccaccttccccaccgctgcccccaagatcc

SEQ ID NO: 18279 - DNA, 35 bp, Homo sapiens
  source 1..35: mol_type = unassigned DNA
ccctaccaccttccccaccgctgcccccaagatcc

SEQ ID NO: 18280 - DNA, 35 bp, Homo sapiens
  source 1..35: mol_type = unassigned DNA
ggatcttgggggcagcggtggggaaggtggtaggg

SEQ ID NO: 18281 - RNA, 31 nt, Homo sapiens
  source 1..31: mol_type = unassigned RNA
tcatttctccactgctgtttaatgagctgaa

SEQ ID NO: 18282 - DNA, 31 bp, Homo sapiens
  source 1..31: mol_type = unassigned DNA
tcatttctccactgctgtttaatgagctgaa

SEQ ID NO: 18283 - DNA, 31 bp, Homo sapiens
  source 1..31: mol_type = unassigned DNA
ttcagctcattaaacagcagtggagaaatga

SEQ ID NO: 18284 - RNA, 40 nt, Homo sapiens
  source 1..40: mol_type = unassigned RNA
tttgccactggaggattcactgaagtggggtttttgcaat

SEQ ID NO: 18285 - DNA, 40 bp, Homo sapiens
  source 1..40: mol_type = unassigned DNA
tttgccactggaggattcactgaagtggggtttttgcaat

SEQ ID NO: 18286 - DNA, 40 bp, Homo sapiens
  source 1..40: mol_type = unassigned DNA
attgcaaaaaccccacttcagtgaatcctccagtggcaaa

SEQ ID NO: 18287 - RNA, 70 nt, Homo sapiens
  source 1..70: mol_type = unassigned RNA
ggagaagacaaggaggtcaaaggatcagggaactaagcattatgtgagttcaccagcaagatgtatagaa

SEQ ID NO: 18288 - DNA, 70 bp, Homo sapiens
  source 1..70: mol_type = unassigned DNA
ggagaagacaaggaggtcaaaggatcagggaactaagcattatgtgagttcaccagcaagatgtatagaa

SEQ ID NO: 18289 - DNA, 70 bp, Homo sapiens
  source 1..70: mol_type = unassigned DNA
ttctatacatcttgctggtgaactcacataatgcttagttccctgatcctttgacctccttgtcttctcc

SEQ ID NO: 18290 - RNA, 27 nt, Homo sapiens
  source 1..27: mol_type = unassigned RNA
cagcagagcattggaatgtatatctca

SEQ ID NO: 18291 - DNA, 27 bp, Homo sapiens
  source 1..27: mol_type = unassigned DNA
cagcagagcattggaatgtatatctca

SEQ ID NO: 18292 - DNA, 27 bp, Homo sapiens
  source 1..27: mol_type = unassigned DNA
tgagatatacattccaatgctctgctg

SEQ ID NO: 18293 - RNA, 42 nt, Homo sapiens
  source 1..42: mol_type = unassigned RNA
gtgttatctcactcgtagaatttattctttcttcacccttcc

SEQ ID NO: 18294 - DNA, 42 bp, Homo sapiens
  source 1..42: mol_type = unassigned DNA
gtgttatctcactcgtagaatttattctttcttcacccttcc

SEQ ID NO: 18295 - DNA, 42 bp, Homo sapiens
  source 1..42: mol_type = unassigned DNA
ggaagggtgaagaaagaataaattctacgagtgagataacac

SEQ ID NO: 18296 - RNA, 24 nt, Homo sapiens
  source 1..24: mol_type = unassigned RNA
aatcctatgcatttacttctttga

SEQ ID NO: 18297 - DNA, 24 bp, Homo sapiens
  source 1..24: mol_type = unassigned DNA
aatcctatgcatttacttctttga

SEQ ID NO: 18298 - DNA, 24 bp, Homo sapiens
  source 1..24: mol_type = unassigned DNA
tcaaagaagtaaatgcataggatt

SEQ ID NO: 18299 - RNA, 44 nt, Homo sapiens
  source 1..44: mol_type = unassigned RNA
ccccctcaggtcccctcaggctgtggaagctttgttctttcgct

SEQ ID NO: 18300 - DNA, 44 bp, Homo sapiens
  source 1..44: mol_type = unassigned DNA
ccccctcaggtcccctcaggctgtggaagctttgttctttcgct

SEQ ID NO: 18301 - DNA, 44 bp, Homo sapiens
  source 1..44: mol_type = unassigned DNA
agcgaaagaacaaagcttccacagcctgaggggacctgaggggg

SEQ ID NO: 18302 - RNA, 28 nt, Homo sapiens
  source 1..28: mol_type = unassigned RNA
tagagaggatctaggaactggagctgct

SEQ ID NO: 18303 - DNA, 28 bp, Homo sapiens
  source 1..28: mol_type = unassigned DNA
tagagaggatctaggaactggagctgct

SEQ ID NO: 18304 - DNA, 28 bp, Homo sapiens
  source 1..28: mol_type = unassigned DNA
agcagctccagttcctagatcctctcta

SEQ ID NO: 18305 - RNA, 31 nt, Homo sapiens
  source 1..31: mol_type = unassigned RNA
aggcagtgactgcagactcccggccccacag

SEQ ID NO: 18306 - DNA, 31 bp, Homo sapiens
  source 1..31: mol_type = unassigned DNA
aggcagtgactgcagactcccggccccacag

SEQ ID NO: 18307 - DNA, 31 bp, Homo sapiens
  source 1..31: mol_type = unassigned DNA
ctgtggggccgggagtctgcagtcactgcct

SEQ ID NO: 18308 - RNA, 32 nt, Homo sapiens
  source 1..32: mol_type = unassigned RNA
ttcctgcagaccttgtgaggactagaggaaga

SEQ ID NO: 18309 - DNA, 32 bp, Homo sapiens
  source 1..32: mol_type = unassigned DNA
ttcctgcagaccttgtgaggactagaggaaga

SEQ ID NO: 18310 - DNA, 32 bp, Homo sapiens
  source 1..32: mol_type = unassigned DNA
tcttcctctagtcctcacaaggtctgcaggaa

SEQ ID NO: 18311 - RNA, 200 nt, Homo sapiens
  source 1..200: mol_type = unassigned RNA
tgctggtctcttgtgtggctgttagggggtgctttgatgagttcttctgagggctgaaaggtgccttcacctgaagagtcctctgtaagagtctgagagcccccttaggcttggcctcttgctttgtccctcagcccttgtcccagactgtcctctcagtggatggtcttcctttatcctttcagcaggacatcagatgt

SEQ ID NO: 18312 - DNA, 200 bp, Homo sapiens
  source 1..200: mol_type = unassigned DNA
tgctggtctcttgtgtggctgttagggggtgctttgatgagttcttctgagggctgaaaggtgccttcacctgaagagtcctctgtaagagtctgagagcccccttaggcttggcctcttgctttgtccctcagcccttgtcccagactgtcctctcagtggatggtcttcctttatcctttcagcaggacatcagatgt

SEQ ID NO: 18313 - DNA, 200 bp, Homo sapiens
  source 1..200: mol_type = unassigned DNA
acatctgatgtcctgctgaaaggataaaggaagaccatccactgagaggacagtctgggacaagggctgagggacaaagcaagaggccaagcctaagggggctctcagactcttacagaggactcttcaggtgaaggcacctttcagccctcagaagaactcatcaaagcaccccctaacagccacacaagagaccagca

SEQ ID NO: 18314 - RNA, 104 nt, Homo sapiens
  source 1..104: mol_type = unassigned RNA
acatatccattgcttctaaagctcagtcacatccctttgtcatccttcctcttaccccttctcatttccccttcctcatctccaggaaaccactgatctttttt

SEQ ID NO: 18315 - DNA, 104 bp, Homo sapiens
  source 1..104: mol_type = unassigned DNA
acatatccattgcttctaaagctcagtcacatccctttgtcatccttcctcttaccccttctcatttccccttcctcatctccaggaaaccactgatctttttt

SEQ ID NO: 18316 - DNA, 104 bp, Homo sapiens
  source 1..104: mol_type = unassigned DNA
aaaaaagatcagtggtttcctggagatgaggaaggggaaatgagaaggggtaagaggaaggatgacaaagggatgtgactgagctttagaagcaatggatatgt

SEQ ID NO: 18317 - RNA, 39 nt, Homo sapiens
  source 1..39: mol_type = unassigned RNA
ctttgatctaaggatagaagcgaacttgactatgaaact

SEQ ID NO: 18318 - DNA, 39 bp, Homo sapiens
  source 1..39: mol_type = unassigned DNA
ctttgatctaaggatagaagcgaacttgactatgaaact

SEQ ID NO: 18319 - DNA, 39 bp, Homo sapiens
  source 1..39: mol_type = unassigned DNA
agtttcatagtcaagttcgcttctatccttagatcaaag

SEQ ID NO: 18320 - RNA, 30 nt, Homo sapiens
  source 1..30: mol_type = unassigned RNA
taaagcagatgggactctggattctcaagt

SEQ ID NO: 18321 - DNA, 30 bp, Homo sapiens
  source 1..30: mol_type = unassigned DNA
taaagcagatgggactctggattctcaagt

SEQ ID NO: 18322 - DNA, 30 bp, Homo sapiens
  source 1..30: mol_type = unassigned DNA
acttgagaatccagagtcccatctgcttta

SEQ ID NO: 18323 - RNA, 24 nt, Homo sapiens
  source 1..24: mol_type = unassigned RNA
atccctttgtcatccttgacctta

SEQ ID NO: 18324 - DNA, 24 bp, Homo sapiens
  source 1..24: mol_type = unassigned DNA
atccctttgtcatccttgacctta

SEQ ID NO: 18325 - DNA, 24 bp, Homo sapiens
  source 1..24: mol_type = unassigned DNA
taaggtcaaggatgacaaagggat

SEQ ID NO: 18326 - RNA, 23 nt, Homo sapiens
  source 1..23: mol_type = unassigned RNA
ttccctttgtcatcttctaaaat

SEQ ID NO: 18327 - DNA, 23 bp, Homo sapiens
  source 1..23: mol_type = unassigned DNA
ttccctttgtcatcttctaaaat

SEQ ID NO: 18328 - DNA, 23 bp, Homo sapiens
  source 1..23: mol_type = unassigned DNA
attttagaagatgacaaagggaa

SEQ ID NO: 18329 - RNA, 160 nt, Homo sapiens
  source 1..160: mol_type = unassigned RNA
cttcttctcacccactcacctttatcaatttacatttcaggataaaagtcttcatgttggcactcaatgtgccttaacaagaagatgcccacaagaagggtttgatcatcgggacagcaaagtgtctcttcaagagaaaaactgtgaacctgtggtaggt

SEQ ID NO: 18330 - DNA, 160 bp, Homo sapiens
  source 1..160: mol_type = unassigned DNA
cttcttctcacccactcacctttatcaatttacatttcaggataaaagtcttcatgttggcactcaatgtgccttaacaagaagatgcccacaagaagggtttgatcatcgggacagcaaagtgtctcttcaagagaaaaactgtgaacctgtggtaggt

SEQ ID NO: 18331 - DNA, 160 bp, Homo sapiens
  source 1..160: mol_type = unassigned DNA
acctaccacaggttcacagtttttctcttgaagagacactttgctgtcccgatgatcaaacccttcttgtgggcatcttcttgttaaggcacattgagtgccaacatgaagacttttatcctgaaatgtaaattgataaaggtgagtgggtgagaagaag

SEQ ID NO: 18332 - RNA, 29 nt, Homo sapiens
  source 1..29: mol_type = unassigned RNA
ggaggctgaaagagcctgagctgtgccct

SEQ ID NO: 18333 - DNA, 29 bp, Homo sapiens
  source 1..29: mol_type = unassigned DNA
ggaggctgaaagagcctgagctgtgccct

SEQ ID NO: 18334 - DNA, 29 bp, Homo sapiens
  source 1..29: mol_type = unassigned DNA
agggcacagctcaggctctttcagcctcc

SEQ ID NO: 18335 - RNA, 31 nt, Homo sapiens
  source 1..31: mol_type = unassigned RNA
ttcccttttcatcgttcgaaatgccaagact

SEQ ID NO: 18336 - DNA, 31 bp, Homo sapiens
  source 1..31: mol_type = unassigned DNA
ttcccttttcatcgttcgaaatgccaagact

SEQ ID NO: 18337 - DNA, 31 bp, Homo sapiens
  source 1..31: mol_type = unassigned DNA
agtcttggcatttcgaacgatgaaaagggaa

SEQ ID NO: 18338 - RNA, 52 nt, Homo sapiens
  source 1..52: mol_type = unassigned RNA
atagagtccagctggctggcaccttgattttggccttttggaaacctggagc

SEQ ID NO: 18339 - DNA, 52 bp, Homo sapiens
  source 1..52: mol_type = unassigned DNA
atagagtccagctggctggcaccttgattttggccttttggaaacctggagc

SEQ ID NO: 18340 - DNA, 52 bp, Homo sapiens
  source 1..52: mol_type = unassigned DNA
gctccaggtttccaaaaggccaaaatcaaggtgccagccagctggactctat

SEQ ID NO: 18341 - RNA, 54 nt, Homo sapiens
  source 1..54: mol_type = unassigned RNA
atttttgggactgcttcttatctgattcgtgccagacgcagtatggatgaagct

SEQ ID NO: 18342 - DNA, 54 bp, Homo sapiens
  source 1..54: mol_type = unassigned DNA
atttttgggactgcttcttatctgattcgtgccagacgcagtatggatgaagct

SEQ ID NO: 18343 - DNA, 54 bp, Homo sapiens
  source 1..54: mol_type = unassigned DNA
agcttcatccatactgcgtctggcacgaatcagataagaagcagtcccaaaaat

SEQ ID NO: 18344 - RNA, 25 nt, Homo sapiens
  source 1..25: mol_type = unassigned RNA
ttcttgtagccattttggaatatat

SEQ ID NO: 18345 - DNA, 25 bp, Homo sapiens
  source 1..25: mol_type = unassigned DNA
ttcttgtagccattttggaatatat

SEQ ID NO: 18346 - DNA, 25 bp, Homo sapiens
  source 1..25: mol_type = unassigned DNA
atatattccaaaatggctacaagaa

SEQ ID NO: 18347 - RNA, 77 nt, Homo sapiens
  source 1..77: mol_type = unassigned RNA
atttacatttctgtgagtccaatctgtcagtcttgttatggtttctgcatttgggatcaggctgaggaattcctccc

SEQ ID NO: 18348 - DNA, 77 bp, Homo sapiens
  source 1..77: mol_type = unassigned DNA
atttacatttctgtgagtccaatctgtcagtcttgttatggtttctgcatttgggatcaggctgaggaattcctccc

SEQ ID NO: 18349 - DNA, 77 bp, Homo sapiens
  source 1..77: mol_type = unassigned DNA
gggaggaattcctcagcctgatcccaaatgcagaaaccataacaagactgacagattggactcacagaaatgtaaat

SEQ ID NO: 18350 - RNA, 22 nt, Homo sapiens
  source 1..22: mol_type = unassigned RNA
ttatttagtaggttgttcagag

SEQ ID NO: 18351 - DNA, 22 bp, Homo sapiens
  source 1..22: mol_type = unassigned DNA
ttatttagtaggttgttcagag

SEQ ID NO: 18352 - DNA, 22 bp, Homo sapiens
  source 1..22: mol_type = unassigned DNA
ctctgaacaacctactaaataa

SEQ ID NO: 18353 - RNA, 33 nt, Homo sapiens
  source 1..33: mol_type = unassigned RNA
aagtccccctggattgtgttctgtatcgatatg

SEQ ID NO: 18354 - DNA, 33 bp, Homo sapiens
  source 1..33: mol_type = unassigned DNA
aagtccccctggattgtgttctgtatcgatatg

SEQ ID NO: 18355 - DNA, 33 bp, Homo sapiens
  source 1..33: mol_type = unassigned DNA
catatcgatacagaacacaatccagggggactt

SEQ ID NO: 18356 - RNA, 57 nt, Homo sapiens
  source 1..57: mol_type = unassigned RNA
gcagcaggtctgagtactctcatatgatgctgtgattttcctggagttgacagaaac

SEQ ID NO: 18357 - DNA, 57 bp, Homo sapiens
  source 1..57: mol_type = unassigned DNA
gcagcaggtctgagtactctcatatgatgctgtgattttcctggagttgacagaaac

SEQ ID NO: 18358 - DNA, 57 bp, Homo sapiens
  source 1..57: mol_type = unassigned DNA
gtttctgtcaactccaggaaaatcacagcatcatatgagagtactcagacctgctgc

SEQ ID NO: 18359 - RNA, 23 nt, Homo sapiens
  source 1..23: mol_type = unassigned RNA
ttcttgtaccttctggagtatat

SEQ ID NO: 18360 - DNA, 23 bp, Homo sapiens
  source 1..23: mol_type = unassigned DNA
ttcttgtaccttctggagtatat

SEQ ID NO: 18361 - DNA, 23 bp, Homo sapiens
  source 1..23: mol_type = unassigned DNA
atatactccagaaggtacaagaa

SEQ ID NO: 18362 - RNA, 59 nt, Homo sapiens
  source 1..59: mol_type = unassigned RNA
aaaaggtttgtggaattctattgtgtgattcttgattcttgtagcctttttgcagtatc

SEQ ID NO: 18363 - DNA, 59 bp, Homo sapiens
  source 1..59: mol_type = unassigned DNA
aaaaggtttgtggaattctattgtgtgattcttgattcttgtagcctttttgcagtatc

SEQ ID NO: 18364 - DNA, 59 bp, Homo sapiens
  source 1..59: mol_type = unassigned DNA
gatactgcaaaaaggctacaagaatcaagaatcacacaatagaattccacaaacctttt

SEQ ID NO: 18365 - RNA, 33 nt, Homo sapiens
  source 1..33: mol_type = unassigned RNA
tccctgagcctgaaggtccagatgccagctcaa

SEQ ID NO: 18366 - DNA, 33 bp, Homo sapiens
  source 1..33: mol_type = unassigned DNA
tccctgagcctgaaggtccagatgccagctcaa

SEQ ID NO: 18367 - DNA, 33 bp, Homo sapiens
  source 1..33: mol_type = unassigned DNA
ttgagctggcatctggaccttcaggctcaggga

SEQ ID NO: 18368 - RNA, 29 nt, Homo sapiens
  source 1..29: mol_type = unassigned RNA
ttttttttcctttgtcatcattcccttta

SEQ ID NO: 18369 - DNA, 29 bp, Homo sapiens
  source 1..29: mol_type = unassigned DNA
ttttttttcctttgtcatcattcccttta

SEQ ID NO: 18370 - DNA, 29 bp, Homo sapiens
  source 1..29: mol_type = unassigned DNA
taaagggaatgatgacaaaggaaaaaaaa

SEQ ID NO: 18371 - RNA, 68 nt, Homo sapiens
  source 1..68: mol_type = unassigned RNA
atttcctggcaagttcagagccagctttctcctccttgagggacacttctttaagtagaaactaaatg

SEQ ID NO: 18372 - DNA, 68 bp, Homo sapiens
  source 1..68: mol_type = unassigned DNA
atttcctggcaagttcagagccagctttctcctccttgagggacacttctttaagtagaaactaaatg

SEQ ID NO: 18373 - DNA, 68 bp, Homo sapiens
  source 1..68: mol_type = unassigned DNA
catttagtttctacttaaagaagtgtccctcaaggaggagaaagctggctctgaacttgccaggaaat

SEQ ID NO: 18374 - RNA, 32 nt, Homo sapiens
  source 1..32: mol_type = unassigned RNA
ggcgagtggtctgtgactccttggaagattat

SEQ ID NO: 18375 - DNA, 32 bp, Homo sapiens
  source 1..32: mol_type = unassigned DNA
ggcgagtggtctgtgactccttggaagattat

SEQ ID NO: 18376 - DNA, 32 bp, Homo sapiens
  source 1..32: mol_type = unassigned DNA
ataatcttccaaggagtcacagaccactcgcc

SEQ ID NO: 18377 - RNA, 22 nt, Homo sapiens
  source 1..22: mol_type = unassigned RNA
ttcttgtagcctttgggaaaca

SEQ ID NO: 18378 - DNA, 22 bp, Homo sapiens
  source 1..22: mol_type = unassigned DNA
ttcttgtagcctttgggaaaca

SEQ ID NO: 18379 - DNA, 22 bp, Homo sapiens
  source 1..22: mol_type = unassigned DNA
tgtttcccaaaggctacaagaa

SEQ ID NO: 18380 - RNA, 27 nt, Homo sapiens
  source 1..27: mol_type = unassigned RNA
ttctgggagccttttggagcagcagtc

SEQ ID NO: 18381 - DNA, 27 bp, Homo sapiens
  source 1..27: mol_type = unassigned DNA
ttctgggagccttttggagcagcagtc

SEQ ID NO: 18382 - DNA, 27 bp, Homo sapiens
  source 1..27: mol_type = unassigned DNA
gactgctgctccaaaaggctcccagaa

SEQ ID NO: 18383 - RNA, 79 nt, Homo sapiens
  source 1..79: mol_type = unassigned RNA
tcttaacaattgacatcacattgatcgctgactgaattgatactgaaaatgaaatcactctggactttgttccttcctt

SEQ ID NO: 18384 - DNA, 79 bp, Homo sapiens
  source 1..79: mol_type = unassigned DNA
tcttaacaattgacatcacattgatcgctgactgaattgatactgaaaatgaaatcactctggactttgttccttcctt

SEQ ID NO: 18385 - DNA, 79 bp, Homo sapiens
  source 1..79: mol_type = unassigned DNA
aaggaaggaacaaagtccagagtgatttcattttcagtatcaattcagtcagcgatcaatgtgatgtcaattgttaaga

SEQ ID NO: 18386 - RNA, 41 nt, Homo sapiens
  source 1..41: mol_type = unassigned RNA
tatagaatcatatctatcaaccaacagtcggtggtattttg

SEQ ID NO: 18387 - DNA, 41 bp, Homo sapiens
  source 1..41: mol_type = unassigned DNA
tatagaatcatatctatcaaccaacagtcggtggtattttg

SEQ ID NO: 18388 - DNA, 41 bp, Homo sapiens
  source 1..41: mol_type = unassigned DNA
caaaataccaccgactgttggttgatagatatgattctata

SEQ ID NO: 18389 - RNA, 41 nt, Homo sapiens
  source 1..41: mol_type = unassigned RNA
ttccttgtagccttttggactgagggcctcagtttcttgct

SEQ ID NO: 18390 - DNA, 41 bp, Homo sapiens
  source 1..41: mol_type = unassigned DNA
ttccttgtagccttttggactgagggcctcagtttcttgct

SEQ ID NO: 18391 - DNA, 41 bp, Homo sapiens
  source 1..41: mol_type = unassigned DNA
agcaagaaactgaggccctcagtccaaaaggctacaaggaa

SEQ ID NO: 18392 - RNA, 75 nt, Homo sapiens
  source 1..75: mol_type = unassigned RNA
tctgtcctagcctcagggtccagtgtccaggaccagggtgtcagaggtgtgagcagtggcgtctgtgctcagcag

SEQ ID NO: 18393 - DNA, 75 bp, Homo sapiens
  source 1..75: mol_type = unassigned DNA
tctgtcctagcctcagggtccagtgtccaggaccagggtgtcagaggtgtgagcagtggcgtctgtgctcagcag

SEQ ID NO: 18394 - DNA, 75 bp, Homo sapiens
  source 1..75: mol_type = unassigned DNA
ctgctgagcacagacgccactgctcacacctctgacaccctggtcctggacactggaccctgaggctaggacaga

SEQ ID NO: 18395 - RNA, 25 nt, Homo sapiens
  source 1..25: mol_type = unassigned RNA
ccctatagtccaggggccaggaagg

SEQ ID NO: 18396 - DNA, 25 bp, Homo sapiens
  source 1..25: mol_type = unassigned DNA
ccctatagtccaggggccaggaagg

SEQ ID NO: 18397 - DNA, 25 bp, Homo sapiens
  source 1..25: mol_type = unassigned DNA
ccttcctggcccctggactataggg

SEQ ID NO: 18398 - RNA, 27 nt, Homo sapiens
  source 1..27: mol_type = unassigned RNA
cacctcttagtccagtgtccagcaaag

SEQ ID NO: 18399 - DNA, 27 bp, Homo sapiens
  source 1..27: mol_type = unassigned DNA
cacctcttagtccagtgtccagcaaag

SEQ ID NO: 18400 - DNA, 27 bp, Homo sapiens
  source 1..27: mol_type = unassigned DNA
ctttgctggacactggactaagaggtg

SEQ ID NO: 18401 - RNA, 61 nt, Homo sapiens
  source 1..61: mol_type = unassigned RNA
tttggaactctaaggtttaatgactgtcccactggatttcaaacttcatggatcctgtagc

SEQ ID NO: 18402 - DNA, 61 bp, Homo sapiens
  source 1..61: mol_type = unassigned DNA
tttggaactctaaggtttaatgactgtcccactggatttcaaacttcatggatcctgtagc

SEQ ID NO: 18403 - DNA, 61 bp, Homo sapiens
  source 1..61: mol_type = unassigned DNA
gctacaggatccatgaagtttgaaatccagtgggacagtcattaaaccttagagttccaaa

SEQ ID NO: 18404 - RNA, 90 nt, Homo sapiens
  source 1..90: mol_type = unassigned RNA
aagtaaaccattttggactgggagatccatctgccgtagggtccagtgtccagggtaacctttcaagcccgatgtagaggtttgcgatgt

SEQ ID NO: 18405 - DNA, 90 bp, Homo sapiens
  source 1..90: mol_type = unassigned DNA
aagtaaaccattttggactgggagatccatctgccgtagggtccagtgtccagggtaacctttcaagcccgatgtagaggtttgcgatgt

SEQ ID NO: 18406 - DNA, 90 bp, Homo sapiens
  source 1..90: mol_type = unassigned DNA
acatcgcaaacctctacatcgggcttgaaaggttaccctggacactggaccctacggcagatggatctcccagtccaaaatggtttactt

SEQ ID NO: 18407 - RNA, 73 nt, Homo sapiens
  source 1..73: mol_type = unassigned RNA
agtttcatggccagagtggcagtggtgccagccttagtgtccagtgtccaggcctgagaggtctggactgagc

SEQ ID NO: 18408 - DNA, 73 bp, Homo sapiens
  source 1..73: mol_type = unassigned DNA
agtttcatggccagagtggcagtggtgccagccttagtgtccagtgtccaggcctgagaggtctggactgagc

SEQ ID NO: 18409 - DNA, 73 bp, Homo sapiens
  source 1..73: mol_type = unassigned DNA
gctcagtccagacctctcaggcctggacactggacactaaggctggcaccactgccactctggccatgaaact

SEQ ID NO: 18410 - RNA, 26 nt, Homo sapiens
  source 1..26: mol_type = unassigned RNA
gacacaataggccaatgtccaggaga

SEQ ID NO: 18411 - DNA, 26 bp, Homo sapiens
  source 1..26: mol_type = unassigned DNA
gacacaataggccaatgtccaggaga

SEQ ID NO: 18412 - DNA, 26 bp, Homo sapiens
  source 1..26: mol_type = unassigned DNA
tctcctggacattggcctattgtgtc

SEQ ID NO: 18413 - RNA, 23 nt, Homo sapiens
  source 1..23: mol_type = unassigned RNA
ctctatattccagtggccaggtt

SEQ ID NO: 18414 - DNA, 23 bp, Homo sapiens
  source 1..23: mol_type = unassigned DNA
ctctatattccagtggccaggtt

SEQ ID NO: 18415 - DNA, 23 bp, Homo sapiens
  source 1..23: mol_type = unassigned DNA
aacctggccactggaatatagag

SEQ ID NO: 18416 - RNA, 43 nt, Homo sapiens
  source 1..43: mol_type = unassigned RNA
acaaagtgtctaaccatggagtaggctgacttactacccatta

SEQ ID NO: 18417 - DNA, 43 bp, Homo sapiens
  source 1..43: mol_type = unassigned DNA
acaaagtgtctaaccatggagtaggctgacttactacccatta

SEQ ID NO: 18418 - DNA, 43 bp, Homo sapiens
  source 1..43: mol_type = unassigned DNA
taatgggtagtaagtcagcctactccatggttagacactttgt

SEQ ID NO: 18419 - RNA, 43 nt, Homo sapiens
  source 1..43: mol_type = unassigned RNA
ctagaaccatttgtttctgcattcgcccttggtcaagagagaa

SEQ ID NO: 18420 - DNA, 43 bp, Homo sapiens
  source 1..43: mol_type = unassigned DNA
ctagaaccatttgtttctgcattcgcccttggtcaagagagaa

SEQ ID NO: 18421 - DNA, 43 bp, Homo sapiens
  source 1..43: mol_type = unassigned DNA
ttctctcttgaccaagggcgaatgcagaaacaaatggttctag

SEQ ID NO: 18422 - RNA, 25 nt, Homo sapiens
  source 1..25: mol_type = unassigned RNA
cccactggtccagtgtccaggggta

SEQ ID NO: 18423 - DNA, 25 bp, Homo sapiens
  source 1..25: mol_type = unassigned DNA
cccactggtccagtgtccaggggta

SEQ ID NO: 18424 - DNA, 25 bp, Homo sapiens
  source 1..25: mol_type = unassigned DNA
tacccctggacactggaccagtggg

SEQ ID NO: 18425 - RNA, 28 nt, Homo sapiens
  source 1..28: mol_type = unassigned RNA
caaaatagtccagttttcagggggctac

SEQ ID NO: 18426 - DNA, 28 bp, Homo sapiens
  source 1..28: mol_type = unassigned DNA
caaaatagtccagttttcagggggctac

SEQ ID NO: 18427 - DNA, 28 bp, Homo sapiens
  source 1..28: mol_type = unassigned DNA
gtagccccctgaaaactggactattttg

SEQ ID NO: 18428 - RNA, 43 nt, Homo sapiens
  source 1..43: mol_type = unassigned RNA
tgtatgaatatttaactggaaatatccatggagttggctaacg

SEQ ID NO: 18429 - DNA, 43 bp, Homo sapiens
  source 1..43: mol_type = unassigned DNA
tgtatgaatatttaactggaaatatccatggagttggctaacg

SEQ ID NO: 18430 - DNA, 43 bp, Homo sapiens
  source 1..43: mol_type = unassigned DNA
cgttagccaactccatggatatttccagttaaatattcataca

SEQ ID NO: 18431 - RNA, 55 nt, Homo sapiens
  source 1..55: mol_type = unassigned RNA
aacccagtgggaaaccatggacttggctgttgagattattaacgacagcagtttg

SEQ ID NO: 18432 - DNA, 55 bp, Homo sapiens
  source 1..55: mol_type = unassigned DNA
aacccagtgggaaaccatggacttggctgttgagattattaacgacagcagtttg

SEQ ID NO: 18433 - DNA, 55 bp, Homo sapiens
  source 1..55: mol_type = unassigned DNA
caaactgctgtcgttaataatctcaacagccaagtccatggtttcccactgggtt

SEQ ID NO: 18434 - RNA, 46 nt, Homo sapiens
  source 1..46: mol_type = unassigned RNA
tttaaaagtcatgatatagtagttaagtgtacggcctctggtgtca

SEQ ID NO: 18435 - DNA, 46 bp, Homo sapiens
  source 1..46: mol_type = unassigned DNA
tttaaaagtcatgatatagtagttaagtgtacggcctctggtgtca

SEQ ID NO: 18436 - DNA, 46 bp, Homo sapiens
  source 1..46: mol_type = unassigned DNA
tgacaccagaggccgtacacttaactactatatcatgacttttaaa

SEQ ID NO: 18437 - RNA, 24 nt, Homo sapiens
  source 1..24: mol_type = unassigned RNA
cagctattggacaagccttagaat

SEQ ID NO: 18438 - DNA, 24 bp, Homo sapiens
  source 1..24: mol_type = unassigned DNA
cagctattggacaagccttagaat

SEQ ID NO: 18439 - DNA, 24 bp, Homo sapiens
  source 1..24: mol_type = unassigned DNA
attctaaggcttgtccaatagctg

SEQ ID NO: 18440 - RNA, 48 nt, Homo sapiens
  source 1..48: mol_type = unassigned RNA
tcaggatggaatttctgctgtttatagccatggagttggctgcagtgg

SEQ ID NO: 18441 - DNA, 48 bp, Homo sapiens
  source 1..48: mol_type = unassigned DNA
tcaggatggaatttctgctgtttatagccatggagttggctgcagtgg

SEQ ID NO: 18442 - DNA, 48 bp, Homo sapiens
  source 1..48: mol_type = unassigned DNA
ccactgcagccaactccatggctataaacagcagaaattccatcctga

SEQ ID NO: 18443 - RNA, 29 nt, Homo sapiens
  source 1..29: mol_type = unassigned RNA
cagaaaggggagagtccagtgtccaggtt

SEQ ID NO: 18444 - DNA, 29 bp, Homo sapiens
  source 1..29: mol_type = unassigned DNA
cagaaaggggagagtccagtgtccaggtt

SEQ ID NO: 18445 - DNA, 29 bp, Homo sapiens
  source 1..29: mol_type = unassigned DNA
aacctggacactggactctcccctttctg

SEQ ID NO: 18446 - RNA, 54 nt, Homo sapiens
  source 1..54: mol_type = unassigned RNA
acatggtgaattctttgcaacatcatagtccagtgtgctggtgtggctctcatg

SEQ ID NO: 18447 - DNA, 54 bp, Homo sapiens
  source 1..54: mol_type = unassigned DNA
acatggtgaattctttgcaacatcatagtccagtgtgctggtgtggctctcatg

SEQ ID NO: 18448 - DNA, 54 bp, Homo sapiens
  source 1..54: mol_type = unassigned DNA
catgagagccacaccagcacactggactatgatgttgcaaagaattcaccatgt

SEQ ID NO: 18449 - RNA, 116 nt, Homo sapiens
  source 1..116: mol_type = unassigned RNA
taacgaaggccttggggctggcagagccaagggcccttcccactacccccatcccttggggcgagggcatctgcctctgggctgcggccttcagctcagtccagtggccaggggga

SEQ ID NO: 18450 - DNA, 116 bp, Homo sapiens
  source 1..116: mol_type = unassigned DNA
taacgaaggccttggggctggcagagccaagggcccttcccactacccccatcccttggggcgagggcatctgcctctgggctgcggccttcagctcagtccagtggccaggggga

SEQ ID NO: 18451 - DNA, 116 bp, Homo sapiens
  source 1..116: mol_type = unassigned DNA
tccccctggccactggactgagctgaaggccgcagcccagaggcagatgccctcgccccaagggatgggggtagtgggaagggcccttggctctgccagccccaaggccttcgtta

SEQ ID NO: 18452 - RNA, 25 nt, Homo sapiens
  source 1..25: mol_type = unassigned RNA
acaccttagtcaagtgtccaggtta

SEQ ID NO: 18453 - DNA, 25 bp, Homo sapiens
  source 1..25: mol_type = unassigned DNA
acaccttagtcaagtgtccaggtta

SEQ ID NO: 18454 - DNA, 25 bp, Homo sapiens
  source 1..25: mol_type = unassigned DNA
taacctggacacttgactaaggtgt

SEQ ID NO: 18455 - RNA, 48 nt, Homo sapiens
  source 1..48: mol_type = unassigned RNA
taagcacaccaggctggctgtcagaataggtagtgaggatctgtgtct

SEQ ID NO: 18456 - DNA, 48 bp, Homo sapiens
  source 1..48: mol_type = unassigned DNA
taagcacaccaggctggctgtcagaataggtagtgaggatctgtgtct

SEQ ID NO: 18457 - DNA, 48 bp, Homo sapiens
  source 1..48: mol_type = unassigned DNA
agacacagatcctcactacctattctgacagccagcctggtgtgctta

SEQ ID NO: 18458 - RNA, 34 nt, Homo sapiens
  source 1..34: mol_type = unassigned RNA
agatcagttagcagtatcgtgcagtgtccaggtt

SEQ ID NO: 18459 - DNA, 34 bp, Homo sapiens
  source 1..34: mol_type = unassigned DNA
agatcagttagcagtatcgtgcagtgtccaggtt

SEQ ID NO: 18460 - DNA, 34 bp, Homo sapiens
  source 1..34: mol_type = unassigned DNA
aacctggacactgcacgatactgctaactgatct

SEQ ID NO: 18461 - RNA, 42 nt, Homo sapiens
  source 1..42: mol_type = unassigned RNA
gaaactagacatggagttggctgtcctgtagggaaaaaaaaa

SEQ ID NO: 18462 - DNA, 42 bp, Homo sapiens
  source 1..42: mol_type = unassigned DNA
gaaactagacatggagttggctgtcctgtagggaaaaaaaaa

SEQ ID NO: 18463 - DNA, 42 bp, Homo sapiens
  source 1..42: mol_type = unassigned DNA
tttttttttccctacaggacagccaactccatgtctagtttc

SEQ ID NO: 18464 - RNA, 26 nt, Homo sapiens
  source 1..26: mol_type = unassigned RNA
tagcagtatcgtgcagtgtccaggtt

SEQ ID NO: 18465 - DNA, 26 bp, Homo sapiens
  source 1..26: mol_type = unassigned DNA
tagcagtatcgtgcagtgtccaggtt

SEQ ID NO: 18466 - DNA, 26 bp, Homo sapiens
  source 1..26: mol_type = unassigned DNA
aacctggacactgcacgatactgcta

SEQ ID NO: 18467 - RNA, 30 nt, Homo sapiens
  source 1..30: mol_type = unassigned RNA
aggatgctcacagtccagtgtccaggcaga

SEQ ID NO: 18468 - DNA, 30 bp, Homo sapiens
  source 1..30: mol_type = unassigned DNA
aggatgctcacagtccagtgtccaggcaga

SEQ ID NO: 18469 - DNA, 30 bp, Homo sapiens
  source 1..30: mol_type = unassigned DNA
tctgcctggacactggactgtgagcatcct

SEQ ID NO: 18470 - RNA, 35 nt, Homo sapiens
  source 1..35: mol_type = unassigned RNA
taactatacatggagttggctgtgaaccatgtaag

SEQ ID NO: 18471 - DNA, 35 bp, Homo sapiens
  source 1..35: mol_type = unassigned DNA
taactatacatggagttggctgtgaaccatgtaag

SEQ ID NO: 18472 - DNA, 35 bp, Homo sapiens
  source 1..35: mol_type = unassigned DNA
cttacatggttcacagccaactccatgtatagtta

SEQ ID NO: 18473 - RNA, 28 nt, Homo sapiens
  source 1..28: mol_type = unassigned RNA
ggcagctccatggagttggctgctgaga

SEQ ID NO: 18474 - DNA, 28 bp, Homo sapiens
  source 1..28: mol_type = unassigned DNA
ggcagctccatggagttggctgctgaga

SEQ ID NO: 18475 - DNA, 28 bp, Homo sapiens
  source 1..28: mol_type = unassigned DNA
tctcagcagccaactccatggagctgcc

SEQ ID NO: 18476 - RNA, 24 nt, Homo sapiens
  source 1..24: mol_type = unassigned RNA
tttcacagtcatggtctcatagta

SEQ ID NO: 18477 - DNA, 24 bp, Homo sapiens
  source 1..24: mol_type = unassigned DNA
tttcacagtcatggtctcatagta

SEQ ID NO: 18478 - DNA, 24 bp, Homo sapiens
  source 1..24: mol_type = unassigned DNA
tactatgagaccatgactgtgaaa

SEQ ID NO: 18479 - RNA, 24 nt, Homo sapiens
  source 1..24: mol_type = unassigned RNA
ggaattaaccatggagttgcatgt

SEQ ID NO: 18480 - DNA, 24 bp, Homo sapiens
  source 1..24: mol_type = unassigned DNA
ggaattaaccatggagttgcatgt

SEQ ID NO: 18481 - DNA, 24 bp, Homo sapiens
  source 1..24: mol_type = unassigned DNA
acatgcaactccatggttaattcc

SEQ ID NO: 18482 - RNA, 38 nt, Homo sapiens
  source 1..38: mol_type = unassigned RNA
gggtctcactggactctgtatagtccggtgtccagttt

SEQ ID NO: 18483 - DNA, 38 bp, Homo sapiens
  source 1..38: mol_type = unassigned DNA
gggtctcactggactctgtatagtccggtgtccagttt

SEQ ID NO: 18484 - DNA, 38 bp, Homo sapiens
  source 1..38: mol_type = unassigned DNA
aaactggacaccggactatacagagtccagtgagaccc

SEQ ID NO: 18485 - RNA, 31 nt, Homo sapiens
  source 1..31: mol_type = unassigned RNA
ctaataactatggagtttgctgtaggatttt

SEQ ID NO: 18486 - DNA, 31 bp, Homo sapiens
  source 1..31: mol_type = unassigned DNA
ctaataactatggagtttgctgtaggatttt

SEQ ID NO: 18487 - DNA, 31 bp, Homo sapiens
  source 1..31: mol_type = unassigned DNA
aaaatcctacagcaaactccatagttattag

SEQ ID NO: 18488 - RNA, 24 nt, Homo sapiens
  source 1..24: mol_type = unassigned RNA
aataagagtccagtttccagggta

SEQ ID NO: 18489 - DNA, 24 bp, Homo sapiens
  source 1..24: mol_type = unassigned DNA
aataagagtccagtttccagggta

SEQ ID NO: 18490 - DNA, 24 bp, Homo sapiens
  source 1..24: mol_type = unassigned DNA
taccctggaaactggactcttatt

SEQ ID NO: 18491 - RNA, 25 nt, Homo sapiens
  source 1..25: mol_type = unassigned RNA
gagatccccatggagttggctgagg

SEQ ID NO: 18492 - DNA, 25 bp, Homo sapiens
  source 1..25: mol_type = unassigned DNA
gagatccccatggagttggctgagg

SEQ ID NO: 18493 - DNA, 25 bp, Homo sapiens
  source 1..25: mol_type = unassigned DNA
cctcagccaactccatggggatctc

SEQ ID NO: 18494 - RNA, 24 nt, Homo sapiens
  source 1..24: mol_type = unassigned RNA
ttagcaagtcatgctatagtagta

SEQ ID NO: 18495 - DNA, 24 bp, Homo sapiens
  source 1..24: mol_type = unassigned DNA
ttagcaagtcatgctatagtagta

SEQ ID NO: 18496 - DNA, 24 bp, Homo sapiens
  source 1..24: mol_type = unassigned DNA
tactactatagcatgacttgctaa

SEQ ID NO: 18497 - RNA, 53 nt, Homo sapiens
  source 1..53: mol_type = unassigned RNA
tgaaatgaagtttcaggatagtccagtggccaaggcatgaaaagatagtctct

SEQ ID NO: 18498 - DNA, 53 bp, Homo sapiens
  source 1..53: mol_type = unassigned DNA
tgaaatgaagtttcaggatagtccagtggccaaggcatgaaaagatagtctct

SEQ ID NO: 18499 - DNA, 53 bp, Homo sapiens
  source 1..53: mol_type = unassigned DNA
agagactatcttttcatgccttggccactggactatcctgaaacttcatttca

SEQ ID NO: 18500 - RNA, 36 nt, Homo sapiens
  source 1..36: mol_type = unassigned RNA
gctcctagactccatcaaagtccagagtccagcatt

SEQ ID NO: 18501 - DNA, 36 bp, Homo sapiens
  source 1..36: mol_type = unassigned DNA
gctcctagactccatcaaagtccagagtccagcatt

SEQ ID NO: 18502 - DNA, 36 bp, Homo sapiens
  source 1..36: mol_type = unassigned DNA
aatgctggactctggactttgatggagtctaggagc

SEQ ID NO: 18503 - RNA, 23 nt, Homo sapiens
  source 1..23: mol_type = unassigned RNA
tacctaaccaaggagttggaaaa

SEQ ID NO: 18504 - DNA, 23 bp, Homo sapiens
  source 1..23: mol_type = unassigned DNA
tacctaaccaaggagttggaaaa

SEQ ID NO: 18505 - DNA, 23 bp, Homo sapiens
  source 1..23: mol_type = unassigned DNA
ttttccaactccttggttaggta

SEQ ID NO: 18506 - RNA, 23 nt, Homo sapiens
  source 1..23: mol_type = unassigned RNA
cagcacagaacagtgtccagggg

SEQ ID NO: 18507 - DNA, 23 bp, Homo sapiens
  source 1..23: mol_type = unassigned DNA
cagcacagaacagtgtccagggg

SEQ ID NO: 18508 - DNA, 23 bp, Homo sapiens
  source 1..23: mol_type = unassigned DNA
cccctggacactgttctgtgctg

SEQ ID NO: 18509 - RNA, 42 nt, Homo sapiens
  source 1..42: mol_type = unassigned RNA
ctaagaagggatggtaaaaatctatggggtagcagtggtggc

SEQ ID NO: 18510 - DNA, 42 bp, Homo sapiens
  source 1..42: mol_type = unassigned DNA
ctaagaagggatggtaaaaatctatggggtagcagtggtggc

SEQ ID NO: 18511 - DNA, 42 bp, Homo sapiens
  source 1..42: mol_type = unassigned DNA
gccaccactgctaccccatagatttttaccatcccttcttag

SEQ ID NO: 18512 - RNA, 39 nt, Homo sapiens
  source 1..39: mol_type = unassigned RNA
gggatcagtccagtgggacacagtccagtgtccaggaaa

SEQ ID NO: 18513 - DNA, 39 bp, Homo sapiens
  source 1..39: mol_type = unassigned DNA
gggatcagtccagtgggacacagtccagtgtccaggaaa

SEQ ID NO: 18514 - DNA, 39 bp, Homo sapiens
  source 1..39: mol_type = unassigned DNA
tttcctggacactggactgtgtcccactggactgatccc

SEQ ID NO: 18515 - RNA, 28 nt, Homo sapiens
  source 1..28: mol_type = unassigned RNA
cgagcatgttccagtgtccagggaggtg

SEQ ID NO: 18516 - DNA, 28 bp, Homo sapiens
  source 1..28: mol_type = unassigned DNA
cgagcatgttccagtgtccagggaggtg

SEQ ID NO: 18517 - DNA, 28 bp, Homo sapiens
  source 1..28: mol_type = unassigned DNA
cacctccctggacactggaacatgctcg

SEQ ID NO: 18518 - RNA, 32 nt, Homo sapiens
  source 1..32: mol_type = unassigned RNA
ccaagagttcagacttcatgggtcctgaagtt

SEQ ID NO: 18519 - DNA, 32 bp, Homo sapiens
  source 1..32: mol_type = unassigned DNA
ccaagagttcagacttcatgggtcctgaagtt

SEQ ID NO: 18520 - DNA, 32 bp, Homo sapiens
  source 1..32: mol_type = unassigned DNA
aacttcaggacccatgaagtctgaactcttgg

SEQ ID NO: 18521 - RNA, 112 nt, Homo sapiens
  source 1..112: mol_type = unassigned RNA
gtgcttgtgcttttccccacacaggaagaccagacctctggaagctgctgatctgaggagaatgagagacaagtagagtagacctcgtctcaacccacggcttgaatgccaa

SEQ ID NO: 18522 - DNA, 112 bp, Homo sapiens
  source 1..112: mol_type = unassigned DNA
gtgcttgtgcttttccccacacaggaagaccagacctctggaagctgctgatctgaggagaatgagagacaagtagagtagacctcgtctcaacccacggcttgaatgccaa

SEQ ID NO: 18523 - DNA, 112 bp, Homo sapiens
  source 1..112: mol_type = unassigned DNA
ttggcattcaagccgtgggttgagacgaggtctactctacttgtctctcattctcctcagatcagcagcttccagaggtctggtcttcctgtgtggggaaaagcacaagcac

SEQ ID NO: 18524 - RNA, 34 nt, Homo sapiens
  source 1..34: mol_type = unassigned RNA
atcaacaaccatagagttggctgaatagagtggc

SEQ ID NO: 18525 - DNA, 34 bp, Homo sapiens
  source 1..34: mol_type = unassigned DNA
atcaacaaccatagagttggctgaatagagtggc

SEQ ID NO: 18526 - DNA, 34 bp, Homo sapiens
  source 1..34: mol_type = unassigned DNA
gccactctattcagccaactctatggttgttgat

SEQ ID NO: 18527 - RNA, 31 nt, Homo sapiens
  source 1..31: mol_type = unassigned RNA
agattcatgattgtccagtgttcagggtagg

SEQ ID NO: 18528 - DNA, 31 bp, Homo sapiens
  source 1..31: mol_type = unassigned DNA
agattcatgattgtccagtgttcagggtagg

SEQ ID NO: 18529 - DNA, 31 bp, Homo sapiens
  source 1..31: mol_type = unassigned DNA
cctaccctgaacactggacaatcatgaatct

SEQ ID NO: 18530 - RNA, 28 nt, Homo sapiens
  source 1..28: mol_type = unassigned RNA
tcccataaacatggagttgcctgtgaca

SEQ ID NO: 18531 - DNA, 28 bp, Homo sapiens
  source 1..28: mol_type = unassigned DNA
tcccataaacatggagttgcctgtgaca

SEQ ID NO: 18532 - DNA, 28 bp, Homo sapiens
  source 1..28: mol_type = unassigned DNA
tgtcacaggcaactccatgtttatggga

SEQ ID NO: 18533 - RNA, 24 nt, Homo sapiens
  source 1..24: mol_type = unassigned RNA
attttggaccctgaattggaaatc

SEQ ID NO: 18534 - DNA, 24 bp, Homo sapiens
  source 1..24: mol_type = unassigned DNA
attttggaccctgaattggaaatc

SEQ ID NO: 18535 - DNA, 24 bp, Homo sapiens
  source 1..24: mol_type = unassigned DNA
gatttccaattcagggtccaaaat

SEQ ID NO: 18536 - RNA, 35 nt, Homo sapiens
  source 1..35: mol_type = unassigned RNA
aaatggatgattagttgggtagatagatgtatgat

SEQ ID NO: 18537 - DNA, 35 bp, Homo sapiens
  source 1..35: mol_type = unassigned DNA
aaatggatgattagttgggtagatagatgtatgat

SEQ ID NO: 18538 - DNA, 35 bp, Homo sapiens
  source 1..35: mol_type = unassigned DNA
atcatacatctatctacccaactaatcatccattt

SEQ ID NO: 18539 - RNA, 72 nt, Homo sapiens
  source 1..72: mol_type = unassigned RNA
tgctggttgagtggatggaggagtgagagttgcccgggtctgggacttccataaccagggagatggcggtga

SEQ ID NO: 18540 - DNA, 72 bp, Homo sapiens
  source 1..72: mol_type = unassigned DNA
tgctggttgagtggatggaggagtgagagttgcccgggtctgggacttccataaccagggagatggcggtga

SEQ ID NO: 18541 - DNA, 72 bp, Homo sapiens
  source 1..72: mol_type = unassigned DNA
tcaccgccatctccctggttatggaagtcccagacccgggcaactctcactcctccatccactcaaccagca

SEQ ID NO: 18542 - RNA, 22 nt, Homo sapiens
  source 1..22: mol_type = unassigned RNA
tacttggtttctagatatatgt

SEQ ID NO: 18543 - DNA, 22 bp, Homo sapiens
  source 1..22: mol_type = unassigned DNA
tacttggtttctagatatatgt

SEQ ID NO: 18544 - DNA, 22 bp, Homo sapiens
  source 1..22: mol_type = unassigned DNA
acatatatctagaaaccaagta

SEQ ID NO: 18545 - RNA, 35 nt, Homo sapiens
  source 1..35: mol_type = unassigned RNA
agtattgaaagggagggtgtctgactttatggaga

SEQ ID NO: 18546 - DNA, 35 bp, Homo sapiens
  source 1..35: mol_type = unassigned DNA
agtattgaaagggagggtgtctgactttatggaga

SEQ ID NO: 18547 - DNA, 35 bp, Homo sapiens
  source 1..35: mol_type = unassigned DNA
tctccataaagtcagacaccctccctttcaatact

SEQ ID NO: 18548 - RNA, 26 nt, Homo sapiens
  source 1..26: mol_type = unassigned RNA
tgctaatcgtcactggccatcagaga

SEQ ID NO: 18549 - DNA, 26 bp, Homo sapiens
  source 1..26: mol_type = unassigned DNA
tgctaatcgtcactggccatcagaga

SEQ ID NO: 18550 - DNA, 26 bp, Homo sapiens
  source 1..26: mol_type = unassigned DNA
tctctgatggccagtgacgattagca

SEQ ID NO: 18551 - RNA, 45 nt, Homo sapiens
  source 1..45: mol_type = unassigned RNA
cagtcttagaaactgctgtttcagactgtgttgacttttctctct

SEQ ID NO: 18552 - DNA, 45 bp, Homo sapiens
  source 1..45: mol_type = unassigned DNA
cagtcttagaaactgctgtttcagactgtgttgacttttctctct

SEQ ID NO: 18553 - DNA, 45 bp, Homo sapiens
  source 1..45: mol_type = unassigned DNA
agagagaaaagtcaacacagtctgaaacagcagtttctaagactg

SEQ ID NO: 18554 - RNA, 35 nt, Homo sapiens
  source 1..35: mol_type = unassigned RNA
tacctaaccaaggagttggaagagctctacaagga

SEQ ID NO: 18555 - DNA, 35 bp, Homo sapiens
  source 1..35: mol_type = unassigned DNA
tacctaaccaaggagttggaagagctctacaagga

SEQ ID NO: 18556 - DNA, 35 bp, Homo sapiens
  source 1..35: mol_type = unassigned DNA
tccttgtagagctcttccaactccttggttaggta

SEQ ID NO: 18557 - RNA, 51 nt, Homo sapiens
  source 1..51: mol_type = unassigned RNA
tggagccttccaggggaattttcctgtttggccagagggtgacggctgcag

SEQ ID NO: 18558 - DNA, 51 bp, Homo sapiens
  source 1..51: mol_type = unassigned DNA
tggagccttccaggggaattttcctgtttggccagagggtgacggctgcag

SEQ ID NO: 18559 - DNA, 51 bp, Homo sapiens
  source 1..51: mol_type = unassigned DNA
ctgcagccgtcaccctctggccaaacaggaaaattcccctggaaggctcca

SEQ ID NO: 18560 - RNA, 30 nt, Homo sapiens
  source 1..30: mol_type = unassigned RNA
ataggtgtttagctagatgtatgaaaaaaa

SEQ ID NO: 18561 - DNA, 30 bp, Homo sapiens
  source 1..30: mol_type = unassigned DNA
ataggtgtttagctagatgtatgaaaaaaa

SEQ ID NO: 18562 - DNA, 30 bp, Homo sapiens
  source 1..30: mol_type = unassigned DNA
tttttttcatacatctagctaaacacctat

SEQ ID NO: 18563 - RNA, 24 nt, Homo sapiens
  source 1..24: mol_type = unassigned RNA
aagcttgtatcaaatgatgttgaa

SEQ ID NO: 18564 - DNA, 24 bp, Homo sapiens
  source 1..24: mol_type = unassigned DNA
aagcttgtatcaaatgatgttgaa

SEQ ID NO: 18565 - DNA, 24 bp, Homo sapiens
  source 1..24: mol_type = unassigned DNA
ttcaacatcatttgatacaagctt

SEQ ID NO: 18566 - RNA, 23 nt, Homo sapiens
  source 1..23: mol_type = unassigned RNA
atatcgtatcaggcatgttgacc

SEQ ID NO: 18567 - DNA, 23 bp, Homo sapiens
  source 1..23: mol_type = unassigned DNA
atatcgtatcaggcatgttgacc

SEQ ID NO: 18568 - DNA, 23 bp, Homo sapiens
  source 1..23: mol_type = unassigned DNA
ggtcaacatgcctgatacgatat

SEQ ID NO: 18569 - RNA, 77 nt, Homo sapiens
  source 1..77: mol_type = unassigned RNA
aaagtgagtcatatactgtaaaaaatgtcaaactctctgacaattcccttaatgagaaaattctagggatttccatc

SEQ ID NO: 18570 - DNA, 77 bp, Homo sapiens
  source 1..77: mol_type = unassigned DNA
aaagtgagtcatatactgtaaaaaatgtcaaactctctgacaattcccttaatgagaaaattctagggatttccatc

SEQ ID NO: 18571 - DNA, 77 bp, Homo sapiens
  source 1..77: mol_type = unassigned DNA
gatggaaatccctagaattttctcattaagggaattgtcagagagtttgacattttttacagtatatgactcacttt

SEQ ID NO: 18572 - RNA, 39 nt, Homo sapiens
  source 1..39: mol_type = unassigned RNA
aagacacaactatttacagattcagacacctttgttgtt

SEQ ID NO: 18573 - DNA, 39 bp, Homo sapiens
  source 1..39: mol_type = unassigned DNA
aagacacaactatttacagattcagacacctttgttgtt

SEQ ID NO: 18574 - DNA, 39 bp, Homo sapiens
  source 1..39: mol_type = unassigned DNA
aacaacaaaggtgtctgaatctgtaaatagttgtgtctt

SEQ ID NO: 18575 - RNA, 24 nt, Homo sapiens
  source 1..24: mol_type = unassigned RNA
ctacactgtcagactgtttttgat

SEQ ID NO: 18576 - DNA, 24 bp, Homo sapiens
  source 1..24: mol_type = unassigned DNA
ctacactgtcagactgtttttgat

SEQ ID NO: 18577 - DNA, 24 bp, Homo sapiens
  source 1..24: mol_type = unassigned DNA
atcaaaaacagtctgacagtgtag

SEQ ID NO: 18578 - RNA, 27 nt, Homo sapiens
  source 1..27: mol_type = unassigned RNA
tttctctatcatactgatgaagacacc

SEQ ID NO: 18579 - DNA, 27 bp, Homo sapiens
  source 1..27: mol_type = unassigned DNA
tttctctatcatactgatgaagacacc

SEQ ID NO: 18580 - DNA, 27 bp, Homo sapiens
  source 1..27: mol_type = unassigned DNA
ggtgtcttcatcagtatgatagagaaa

SEQ ID NO: 18581 - RNA, 22 nt, Homo sapiens
  source 1..22: mol_type = unassigned RNA
ttgcaatttttcagccactagt

SEQ ID NO: 18582 - DNA, 22 bp, Homo sapiens
  source 1..22: mol_type = unassigned DNA
ttgcaatttttcagccactagt

SEQ ID NO: 18583 - DNA, 22 bp, Homo sapiens
  source 1..22: mol_type = unassigned DNA
actagtggctgaaaaattgcaa

SEQ ID NO: 18584 - RNA, 26 nt, Homo sapiens
  source 1..26: mol_type = unassigned RNA
tccagcaaagggaagcgctttctctt

SEQ ID NO: 18585 - DNA, 26 bp, Homo sapiens
  source 1..26: mol_type = unassigned DNA
tccagcaaagggaagcgctttctctt

SEQ ID NO: 18586 - DNA, 26 bp, Homo sapiens
  source 1..26: mol_type = unassigned DNA
aagagaaagcgcttccctttgctgga

SEQ ID NO: 18587 - RNA, 58 nt, Homo sapiens
  source 1..58: mol_type = unassigned RNA
cagcctggtgacttggaaagcacatgtatcgcgtgtcagactgagttcagatttgcca

SEQ ID NO: 18588 - DNA, 58 bp, Homo sapiens
  source 1..58: mol_type = unassigned DNA
cagcctggtgacttggaaagcacatgtatcgcgtgtcagactgagttcagatttgcca

SEQ ID NO: 18589 - DNA, 58 bp, Homo sapiens
  source 1..58: mol_type = unassigned DNA
tggcaaatctgaactcagtctgacacgcgatacatgtgctttccaagtcaccaggctg

SEQ ID NO: 18590 - RNA, 24 nt, Homo sapiens
  source 1..24: mol_type = unassigned RNA
tatcagaatccagtgtccaggaat

SEQ ID NO: 18591 - DNA, 24 bp, Homo sapiens
  source 1..24: mol_type = unassigned DNA
tatcagaatccagtgtccaggaat

SEQ ID NO: 18592 - DNA, 24 bp, Homo sapiens
  source 1..24: mol_type = unassigned DNA
attcctggacactggattctgata

SEQ ID NO: 18593 - RNA, 23 nt, Homo sapiens
  source 1..23: mol_type = unassigned RNA
tagcttaaacactaatgttcaca

SEQ ID NO: 18594 - DNA, 23 bp, Homo sapiens
  source 1..23: mol_type = unassigned DNA
tagcttaaacactaatgttcaca

SEQ ID NO: 18595 - DNA, 23 bp, Homo sapiens
  source 1..23: mol_type = unassigned DNA
tgtgaacattagtgtttaagcta

SEQ ID NO: 18596 - RNA, 27 nt, Homo sapiens
  source 1..27: mol_type = unassigned RNA
ttttatacatggtagaactcagagtaa

SEQ ID NO: 18597 - DNA, 27 bp, Homo sapiens
  source 1..27: mol_type = unassigned DNA
ttttatacatggtagaactcagagtaa

SEQ ID NO: 18598 - DNA, 27 bp, Homo sapiens
  source 1..27: mol_type = unassigned DNA
ttactctgagttctaccatgtataaaa

SEQ ID NO: 18599 - RNA, 24 nt, Homo sapiens
  source 1..24: mol_type = unassigned RNA
acataatagtcaaatgtccaggac

SEQ ID NO: 18600 - DNA, 24 bp, Homo sapiens
  source 1..24: mol_type = unassigned DNA
acataatagtcaaatgtccaggac

SEQ ID NO: 18601 - DNA, 24 bp, Homo sapiens
  source 1..24: mol_type = unassigned DNA
gtcctggacatttgactattatgt

SEQ ID NO: 18602 - RNA, 33 nt, Homo sapiens
  source 1..33: mol_type = unassigned RNA
cccatcaaaactacttggggctgaaggctttct

SEQ ID NO: 18603 - DNA, 33 bp, Homo sapiens
  source 1..33: mol_type = unassigned DNA
cccatcaaaactacttggggctgaaggctttct

SEQ ID NO: 18604 - DNA, 33 bp, Homo sapiens
  source 1..33: mol_type = unassigned DNA
agaaagccttcagccccaagtagttttgatggg

SEQ ID NO: 18605 - RNA, 46 nt, Homo sapiens
  source 1..46: mol_type = unassigned RNA
ctccgccgacttctctcttccatgttttagtagagggtggggctaa

SEQ ID NO: 18606 - DNA, 46 bp, Homo sapiens
  source 1..46: mol_type = unassigned DNA
ctccgccgacttctctcttccatgttttagtagagggtggggctaa

SEQ ID NO: 18607 - DNA, 46 bp, Homo sapiens
  source 1..46: mol_type = unassigned DNA
ttagccccaccctctactaaaacatggaagagagaagtcggcggag

SEQ ID NO: 18608 - RNA, 21 nt, Homo sapiens
  source 1..21: mol_type = unassigned RNA
tttttgtctgtactggaaaaa

SEQ ID NO: 18609 - DNA, 21 bp, Homo sapiens
  source 1..21: mol_type = unassigned DNA
tttttgtctgtactggaaaaa

SEQ ID NO: 18610 - DNA, 21 bp, Homo sapiens
  source 1..21: mol_type = unassigned DNA
tttttccagtacagacaaaaa

SEQ ID NO: 18611 - RNA, 46 nt, Homo sapiens
  source 1..46: mol_type = unassigned RNA
actccaattgtgggggcacggataacacccactggagtatttggtg

SEQ ID NO: 18612 - DNA, 46 bp, Homo sapiens
  source 1..46: mol_type = unassigned DNA
actccaattgtgggggcacggataacacccactggagtatttggtg

SEQ ID NO: 18613 - DNA, 46 bp, Homo sapiens
  source 1..46: mol_type = unassigned DNA
caccaaatactccagtgggtgttatccgtgcccccacaattggagt

SEQ ID NO: 18614 - RNA, 41 nt, Homo sapiens
  source 1..41: mol_type = unassigned RNA
ttatttagtaggttgaacagagtggccgttgtggaaaagta

SEQ ID NO: 18615 - DNA, 41 bp, Homo sapiens
  source 1..41: mol_type = unassigned DNA
ttatttagtaggttgaacagagtggccgttgtggaaaagta

SEQ ID NO: 18616 - DNA, 41 bp, Homo sapiens
  source 1..41: mol_type = unassigned DNA
tacttttccacaacggccactctgttcaacctactaaataa

SEQ ID NO: 18617 - RNA, 27 nt, Homo sapiens
  source 1..27: mol_type = unassigned RNA
tcagttattagtttttctcttttctct

SEQ ID NO: 18618 - DNA, 27 bp, Homo sapiens
  source 1..27: mol_type = unassigned DNA
tcagttattagtttttctcttttctct

SEQ ID NO: 18619 - DNA, 27 bp, Homo sapiens
  source 1..27: mol_type = unassigned DNA
agagaaaagagaaaaactaataactga

SEQ ID NO: 18620 - RNA, 23 nt, Homo sapiens
  source 1..23: mol_type = unassigned RNA
ttctttagtatattctatagtga

SEQ ID NO: 18621 - DNA, 23 bp, Homo sapiens
  source 1..23: mol_type = unassigned DNA
ttctttagtatattctatagtga

SEQ ID NO: 18622 - DNA, 23 bp, Homo sapiens
  source 1..23: mol_type = unassigned DNA
tcactatagaatatactaaagaa

SEQ ID NO: 18623 - RNA, 24 nt, Homo sapiens
  source 1..24: mol_type = unassigned RNA
ttgtgtattattttgtctagatat

SEQ ID NO: 18624 - DNA, 24 bp, Homo sapiens
  source 1..24: mol_type = unassigned DNA
ttgtgtattattttgtctagatat

SEQ ID NO: 18625 - DNA, 24 bp, Homo sapiens
  source 1..24: mol_type = unassigned DNA
atatctagacaaaataatacacaa

SEQ ID NO: 18626 - RNA, 25 nt, Homo sapiens
  source 1..25: mol_type = unassigned RNA
tttgatgtattatcttgtttagttt

SEQ ID NO: 18627 - DNA, 25 bp, Homo sapiens
  source 1..25: mol_type = unassigned DNA
tttgatgtattatcttgtttagttt

SEQ ID NO: 18628 - DNA, 25 bp, Homo sapiens
  source 1..25: mol_type = unassigned DNA
aaactaaacaagataatacatcaaa

SEQ ID NO: 18629 - RNA, 60 nt, Homo sapiens
  source 1..60: mol_type = unassigned RNA
tcaccctactgaaccaatagcaaggttgtaatcatcactactgttagttgaggggttcct

SEQ ID NO: 18630 - DNA, 60 bp, Homo sapiens
  source 1..60: mol_type = unassigned DNA
tcaccctactgaaccaatagcaaggttgtaatcatcactactgttagttgaggggttcct

SEQ ID NO: 18631 - DNA, 60 bp, Homo sapiens
  source 1..60: mol_type = unassigned DNA
aggaacccctcaactaacagtagtgatgattacaaccttgctattggttcagtagggtga

SEQ ID NO: 18632 - RNA, 62 nt, Homo sapiens
  source 1..62: mol_type = unassigned RNA
tcttcctcagcttcctgtagcaccccaaaatggtagaacccaacttgtggtttgcagagtct

SEQ ID NO: 18633 - DNA, 62 bp, Homo sapiens
  source 1..62: mol_type = unassigned DNA
tcttcctcagcttcctgtagcaccccaaaatggtagaacccaacttgtggtttgcagagtct

SEQ ID NO: 18634 - DNA, 62 bp, Homo sapiens
  source 1..62: mol_type = unassigned DNA
agactctgcaaaccacaagttgggttctaccattttggggtgctacaggaagctgaggaaga

SEQ ID NO: 18635 - RNA, 31 nt, Homo sapiens
  source 1..31: mol_type = unassigned RNA
tctctcctaccctttaccctgtcttctccag

SEQ ID NO: 18636 - DNA, 31 bp, Homo sapiens
  source 1..31: mol_type = unassigned DNA
tctctcctaccctttaccctgtcttctccag

SEQ ID NO: 18637 - DNA, 31 bp, Homo sapiens
  source 1..31: mol_type = unassigned DNA
ctggagaagacagggtaaagggtaggagaga

SEQ ID NO: 18638 - RNA, 23 nt, Homo sapiens
  source 1..23: mol_type = unassigned RNA
tgctcatgtaggttatatagttt

SEQ ID NO: 18639 - DNA, 23 bp, Homo sapiens
  source 1..23: mol_type = unassigned DNA
tgctcatgtaggttatatagttt

SEQ ID NO: 18640 - DNA, 23 bp, Homo sapiens
  source 1..23: mol_type = unassigned DNA
aaactatataacctacatgagca

SEQ ID NO: 18641 - RNA, 23 nt, Homo sapiens
  source 1..23: mol_type = unassigned RNA
ttcttgtagcctttttcagaaga

SEQ ID NO: 18642 - DNA, 23 bp, Homo sapiens
  source 1..23: mol_type = unassigned DNA
ttcttgtagcctttttcagaaga

SEQ ID NO: 18643 - DNA, 23 bp, Homo sapiens
  source 1..23: mol_type = unassigned DNA
tcttctgaaaaaggctacaagaa

SEQ ID NO: 18644 - RNA, 22 nt, Homo sapiens
  source 1..22: mol_type = unassigned RNA
agatacgtggctcaatggaagc

SEQ ID NO: 18645 - DNA, 22 bp, Homo sapiens
  source 1..22: mol_type = unassigned DNA
agatacgtggctcaatggaagc

SEQ ID NO: 18646 - DNA, 22 bp, Homo sapiens
  source 1..22: mol_type = unassigned DNA
gcttccattgagccacgtatct

SEQ ID NO: 18647 - RNA, 67 nt, Homo sapiens
  source 1..67: mol_type = unassigned RNA
taattagaaagaacctgagcccctgatgatttcattgatttactgactcaaccaatcatcacccacc

SEQ ID NO: 18648 - DNA, 67 bp, Homo sapiens
  source 1..67: mol_type = unassigned DNA
taattagaaagaacctgagcccctgatgatttcattgatttactgactcaaccaatcatcacccacc

SEQ ID NO: 18649 - DNA, 67 bp, Homo sapiens
  source 1..67: mol_type = unassigned DNA
ggtgggtgatgattggttgagtcagtaaatcaatgaaatcatcaggggctcaggttctttctaatta

SEQ ID NO: 18650 - RNA, 33 nt, Homo sapiens
  source 1..33: mol_type = unassigned RNA
tgccatggaagtttgtacacttggcctaatgca

SEQ ID NO: 18651 - DNA, 33 bp, Homo sapiens
  source 1..33: mol_type = unassigned DNA
tgccatggaagtttgtacacttggcctaatgca

SEQ ID NO: 18652 - DNA, 33 bp, Homo sapiens
  source 1..33: mol_type = unassigned DNA
tgcattaggccaagtgtacaaacttccatggca

SEQ ID NO: 18653 - RNA, 23 nt, Homo sapiens
  source 1..23: mol_type = unassigned RNA
ttagttattagattgtttacttt

SEQ ID NO: 18654 - DNA, 23 bp, Homo sapiens
  source 1..23: mol_type = unassigned DNA
ttagttattagattgtttacttt

SEQ ID NO: 18655 - DNA, 23 bp, Homo sapiens
  source 1..23: mol_type = unassigned DNA
aaagtaaacaatctaataactaa

SEQ ID NO: 18656 - RNA, 23 nt, Homo sapiens
  source 1..23: mol_type = unassigned RNA
ttaaactactgaaataactgagg

SEQ ID NO: 18657 - DNA, 23 bp, Homo sapiens
  source 1..23: mol_type = unassigned DNA
ttaaactactgaaataactgagg

SEQ ID NO: 18658 - DNA, 23 bp, Homo sapiens
  source 1..23: mol_type = unassigned DNA
cctcagttatttcagtagtttaa

SEQ ID NO: 18659 - RNA, 25 nt, Homo sapiens
  source 1..25: mol_type = unassigned RNA
tttggttagtatggttatatagttt

SEQ ID NO: 18660 - DNA, 25 bp, Homo sapiens
  source 1..25: mol_type = unassigned DNA
tttggttagtatggttatatagttt

SEQ ID NO: 18661 - DNA, 25 bp, Homo sapiens
  source 1..25: mol_type = unassigned DNA
aaactatataaccatactaaccaaa

SEQ ID NO: 18662 - RNA, 31 nt, Homo sapiens
  source 1..31: mol_type = unassigned RNA
taatatagattctcacagtgacctcaaatct

SEQ ID NO: 18663 - DNA, 31 bp, Homo sapiens
  source 1..31: mol_type = unassigned DNA
taatatagattctcacagtgacctcaaatct

SEQ ID NO: 18664 - DNA, 31 bp, Homo sapiens
  source 1..31: mol_type = unassigned DNA
agatttgaggtcactgtgagaatctatatta

SEQ ID NO: 18665 - RNA, 49 nt, Homo sapiens
  source 1..49: mol_type = unassigned RNA
cattcccagggcggccacggtggaacaggttgtcatactgatgctgaaa

SEQ ID NO: 18666 - DNA, 49 bp, Homo sapiens
  source 1..49: mol_type = unassigned DNA
cattcccagggcggccacggtggaacaggttgtcatactgatgctgaaa

SEQ ID NO: 18667 - DNA, 49 bp, Homo sapiens
  source 1..49: mol_type = unassigned DNA
tttcagcatcagtatgacaacctgttccaccgtggccgccctgggaatg

SEQ ID NO: 18668 - RNA, 50 nt, Homo sapiens
  source 1..50: mol_type = unassigned RNA
ttgtactctagtagttttatagttttaggtcttccgtttacatcttcatt

SEQ ID NO: 18669 - DNA, 50 bp, Homo sapiens
  source 1..50: mol_type = unassigned DNA
ttgtactctagtagttttatagttttaggtcttccgtttacatcttcatt

SEQ ID NO: 18670 - DNA, 50 bp, Homo sapiens
  source 1..50: mol_type = unassigned DNA
aatgaagatgtaaacggaagacctaaaactataaaactactagagtacaa

SEQ ID NO: 18671 - RNA, 31 nt, Homo sapiens
  source 1..31: mol_type = unassigned RNA
tgtctgcaaaggtaaactcacaaacccctcc

SEQ ID NO: 18672 - DNA, 31 bp, Homo sapiens
  source 1..31: mol_type = unassigned DNA
tgtctgcaaaggtaaactcacaaacccctcc

SEQ ID NO: 18673 - DNA, 31 bp, Homo sapiens
  source 1..31: mol_type = unassigned DNA
ggaggggtttgtgagtttacctttgcagaca

SEQ ID NO: 18674 - RNA, 31 nt, Homo sapiens
  source 1..31: mol_type = unassigned RNA
gccagaccatgtgctgaaggctttgctcaca

SEQ ID NO: 18675 - DNA, 31 bp, Homo sapiens
  source 1..31: mol_type = unassigned DNA
gccagaccatgtgctgaaggctttgctcaca

SEQ ID NO: 18676 - DNA, 31 bp, Homo sapiens
  source 1..31: mol_type = unassigned DNA
tgtgagcaaagccttcagcacatggtctggc

SEQ ID NO: 18677 - RNA, 86 nt, Homo sapiens
  source 1..86: mol_type = unassigned RNA
gtagagtccagcactctggacttggtgaactacagtataccgaagtggaggagtgcaaggcggaagcacaggagaaggaggtagag

SEQ ID NO: 18678 - DNA, 86 bp, Homo sapiens
  source 1..86: mol_type = unassigned DNA
gtagagtccagcactctggacttggtgaactacagtataccgaagtggaggagtgcaaggcggaagcacaggagaaggaggtagag

SEQ ID NO: 18679 - DNA, 86 bp, Homo sapiens
  source 1..86: mol_type = unassigned DNA
ctctacctccttctcctgtgcttccgccttgcactcctccacttcggtatactgtagttcaccaagtccagagtgctggactctac

SEQ ID NO: 18680 - RNA, 24 nt, Homo sapiens
  source 1..24: mol_type = unassigned RNA
gcagcttatgcgacttatgctgcc

SEQ ID NO: 18681 - DNA, 24 bp, Homo sapiens
  source 1..24: mol_type = unassigned DNA
gcagcttatgcgacttatgctgcc

SEQ ID NO: 18682 - DNA, 24 bp, Homo sapiens
  source 1..24: mol_type = unassigned DNA
ggcagcataagtcgcataagctgc

SEQ ID NO: 18683 - RNA, 24 nt, Homo sapiens
  source 1..24: mol_type = unassigned RNA
atctaggctttgcctaatggaaag

SEQ ID NO: 18684 - DNA, 24 bp, Homo sapiens
  source 1..24: mol_type = unassigned DNA
atctaggctttgcctaatggaaag

SEQ ID NO: 18685 - DNA, 24 bp, Homo sapiens
  source 1..24: mol_type = unassigned DNA
ctttccattaggcaaagcctagat

SEQ ID NO: 18686 - RNA, 55 nt, Homo sapiens
  source 1..55: mol_type = unassigned RNA
gtctcttcctttcccctgcccctagctgctggaagacctggaggagcagctgtac

SEQ ID NO: 18687 - DNA, 55 bp, Homo sapiens
  source 1..55: mol_type = unassigned DNA
gtctcttcctttcccctgcccctagctgctggaagacctggaggagcagctgtac

SEQ ID NO: 18688 - DNA, 55 bp, Homo sapiens
  source 1..55: mol_type = unassigned DNA
gtacagctgctcctccaggtcttccagcagctaggggcaggggaaaggaagagac

SEQ ID NO: 18689 - RNA, 44 nt, Homo sapiens
  source 1..44: mol_type = unassigned RNA
cataccattctggggaccagcactgtagtagattgaaaagttga

SEQ ID NO: 18690 - DNA, 44 bp, Homo sapiens
  source 1..44: mol_type = unassigned DNA
cataccattctggggaccagcactgtagtagattgaaaagttga

SEQ ID NO: 18691 - DNA, 44 bp, Homo sapiens
  source 1..44: mol_type = unassigned DNA
tcaacttttcaatctactacagtgctggtccccagaatggtatg

SEQ ID NO: 18692 - RNA, 38 nt, Homo sapiens
  source 1..38: mol_type = unassigned RNA
tagcttaaacacatgatttgagactatggaagttagtg

SEQ ID NO: 18693 - DNA, 38 bp, Homo sapiens
  source 1..38: mol_type = unassigned DNA
tagcttaaacacatgatttgagactatggaagttagtg

SEQ ID NO: 18694 - DNA, 38 bp, Homo sapiens
  source 1..38: mol_type = unassigned DNA
cactaacttccatagtctcaaatcatgtgtttaagcta

SEQ ID NO: 18695 - RNA, 87 nt, Homo sapiens
  source 1..87: mol_type = unassigned RNA
tttgtttttttgagacggagtctcgcactgttgcctgtgctggagtgcacttgcaccatcttggctcactgcaacctctgcctctca

SEQ ID NO: 18696 - DNA, 87 bp, Homo sapiens
  source 1..87: mol_type = unassigned DNA
tttgtttttttgagacggagtctcgcactgttgcctgtgctggagtgcacttgcaccatcttggctcactgcaacctctgcctctca

SEQ ID NO: 18697 - DNA, 87 bp, Homo sapiens
  source 1..87: mol_type = unassigned DNA
tgagaggcagaggttgcagtgagccaagatggtgcaagtgcactccagcacaggcaacagtgcgagactccgtctcaaaaaaacaaa

SEQ ID NO: 18698 - RNA, 39 nt, Homo sapiens
  source 1..39: mol_type = unassigned RNA
actactctagctttcttttggttagtgtttgtatagttc

SEQ ID NO: 18699 - DNA, 39 bp, Homo sapiens
  source 1..39: mol_type = unassigned DNA
actactctagctttcttttggttagtgtttgtatagttc

SEQ ID NO: 18700 - DNA, 39 bp, Homo sapiens
  source 1..39: mol_type = unassigned DNA
gaactatacaaacactaaccaaaagaaagctagagtagt

SEQ ID NO: 18701 - RNA, 44 nt, Homo sapiens
  source 1..44: mol_type = unassigned RNA
agatttgttctctagcagttttgctgttggatggctggtggtag

SEQ ID NO: 18702 - DNA, 44 bp, Homo sapiens
  source 1..44: mol_type = unassigned DNA
agatttgttctctagcagttttgctgttggatggctggtggtag

SEQ ID NO: 18703 - DNA, 44 bp, Homo sapiens
  source 1..44: mol_type = unassigned DNA
ctaccaccagccatccaacagcaaaactgctagagaacaaatct

SEQ ID NO: 18704 - RNA, 47 nt, Homo sapiens
  source 1..47: mol_type = unassigned RNA
catatccagccttgatcagaccatgctttagtactttgttcagttat

SEQ ID NO: 18705 - DNA, 47 bp, Homo sapiens
  source 1..47: mol_type = unassigned DNA
catatccagccttgatcagaccatgctttagtactttgttcagttat

SEQ ID NO: 18706 - DNA, 47 bp, Homo sapiens
  source 1..47: mol_type = unassigned DNA
ataactgaacaaagtactaaagcatggtctgatcaaggctggatatg

SEQ ID NO: 18707 - RNA, 38 nt, Homo sapiens
  source 1..38: mol_type = unassigned RNA
aaaagggtagagagggcaaaaagtgatgttttccattt

SEQ ID NO: 18708 - DNA, 38 bp, Homo sapiens
  source 1..38: mol_type = unassigned DNA
aaaagggtagagagggcaaaaagtgatgttttccattt

SEQ ID NO: 18709 - DNA, 38 bp, Homo sapiens
  source 1..38: mol_type = unassigned DNA
aaatggaaaacatcactttttgccctctctaccctttt

SEQ ID NO: 18710 - RNA, 23 nt, Homo sapiens
  source 1..23: mol_type = unassigned RNA
gtctcaccgggtgcggtggctta

SEQ ID NO: 18711 - DNA, 23 bp, Homo sapiens
  source 1..23: mol_type = unassigned DNA
gtctcaccgggtgcggtggctta

SEQ ID NO: 18712 - DNA, 23 bp, Homo sapiens
  source 1..23: mol_type = unassigned DNA
taagccaccgcacccggtgagac

SEQ ID NO: 18713 - RNA, 23 nt, Homo sapiens
  source 1..23: mol_type = unassigned RNA
taccttatctaaaagatgttgat

SEQ ID NO: 18714 - DNA, 23 bp, Homo sapiens
  source 1..23: mol_type = unassigned DNA
taccttatctaaaagatgttgat

SEQ ID NO: 18715 - DNA, 23 bp, Homo sapiens
  source 1..23: mol_type = unassigned DNA
atcaacatcttttagataaggta

SEQ ID NO: 18716 - RNA, 31 nt, Homo sapiens
  source 1..31: mol_type = unassigned RNA
caaggcaatgatgaaaggtcaaaggatgaag

SEQ ID NO: 18717 - DNA, 31 bp, Homo sapiens
  source 1..31: mol_type = unassigned DNA
caaggcaatgatgaaaggtcaaaggatgaag

SEQ ID NO: 18718 - DNA, 31 bp, Homo sapiens
  source 1..31: mol_type = unassigned DNA
cttcatcctttgacctttcatcattgccttg

SEQ ID NO: 18719 - RNA, 28 nt, Homo sapiens
  source 1..28: mol_type = unassigned RNA
gcgaggctcctgggcggaatggaggaag

SEQ ID NO: 18720 - DNA, 28 bp, Homo sapiens
  source 1..28: mol_type = unassigned DNA
gcgaggctcctgggcggaatggaggaag

SEQ ID NO: 18721 - DNA, 28 bp, Homo sapiens
  source 1..28: mol_type = unassigned DNA
cttcctccattccgcccaggagcctcgc

SEQ ID NO: 18722 - RNA, 59 nt, Homo sapiens
  source 1..59: mol_type = unassigned RNA
gcttccaattctcagctccaggctgtcccctcttgtcccagttcaccgggtctcttagg

SEQ ID NO: 18723 - DNA, 59 bp, Homo sapiens
  source 1..59: mol_type = unassigned DNA
gcttccaattctcagctccaggctgtcccctcttgtcccagttcaccgggtctcttagg

SEQ ID NO: 18724 - DNA, 59 bp, Homo sapiens
  source 1..59: mol_type = unassigned DNA
cctaagagacccggtgaactgggacaagaggggacagcctggagctgagaattggaagc

SEQ ID NO: 18725 - RNA, 78 nt, Homo sapiens
  source 1..78: mol_type = unassigned RNA
ctgtaaaagggaagatgataaaaccggagtgatcagagagattctagactgatgtagactatgatgaacagggcagaa

SEQ ID NO: 18726 - DNA, 78 bp, Homo sapiens
  source 1..78: mol_type = unassigned DNA
ctgtaaaagggaagatgataaaaccggagtgatcagagagattctagactgatgtagactatgatgaacagggcagaa

SEQ ID NO: 18727 - DNA, 78 bp, Homo sapiens
  source 1..78: mol_type = unassigned DNA
ttctgccctgttcatcatagtctacatcagtctagaatctctctgatcactccggttttatcatcttcccttttacag

SEQ ID NO: 18728 - RNA, 30 nt, Homo sapiens
  source 1..30: mol_type = unassigned RNA
cggggacggtgctgtggaagggacgggaga

SEQ ID NO: 18729 - DNA, 30 bp, Homo sapiens
  source 1..30: mol_type = unassigned DNA
cggggacggtgctgtggaagggacgggaga

SEQ ID NO: 18730 - DNA, 30 bp, Homo sapiens
  source 1..30: mol_type = unassigned DNA
tctcccgtcccttccacagcaccgtccccg

SEQ ID NO: 18731 - RNA, 29 nt, Homo sapiens
  source 1..29: mol_type = unassigned RNA
acaccaccagtctctgggtgtcatggcct

SEQ ID NO: 18732 - DNA, 29 bp, Homo sapiens
  source 1..29: mol_type = unassigned DNA
acaccaccagtctctgggtgtcatggcct

SEQ ID NO: 18733 - DNA, 29 bp, Homo sapiens
  source 1..29: mol_type = unassigned DNA
aggccatgacacccagagactggtggtgt

SEQ ID NO: 18734 - RNA, 46 nt, Homo sapiens
  source 1..46: mol_type = unassigned RNA
cttagttggtaggtttatagtatctctttaaacacagttctgatgc

SEQ ID NO: 18735 - DNA, 46 bp, Homo sapiens
  source 1..46: mol_type = unassigned DNA
cttagttggtaggtttatagtatctctttaaacacagttctgatgc

SEQ ID NO: 18736 - DNA, 46 bp, Homo sapiens
  source 1..46: mol_type = unassigned DNA
gcatcagaactgtgtttaaagagatactataaacctaccaactaag

SEQ ID NO: 18737 - RNA, 65 nt, Homo sapiens
  source 1..65: mol_type = unassigned RNA
aggatccatgtccggctccgcaaaatatctcactcttccaggcctctgttcattcatctgcagaa

SEQ ID NO: 18738 - DNA, 65 bp, Homo sapiens
  source 1..65: mol_type = unassigned DNA
aggatccatgtccggctccgcaaaatatctcactcttccaggcctctgttcattcatctgcagaa

SEQ ID NO: 18739 - DNA, 65 bp, Homo sapiens
  source 1..65: mol_type = unassigned DNA
ttctgcagatgaatgaacagaggcctggaagagtgagatattttgcggagccggacatggatcct

SEQ ID NO: 18740 - RNA, 23 nt, Homo sapiens
  source 1..23: mol_type = unassigned RNA
tggtgtattgggttgaatagtat

SEQ ID NO: 18741 - DNA, 23 bp, Homo sapiens
  source 1..23: mol_type = unassigned DNA
tggtgtattgggttgaatagtat

SEQ ID NO: 18742 - DNA, 23 bp, Homo sapiens
  source 1..23: mol_type = unassigned DNA
atactattcaacccaatacacca

SEQ ID NO: 18743 - RNA, 44 nt, Homo sapiens
  source 1..44: mol_type = unassigned RNA
ttatgtattatatcttctagttattagctgtatgaagttgggga

SEQ ID NO: 18744 - DNA, 44 bp, Homo sapiens
  source 1..44: mol_type = unassigned DNA
ttatgtattatatcttctagttattagctgtatgaagttgggga

SEQ ID NO: 18745 - DNA, 44 bp, Homo sapiens
  source 1..44: mol_type = unassigned DNA
tccccaacttcatacagctaataactagaagatataatacataa

SEQ ID NO: 18746 - RNA, 25 nt, Homo sapiens
  source 1..25: mol_type = unassigned RNA
aagagagaggaaagcactttctctt

SEQ ID NO: 18747 - DNA, 25 bp, Homo sapiens
  source 1..25: mol_type = unassigned DNA
aagagagaggaaagcactttctctt

SEQ ID NO: 18748 - DNA, 25 bp, Homo sapiens
  source 1..25: mol_type = unassigned DNA
aagagaaagtgctttcctctctctt

SEQ ID NO: 18749 - RNA, 53 nt, Homo sapiens
  source 1..53: mol_type = unassigned RNA
aggcttttctggagaacaaaattccataggctgaccatggcttttgattcaga

SEQ ID NO: 18750 - DNA, 53 bp, Homo sapiens
  source 1..53: mol_type = unassigned DNA
aggcttttctggagaacaaaattccataggctgaccatggcttttgattcaga

SEQ ID NO: 18751 - DNA, 53 bp, Homo sapiens
  source 1..53: mol_type = unassigned DNA
tctgaatcaaaagccatggtcagcctatggaattttgttctccagaaaagcct

SEQ ID NO: 18752 - RNA, 24 nt, Homo sapiens
  source 1..24: mol_type = unassigned RNA
tgagatatcaaacttatgtagaaa

SEQ ID NO: 18753 - DNA, 24 bp, Homo sapiens
  source 1..24: mol_type = unassigned DNA
tgagatatcaaacttatgtagaaa

SEQ ID NO: 18754 - DNA, 24 bp, Homo sapiens
  source 1..24: mol_type = unassigned DNA
tttctacataagtttgatatctca

SEQ ID NO: 18755 - RNA, 43 nt, Homo sapiens
  source 1..43: mol_type = unassigned RNA
ttattgcaaggttggtgaattggctgcattccagagctttgtt

SEQ ID NO: 18756 - DNA, 43 bp, Homo sapiens
  source 1..43: mol_type = unassigned DNA
ttattgcaaggttggtgaattggctgcattccagagctttgtt

SEQ ID NO: 18757 - DNA, 43 bp, Homo sapiens
  source 1..43: mol_type = unassigned DNA
aacaaagctctggaatgcagccaattcaccaaccttgcaataa

SEQ ID NO: 18758 - RNA, 35 nt, Homo sapiens
  source 1..35: mol_type = unassigned RNA
agatgagaaactactgcacacgtccctgccttaac

SEQ ID NO: 18759 - DNA, 35 bp, Homo sapiens
  source 1..35: mol_type = unassigned DNA
agatgagaaactactgcacacgtccctgccttaac

SEQ ID NO: 18760 - DNA, 35 bp, Homo sapiens
  source 1..35: mol_type = unassigned DNA
gttaaggcagggacgtgtgcagtagtttctcatct

SEQ ID NO: 18761 - RNA, 32 nt, Homo sapiens
  source 1..32: mol_type = unassigned RNA
ccactcctgtgccctctgtccccgcagttgct

SEQ ID NO: 18762 - DNA, 32 bp, Homo sapiens
  source 1..32: mol_type = unassigned DNA
ccactcctgtgccctctgtccccgcagttgct

SEQ ID NO: 18763 - DNA, 32 bp, Homo sapiens
  source 1..32: mol_type = unassigned DNA
agcaactgcggggacagagggcacaggagtgg

SEQ ID NO: 18764 - RNA, 26 nt, Homo sapiens
  source 1..26: mol_type = unassigned RNA
caagtgctctaggaggtagttagttc

SEQ ID NO: 18765 - DNA, 26 bp, Homo sapiens
  source 1..26: mol_type = unassigned DNA
caagtgctctaggaggtagttagttc

SEQ ID NO: 18766 - DNA, 26 bp, Homo sapiens
  source 1..26: mol_type = unassigned DNA
gaactaactacctcctagagcacttg

SEQ ID NO: 18767 - RNA, 24 nt, Homo sapiens
  source 1..24: mol_type = unassigned RNA
gagtccctcgtggccttatggagc

SEQ ID NO: 18768 - DNA, 24 bp, Homo sapiens
  source 1..24: mol_type = unassigned DNA
gagtccctcgtggccttatggagc

SEQ ID NO: 18769 - DNA, 24 bp, Homo sapiens
  source 1..24: mol_type = unassigned DNA
gctccataaggccacgagggactc

SEQ ID NO: 18770 - RNA, 23 nt, Homo sapiens
  source 1..23: mol_type = unassigned RNA
ttcactagtaggtagagtggttg

SEQ ID NO: 18771 - DNA, 23 bp, Homo sapiens
  source 1..23: mol_type = unassigned DNA
ttcactagtaggtagagtggttg

SEQ ID NO: 18772 - DNA, 23 bp, Homo sapiens
  source 1..23: mol_type = unassigned DNA
caaccactctacctactagtgaa

SEQ ID NO: 18773 - RNA, 92 nt, Homo sapiens
  source 1..92: mol_type = unassigned RNA
agtgctggtgagaagaagctggaagccattgtggggtctgggtagctgttgggcaatagactgcccctccaccactcctgccccgggcaaca

SEQ ID NO: 18774 - DNA, 92 bp, Homo sapiens
  source 1..92: mol_type = unassigned DNA
agtgctggtgagaagaagctggaagccattgtggggtctgggtagctgttgggcaatagactgcccctccaccactcctgccccgggcaaca

SEQ ID NO: 18775 - DNA, 92 bp, Homo sapiens
  source 1..92: mol_type = unassigned DNA
tgttgcccggggcaggagtggtggaggggcagtctattgcccaacagctacccagaccccacaatggcttccagcttcttctcaccagcact

SEQ ID NO: 18776 - RNA, 52 nt, Homo sapiens
  source 1..52: mol_type = unassigned RNA
tacagtgaggcactgaagctaacaggacagaaactgatttgctaaggcttag

SEQ ID NO: 18777 - DNA, 52 bp, Homo sapiens
  source 1..52: mol_type = unassigned DNA
tacagtgaggcactgaagctaacaggacagaaactgatttgctaaggcttag

SEQ ID NO: 18778 - DNA, 52 bp, Homo sapiens
  source 1..52: mol_type = unassigned DNA
ctaagccttagcaaatcagtttctgtcctgttagcttcagtgcctcactgta

SEQ ID NO: 18779 - RNA, 39 nt, Homo sapiens
  source 1..39: mol_type = unassigned RNA
tttaaaggaaccagatctagagagggaagctcttttaat

SEQ ID NO: 18780 - DNA, 39 bp, Homo sapiens
  source 1..39: mol_type = unassigned DNA
tttaaaggaaccagatctagagagggaagctcttttaat

SEQ ID NO: 18781 - DNA, 39 bp, Homo sapiens
  source 1..39: mol_type = unassigned DNA
attaaaagagcttccctctctagatctggttcctttaaa

SEQ ID NO: 18782 - RNA, 39 nt, Homo sapiens
  source 1..39: mol_type = unassigned RNA
ctgtaaagtgagatagcaactgaagatgacattgtgagg

SEQ ID NO: 18783 - DNA, 39 bp, Homo sapiens
  source 1..39: mol_type = unassigned DNA
ctgtaaagtgagatagcaactgaagatgacattgtgagg

SEQ ID NO: 18784 - DNA, 39 bp, Homo sapiens
  source 1..39: mol_type = unassigned DNA
cctcacaatgtcatcttcagttgctatctcactttacag

SEQ ID NO: 18785 - RNA, 72 nt, Homo sapiens
  source 1..72: mol_type = unassigned RNA
ttatcccaggtgcagagtcggactgctgtgtgctgcctctctgcagccctgtggactcaggctctggaagta

SEQ ID NO: 18786 - DNA, 72 bp, Homo sapiens
  source 1..72: mol_type = unassigned DNA
ttatcccaggtgcagagtcggactgctgtgtgctgcctctctgcagccctgtggactcaggctctggaagta

SEQ ID NO: 18787 - DNA, 72 bp, Homo sapiens
  source 1..72: mol_type = unassigned DNA
tacttccagagcctgagtccacagggctgcagagaggcagcacacagcagtccgactctgcacctgggataa

SEQ ID NO: 18788 - RNA, 25 nt, Homo sapiens
  source 1..25: mol_type = unassigned RNA
aagatgcattttacagagcaatgaa

SEQ ID NO: 18789 - DNA, 25 bp, Homo sapiens
  source 1..25: mol_type = unassigned DNA
aagatgcattttacagagcaatgaa

SEQ ID NO: 18790 - DNA, 25 bp, Homo sapiens
  source 1..25: mol_type = unassigned DNA
ttcattgctctgtaaaatgcatctt

SEQ ID NO: 18791 - RNA, 42 nt, Homo sapiens
  source 1..42: mol_type = unassigned RNA
ggtagtgattcctttcatggatctgggcaaagtaaatttaaa

SEQ ID NO: 18792 - DNA, 42 bp, Homo sapiens
  source 1..42: mol_type = unassigned DNA
ggtagtgattcctttcatggatctgggcaaagtaaatttaaa

SEQ ID NO: 18793 - DNA, 42 bp, Homo sapiens
  source 1..42: mol_type = unassigned DNA
tttaaatttactttgcccagatccatgaaaggaatcactacc

SEQ ID NO: 18794 - RNA, 25 nt, Homo sapiens
  source 1..25: mol_type = unassigned RNA
ttcaacattgagacagggctatgaa

SEQ ID NO: 18795 - DNA, 25 bp, Homo sapiens
  source 1..25: mol_type = unassigned DNA
ttcaacattgagacagggctatgaa

SEQ ID NO: 18796 - DNA, 25 bp, Homo sapiens
  source 1..25: mol_type = unassigned DNA
ttcatagccctgtctcaatgttgaa

SEQ ID NO: 18797 - RNA, 34 nt, Homo sapiens
  source 1..34: mol_type = unassigned RNA
ttatatgataagatcactgaattccatgggcatg

SEQ ID NO: 18798 - DNA, 34 bp, Homo sapiens
  source 1..34: mol_type = unassigned DNA
ttatatgataagatcactgaattccatgggcatg

SEQ ID NO: 18799 - DNA, 34 bp, Homo sapiens
  source 1..34: mol_type = unassigned DNA
catgcccatggaattcagtgatcttatcatataa

SEQ ID NO: 18800 - RNA, 26 nt, Homo sapiens
  source 1..26: mol_type = unassigned RNA
atagtttcagaccaggggaagccccc

SEQ ID NO: 18801 - DNA, 26 bp, Homo sapiens
  source 1..26: mol_type = unassigned DNA
atagtttcagaccaggggaagccccc

SEQ ID NO: 18802 - DNA, 26 bp, Homo sapiens
  source 1..26: mol_type = unassigned DNA
gggggcttcccctggtctgaaactat

SEQ ID NO: 18803 - RNA, 73 nt, Homo sapiens
  source 1..73: mol_type = unassigned RNA
ctaagatatcttgccattggactctgtagttatcagactaatgtttgagtaaaagagctggaaaaccagcaga

SEQ ID NO: 18804 - DNA, 73 bp, Homo sapiens
  source 1..73: mol_type = unassigned DNA
ctaagatatcttgccattggactctgtagttatcagactaatgtttgagtaaaagagctggaaaaccagcaga

SEQ ID NO: 18805 - DNA, 73 bp, Homo sapiens
  source 1..73: mol_type = unassigned DNA
tctgctggttttccagctcttttactcaaacattagtctgataactacagagtccaatggcaagatatcttag

SEQ ID NO: 18806 - RNA, 30 nt, Homo sapiens
  source 1..30: mol_type = unassigned RNA
cgtatccaggctggcgtcggggctgccgcg

SEQ ID NO: 18807 - DNA, 30 bp, Homo sapiens
  source 1..30: mol_type = unassigned DNA
cgtatccaggctggcgtcggggctgccgcg

SEQ ID NO: 18808 - DNA, 30 bp, Homo sapiens
  source 1..30: mol_type = unassigned DNA
cgcggcagccccgacgccagcctggatacg

SEQ ID NO: 18809 - RNA, 157 nt, Homo sapiens
  source 1..157: mol_type = unassigned RNA
atgatgaataaaagatctccttcttcctctgtgctcctggcaggcacagtcaggcccatctgtctgcccttctttgatgaggagctcactccagccaccccactctggatcattggatggggctttacgaagcagaatggaggtaagtcctgggtgc

SEQ ID NO: 18810 - DNA, 157 bp, Homo sapiens
  source 1..157: mol_type = unassigned DNA
atgatgaataaaagatctccttcttcctctgtgctcctggcaggcacagtcaggcccatctgtctgcccttctttgatgaggagctcactccagccaccccactctggatcattggatggggctttacgaagcagaatggaggtaagtcctgggtgc

SEQ ID NO: 18811 - DNA, 157 bp, Homo sapiens
  source 1..157: mol_type = unassigned DNA
gcacccaggacttacctccattctgcttcgtaaagccccatccaatgatccagagtggggtggctggagtgagctcctcatcaaagaagggcagacagatgggcctgactgtgcctgccaggagcacagaggaagaaggagatcttttattcatcat

SEQ ID NO: 18812 - RNA, 40 nt, Homo sapiens
  source 1..40: mol_type = unassigned RNA
taaagttaagcagtgtagctggatgcaaaactctagcttt

SEQ ID NO: 18813 - DNA, 40 bp, Homo sapiens
  source 1..40: mol_type = unassigned DNA
taaagttaagcagtgtagctggatgcaaaactctagcttt

SEQ ID NO: 18814 - DNA, 40 bp, Homo sapiens
  source 1..40: mol_type = unassigned DNA
aaagctagagttttgcatccagctacactgcttaacttta

SEQ ID NO: 18815 - RNA, 29 nt, Homo sapiens
  source 1..29: mol_type = unassigned RNA
tggtgttggagcgccggaggctagtgggt

SEQ ID NO: 18816 - DNA, 29 bp, Homo sapiens
  source 1..29: mol_type = unassigned DNA
tggtgttggagcgccggaggctagtgggt

SEQ ID NO: 18817 - DNA, 29 bp, Homo sapiens
  source 1..29: mol_type = unassigned DNA
acccactagcctccggcgctccaacacca

SEQ ID NO: 18818 - RNA, 61 nt, Homo sapiens
  source 1..61: mol_type = unassigned RNA
gctctcaccgcccttacactgcacttctaccgctctgacgcatgttgggcttgaaacttgc

SEQ ID NO: 18819 - DNA, 61 bp, Homo sapiens
  source 1..61: mol_type = unassigned DNA
gctctcaccgcccttacactgcacttctaccgctctgacgcatgttgggcttgaaacttgc

SEQ ID NO: 18820 - DNA, 61 bp, Homo sapiens
  source 1..61: mol_type = unassigned DNA
gcaagtttcaagcccaacatgcgtcagagcggtagaagtgcagtgtaagggcggtgagagc

SEQ ID NO: 18821 - RNA, 28 nt, Homo sapiens
  source 1..28: mol_type = unassigned RNA
gcatacgtgagcagactgattttggagt

SEQ ID NO: 18822 - DNA, 28 bp, Homo sapiens
  source 1..28: mol_type = unassigned DNA
gcatacgtgagcagactgattttggagt

SEQ ID NO: 18823 - DNA, 28 bp, Homo sapiens
  source 1..28: mol_type = unassigned DNA
actccaaaatcagtctgctcacgtatgc

SEQ ID NO: 18824 - RNA, 40 nt, Homo sapiens
  source 1..40: mol_type = unassigned RNA
aatagcatgtgagactaagctgaaccaaactggccatata

SEQ ID NO: 18825 - DNA, 40 bp, Homo sapiens
  source 1..40: mol_type = unassigned DNA
aatagcatgtgagactaagctgaaccaaactggccatata

SEQ ID NO: 18826 - DNA, 40 bp, Homo sapiens
  source 1..40: mol_type = unassigned DNA
tatatggccagtttggttcagcttagtctcacatgctatt

SEQ ID NO: 18827 - RNA, 37 nt, Homo sapiens
  source 1..37: mol_type = unassigned RNA
ttttcatatagctctgagttattatcttgtatctttt

SEQ ID NO: 18828 - DNA, 37 bp, Homo sapiens
  source 1..37: mol_type = unassigned DNA
ttttcatatagctctgagttattatcttgtatctttt

SEQ ID NO: 18829 - DNA, 37 bp, Homo sapiens
  source 1..37: mol_type = unassigned DNA
aaaagatacaagataataactcagagctatatgaaaa

SEQ ID NO: 18830 - RNA, 25 nt, Homo sapiens
  source 1..25: mol_type = unassigned RNA
agtcttagtaggttgtctatttaga

SEQ ID NO: 18831 - DNA, 25 bp, Homo sapiens
  source 1..25: mol_type = unassigned DNA
agtcttagtaggttgtctatttaga

SEQ ID NO: 18832 - DNA, 25 bp, Homo sapiens
  source 1..25: mol_type = unassigned DNA
tctaaatagacaacctactaagact

SEQ ID NO: 18833 - RNA, 35 nt, Homo sapiens
  source 1..35: mol_type = unassigned RNA
ttagacgcctgagccactgagcctggccaggcaag

SEQ ID NO: 18834 - DNA, 35 bp, Homo sapiens
  source 1..35: mol_type = unassigned DNA
ttagacgcctgagccactgagcctggccaggcaag

SEQ ID NO: 18835 - DNA, 35 bp, Homo sapiens
  source 1..35: mol_type = unassigned DNA
cttgcctggccaggctcagtggctcaggcgtctaa

SEQ ID NO: 18836 - RNA, 24 nt, Homo sapiens
  source 1..24: mol_type = unassigned RNA
ctcttggcgctaccgaaatttgta

SEQ ID NO: 18837 - DNA, 24 bp, Homo sapiens
  source 1..24: mol_type = unassigned DNA
ctcttggcgctaccgaaatttgta

SEQ ID NO: 18838 - DNA, 24 bp, Homo sapiens
  source 1..24: mol_type = unassigned DNA
tacaaatttcggtagcgccaagag

SEQ ID NO: 18839 - RNA, 31 nt, Homo sapiens
  source 1..31: mol_type = unassigned RNA
gatcacttatgacttacctggattaaaacag

SEQ ID NO: 18840 - DNA, 31 bp, Homo sapiens
  source 1..31: mol_type = unassigned DNA
gatcacttatgacttacctggattaaaacag

SEQ ID NO: 18841 - DNA, 31 bp, Homo sapiens
  source 1..31: mol_type = unassigned DNA
ctgttttaatccaggtaagtcataagtgatc

SEQ ID NO: 18842 - RNA, 34 nt, Homo sapiens
  source 1..34: mol_type = unassigned RNA
ggtggtgatggagtagtacctgatacagagctgg

SEQ ID NO: 18843 - DNA, 34 bp, Homo sapiens
  source 1..34: mol_type = unassigned DNA
ggtggtgatggagtagtacctgatacagagctgg

SEQ ID NO: 18844 - DNA, 34 bp, Homo sapiens
  source 1..34: mol_type = unassigned DNA
ccagctctgtatcaggtactactccatcaccacc

SEQ ID NO: 18845 - RNA, 23 nt, Homo sapiens
  source 1..23: mol_type = unassigned RNA
tgccttaggatgttttatagttc

SEQ ID NO: 18846 - DNA, 23 bp, Homo sapiens
  source 1..23: mol_type = unassigned DNA
tgccttaggatgttttatagttc

SEQ ID NO: 18847 - DNA, 23 bp, Homo sapiens
  source 1..23: mol_type = unassigned DNA
gaactataaaacatcctaaggca

SEQ ID NO: 18848 - RNA, 25 nt, Homo sapiens
  source 1..25: mol_type = unassigned RNA
tgcagaatgaattccataagctgag

SEQ ID NO: 18849 - DNA, 25 bp, Homo sapiens
  source 1..25: mol_type = unassigned DNA
tgcagaatgaattccataagctgag

SEQ ID NO: 18850 - DNA, 25 bp, Homo sapiens
  source 1..25: mol_type = unassigned DNA
ctcagcttatggaattcattctgca

SEQ ID NO: 18851 - RNA, 164 nt, Homo sapiens
  source 1..164: mol_type = unassigned RNA
aagctaacaaagcaagcactgttttgtagaaagataggcagttcagcctgctgacgctttctgaaacacttaaagatgaagacaaaactatcgctacatggattagctggactgcaaaccaaatgtcactttctgaatgtaactctgaaatagaaatttctgtc

SEQ ID NO: 18852 - DNA, 164 bp, Homo sapiens
  source 1..164: mol_type = unassigned DNA
aagctaacaaagcaagcactgttttgtagaaagataggcagttcagcctgctgacgctttctgaaacacttaaagatgaagacaaaactatcgctacatggattagctggactgcaaaccaaatgtcactttctgaatgtaactctgaaatagaaatttctgtc

SEQ ID NO: 18853 - DNA, 164 bp, Homo sapiens
  source 1..164: mol_type = unassigned DNA
gacagaaatttctatttcagagttacattcagaaagtgacatttggtttgcagtccagctaatccatgtagcgatagttttgtcttcatctttaagtgtttcagaaagcgtcagcaggctgaactgcctatctttctacaaaacagtgcttgctttgttagctt

SEQ ID NO: 18854 - RNA, 24 nt, Homo sapiens
  source 1..24: mol_type = unassigned RNA
agaggtttgctagggatttccaga

SEQ ID NO: 18855 - DNA, 24 bp, Homo sapiens
  source 1..24: mol_type = unassigned DNA
agaggtttgctagggatttccaga

SEQ ID NO: 18856 - DNA, 24 bp, Homo sapiens
  source 1..24: mol_type = unassigned DNA
tctggaaatccctagcaaacctct

SEQ ID NO: 18857 - RNA, 114 nt, Homo sapiens
  source 1..114: mol_type = unassigned RNA
atttaaagatgttactgaaagtcatttatgaaatttgacaaatccctagcttgcttctgttctgttttgctgctgtgtttggtacgtagctgtttgtaagttgtccttgggtgt

SEQ ID NO: 18858 - DNA, 114 bp, Homo sapiens
  source 1..114: mol_type = unassigned DNA
atttaaagatgttactgaaagtcatttatgaaatttgacaaatccctagcttgcttctgttctgttttgctgctgtgtttggtacgtagctgtttgtaagttgtccttgggtgt

SEQ ID NO: 18859 - DNA, 114 bp, Homo sapiens
  source 1..114: mol_type = unassigned DNA
acacccaaggacaacttacaaacagctacgtaccaaacacagcagcaaaacagaacagaagcaagctagggatttgtcaaatttcataaatgactttcagtaacatctttaaat

SEQ ID NO: 18860 - RNA, 51 nt, Homo sapiens
  source 1..51: mol_type = unassigned RNA
ctagatgccagatattgtgaactttatcttgtaggatgttgtataattttg

SEQ ID NO: 18861 - DNA, 51 bp, Homo sapiens
  source 1..51: mol_type = unassigned DNA
ctagatgccagatattgtgaactttatcttgtaggatgttgtataattttg

SEQ ID NO: 18862 - DNA, 51 bp, Homo sapiens
  source 1..51: mol_type = unassigned DNA
caaaattatacaacatcctacaagataaagttcacaatatctggcatctag

SEQ ID NO: 18863 - RNA, 33 nt, Homo sapiens
  source 1..33: mol_type = unassigned RNA
agcagagcttggccagtttgagacaatgagggg

SEQ ID NO: 18864 - DNA, 33 bp, Homo sapiens
  source 1..33: mol_type = unassigned DNA
agcagagcttggccagtttgagacaatgagggg

SEQ ID NO: 18865 - DNA, 33 bp, Homo sapiens
  source 1..33: mol_type = unassigned DNA
cccctcattgtctcaaactggccaagctctgct

SEQ ID NO: 18866 - RNA, 71 nt, Homo sapiens
  source 1..71: mol_type = unassigned RNA
acacagtagatgtccccttctgaagtctattagatgatgttgaatggagttgtagttgctaattttggagc

SEQ ID NO: 18867 - DNA, 71 bp, Homo sapiens
  source 1..71: mol_type = unassigned DNA
acacagtagatgtccccttctgaagtctattagatgatgttgaatggagttgtagttgctaattttggagc

SEQ ID NO: 18868 - DNA, 71 bp, Homo sapiens
  source 1..71: mol_type = unassigned DNA
gctccaaaattagcaactacaactccattcaacatcatctaatagacttcagaaggggacatctactgtgt

SEQ ID NO: 18869 - RNA, 32 nt, Homo sapiens
  source 1..32: mol_type = unassigned RNA
cccaatggactgactgtggacaaggccagctc

SEQ ID NO: 18870 - DNA, 32 bp, Homo sapiens
  source 1..32: mol_type = unassigned DNA
cccaatggactgactgtggacaaggccagctc

SEQ ID NO: 18871 - DNA, 32 bp, Homo sapiens
  source 1..32: mol_type = unassigned DNA
gagctggccttgtccacagtcagtccattggg

SEQ ID NO: 18872 - RNA, 22 nt, Homo sapiens
  source 1..22: mol_type = unassigned RNA
gtccagtaatttgattccttag

SEQ ID NO: 18873 - DNA, 22 bp, Homo sapiens
  source 1..22: mol_type = unassigned DNA
gtccagtaatttgattccttag

SEQ ID NO: 18874 - DNA, 22 bp, Homo sapiens
  source 1..22: mol_type = unassigned DNA
ctaaggaatcaaattactggac

SEQ ID NO: 18875 - RNA, 26 nt, Homo sapiens
  source 1..26: mol_type = unassigned RNA
tatatctgaggcgcaatggaccatat

SEQ ID NO: 18876 - DNA, 26 bp, Homo sapiens
  source 1..26: mol_type = unassigned DNA
tatatctgaggcgcaatggaccatat

SEQ ID NO: 18877 - DNA, 26 bp, Homo sapiens
  source 1..26: mol_type = unassigned DNA
atatggtccattgcgcctcagatata

SEQ ID NO: 18878 - RNA, 31 nt, Homo sapiens
  source 1..31: mol_type = unassigned RNA
gcccccacccccaccatcctcccaggaccca

SEQ ID NO: 18879 - DNA, 31 bp, Homo sapiens
  source 1..31: mol_type = unassigned DNA
gcccccacccccaccatcctcccaggaccca

SEQ ID NO: 18880 - DNA, 31 bp, Homo sapiens
  source 1..31: mol_type = unassigned DNA
tgggtcctgggaggatggtgggggtgggggc

SEQ ID NO: 18881 - RNA, 35 nt, Homo sapiens
  source 1..35: mol_type = unassigned RNA
gaatatcacttgtctgtattagtttgtctgcttaa

SEQ ID NO: 18882 - DNA, 35 bp, Homo sapiens
  source 1..35: mol_type = unassigned DNA
gaatatcacttgtctgtattagtttgtctgcttaa

SEQ ID NO: 18883 - DNA, 35 bp, Homo sapiens
  source 1..35: mol_type = unassigned DNA
ttaagcagacaaactaatacagacaagtgatattc

SEQ ID NO: 18884 - RNA, 45 nt, Homo sapiens
  source 1..45: mol_type = unassigned RNA
aatagatttccagggacttccagagagaggacaatgggaagatgc

SEQ ID NO: 18885 - DNA, 45 bp, Homo sapiens
  source 1..45: mol_type = unassigned DNA
aatagatttccagggacttccagagagaggacaatgggaagatgc

SEQ ID NO: 18886 - DNA, 45 bp, Homo sapiens
  source 1..45: mol_type = unassigned DNA
gcatcttcccattgtcctctctctggaagtccctggaaatctatt

SEQ ID NO: 18887 - RNA, 25 nt, Homo sapiens
  source 1..25: mol_type = unassigned RNA
caaccagtcaacagccatggtagcc

SEQ ID NO: 18888 - DNA, 25 bp, Homo sapiens
  source 1..25: mol_type = unassigned DNA
caaccagtcaacagccatggtagcc

SEQ ID NO: 18889 - DNA, 25 bp, Homo sapiens
  source 1..25: mol_type = unassigned DNA
ggctaccatggctgttgactggttg

SEQ ID NO: 18890 - RNA, 30 nt, Homo sapiens
  source 1..30: mol_type = unassigned RNA
gtcttgccctgccagactgtatgccccatg

SEQ ID NO: 18891 - DNA, 30 bp, Homo sapiens
  source 1..30: mol_type = unassigned DNA
gtcttgccctgccagactgtatgccccatg

SEQ ID NO: 18892 - DNA, 30 bp, Homo sapiens
  source 1..30: mol_type = unassigned DNA
catggggcatacagtctggcagggcaagac

SEQ ID NO: 18893 - RNA, 26 nt, Homo sapiens
  source 1..26: mol_type = unassigned RNA
ttactctatcagcctgatagtgaatt

SEQ ID NO: 18894 - DNA, 26 bp, Homo sapiens
  source 1..26: mol_type = unassigned DNA
ttactctatcagcctgatagtgaatt

SEQ ID NO: 18895 - DNA, 26 bp, Homo sapiens
  source 1..26: mol_type = unassigned DNA
aattcactatcaggctgatagagtaa

SEQ ID NO: 18896 - RNA, 36 nt, Homo sapiens
  source 1..36: mol_type = unassigned RNA
acctatgcaagccgggcttcactggactcacctacg

SEQ ID NO: 18897 - DNA, 36 bp, Homo sapiens
  source 1..36: mol_type = unassigned DNA
acctatgcaagccgggcttcactggactcacctacg

SEQ ID NO: 18898 - DNA, 36 bp, Homo sapiens
  source 1..36: mol_type = unassigned DNA
cgtaggtgagtccagtgaagcccggcttgcataggt

SEQ ID NO: 18899 - RNA, 90 nt, Homo sapiens
  source 1..90: mol_type = unassigned RNA
ataaagccttagaacagtatctggcacttagctctgtactagtatcagctaacatcgttatgactacctggaagtatgggaaagaaggga

SEQ ID NO: 18900 - DNA, 90 bp, Homo sapiens
  source 1..90: mol_type = unassigned DNA
ataaagccttagaacagtatctggcacttagctctgtactagtatcagctaacatcgttatgactacctggaagtatgggaaagaaggga

SEQ ID NO: 18901 - DNA, 90 bp, Homo sapiens
  source 1..90: mol_type = unassigned DNA
tcccttctttcccatacttccaggtagtcataacgatgttagctgatactagtacagagctaagtgccagatactgttctaaggctttat

SEQ ID NO: 18902 - RNA, 64 nt, Homo sapiens
  source 1..64: mol_type = unassigned RNA
ctatggagcttttgtatgtgccagacattgtgctgtatgctttatatgtagaatctcatttact

SEQ ID NO: 18903 - DNA, 64 bp, Homo sapiens
  source 1..64: mol_type = unassigned DNA
ctatggagcttttgtatgtgccagacattgtgctgtatgctttatatgtagaatctcatttact

SEQ ID NO: 18904 - DNA, 64 bp, Homo sapiens
  source 1..64: mol_type = unassigned DNA
agtaaatgagattctacatataaagcatacagcacaatgtctggcacatacaaaagctccatag

SEQ ID NO: 18905 - RNA, 30 nt, Homo sapiens
  source 1..30: mol_type = unassigned RNA
aacatctatggacgcgtcctctgggccggg

SEQ ID NO: 18906 - DNA, 30 bp, Homo sapiens
  source 1..30: mol_type = unassigned DNA
aacatctatggacgcgtcctctgggccggg

SEQ ID NO: 18907 - DNA, 30 bp, Homo sapiens
  source 1..30: mol_type = unassigned DNA
cccggcccagaggacgcgtccatagatgtt

SEQ ID NO: 18908 - RNA, 33 nt, Homo sapiens
  source 1..33: mol_type = unassigned RNA
tgatgtattagtttgagttgtggctctgcaaga

SEQ ID NO: 18909 - DNA, 33 bp, Homo sapiens
  source 1..33: mol_type = unassigned DNA
tgatgtattagtttgagttgtggctctgcaaga

SEQ ID NO: 18910 - DNA, 33 bp, Homo sapiens
  source 1..33: mol_type = unassigned DNA
tcttgcagagccacaactcaaactaatacatca

SEQ ID NO: 18911 - RNA, 93 nt, Homo sapiens
  source 1..93: mol_type = unassigned RNA
taatctgtcagactgattttgttccactcacatgaaaactctgtccccagtgcctcctgatccttgcctctgcattcatgactaagtgtgatg

SEQ ID NO: 18912 - DNA, 93 bp, Homo sapiens
  source 1..93: mol_type = unassigned DNA
taatctgtcagactgattttgttccactcacatgaaaactctgtccccagtgcctcctgatccttgcctctgcattcatgactaagtgtgatg

SEQ ID NO: 18913 - DNA, 93 bp, Homo sapiens
  source 1..93: mol_type = unassigned DNA
catcacacttagtcatgaatgcagaggcaaggatcaggaggcactggggacagagttttcatgtgagtggaacaaaatcagtctgacagatta

SEQ ID NO: 18914 - RNA, 28 nt, Homo sapiens
  source 1..28: mol_type = unassigned RNA
tgcaaatgatttggactgaggggccagg

SEQ ID NO: 18915 - DNA, 28 bp, Homo sapiens
  source 1..28: mol_type = unassigned DNA
tgcaaatgatttggactgaggggccagg

SEQ ID NO: 18916 - DNA, 28 bp, Homo sapiens
  source 1..28: mol_type = unassigned DNA
cctggcccctcagtccaaatcatttgca

SEQ ID NO: 18917 - RNA, 34 nt, Homo sapiens
  source 1..34: mol_type = unassigned RNA
tggaaggtacagggaagcactgtaggtaactttc

SEQ ID NO: 18918 - DNA, 34 bp, Homo sapiens
  source 1..34: mol_type = unassigned DNA
tggaaggtacagggaagcactgtaggtaactttc

SEQ ID NO: 18919 - DNA, 34 bp, Homo sapiens
  source 1..34: mol_type = unassigned DNA
gaaagttacctacagtgcttccctgtaccttcca

SEQ ID NO: 18920 - RNA, 82 nt, Homo sapiens
  source 1..82: mol_type = unassigned RNA
taagtgtgtgtgtgtgtgtgtgtgtgtgtgtgtgtgtcttagtgtagtggttttgcttctctgtttgacgcctgactgataa

SEQ ID NO: 18921 - DNA, 82 bp, Homo sapiens
  source 1..82: mol_type = unassigned DNA
taagtgtgtgtgtgtgtgtgtgtgtgtgtgtgtgtgtcttagtgtagtggttttgcttctctgtttgacgcctgactgataa

SEQ ID NO: 18922 - DNA, 82 bp, Homo sapiens
  source 1..82: mol_type = unassigned DNA
ttatcagtcaggcgtcaaacagagaagcaaaaccactacactaagacacacacacacacacacacacacacacacacactta

SEQ ID NO: 18923 - RNA, 51 nt, Homo sapiens
  source 1..51: mol_type = unassigned RNA
atttcacacgccggagctggggactagtctgaggaaagaggtcggcacatt

SEQ ID NO: 18924 - DNA, 51 bp, Homo sapiens
  source 1..51: mol_type = unassigned DNA
atttcacacgccggagctggggactagtctgaggaaagaggtcggcacatt

SEQ ID NO: 18925 - DNA, 51 bp, Homo sapiens
  source 1..51: mol_type = unassigned DNA
aatgtgccgacctctttcctcagactagtccccagctccggcgtgtgaaat

SEQ ID NO: 18926 - RNA, 149 nt, Homo sapiens
  source 1..149: mol_type = unassigned RNA
ttggagccttctgggaaatgaacttacatttaaagatttaagactgactgttaattaactctctcttcttctctatcctagtttctctttctatgattgggcctcatggatatatctctgcatcagattggcccctaatgattgtgagt

SEQ ID NO: 18927 - DNA, 149 bp, Homo sapiens
  source 1..149: mol_type = unassigned DNA
ttggagccttctgggaaatgaacttacatttaaagatttaagactgactgttaattaactctctcttcttctctatcctagtttctctttctatgattgggcctcatggatatatctctgcatcagattggcccctaatgattgtgagt

SEQ ID NO: 18928 - DNA, 149 bp, Homo sapiens
  source 1..149: mol_type = unassigned DNA
actcacaatcattaggggccaatctgatgcagagatatatccatgaggcccaatcatagaaagagaaactaggatagagaagaagagagagttaattaacagtcagtcttaaatctttaaatgtaagttcatttcccagaaggctccaa

SEQ ID NO: 18929 - RNA, 32 nt, Homo sapiens
  source 1..32: mol_type = unassigned RNA
ttagcttgagagactgtgttgaattcatccta

SEQ ID NO: 18930 - DNA, 32 bp, Homo sapiens
  source 1..32: mol_type = unassigned DNA
ttagcttgagagactgtgttgaattcatccta

SEQ ID NO: 18931 - DNA, 32 bp, Homo sapiens
  source 1..32: mol_type = unassigned DNA
taggatgaattcaacacagtctctcaagctaa

SEQ ID NO: 18932 - RNA, 76 nt, Homo sapiens
  source 1..76: mol_type = unassigned RNA
cattcggctgaagcccttgaggtgactggcatgcattctctccagtatgccacaacccacctcccttgcttcacgt

SEQ ID NO: 18933 - DNA, 76 bp, Homo sapiens
  source 1..76: mol_type = unassigned DNA
cattcggctgaagcccttgaggtgactggcatgcattctctccagtatgccacaacccacctcccttgcttcacgt

SEQ ID NO: 18934 - DNA, 76 bp, Homo sapiens
  source 1..76: mol_type = unassigned DNA
acgtgaagcaagggaggtgggttgtggcatactggagagaatgcatgccagtcacctcaagggcttcagccgaatg

SEQ ID NO: 18935 - RNA, 29 nt, Homo sapiens
  source 1..29: mol_type = unassigned RNA
aggttcatcactctggcctgggacagtga

SEQ ID NO: 18936 - DNA, 29 bp, Homo sapiens
  source 1..29: mol_type = unassigned DNA
aggttcatcactctggcctgggacagtga

SEQ ID NO: 18937 - DNA, 29 bp, Homo sapiens
  source 1..29: mol_type = unassigned DNA
tcactgtcccaggccagagtgatgaacct

SEQ ID NO: 18938 - RNA, 30 nt, Homo sapiens
  source 1..30: mol_type = unassigned RNA
agcgagttagagaggaatgtggaagaactt

SEQ ID NO: 18939 - DNA, 30 bp, Homo sapiens
  source 1..30: mol_type = unassigned DNA
agcgagttagagaggaatgtggaagaactt

SEQ ID NO: 18940 - DNA, 30 bp, Homo sapiens
  source 1..30: mol_type = unassigned DNA
aagttcttccacattcctctctaactcgct

SEQ ID NO: 18941 - RNA, 39 nt, Homo sapiens
  source 1..39: mol_type = unassigned RNA
tgaagagtggctaatttccaacctcaggggttttagtga

SEQ ID NO: 18942 - DNA, 39 bp, Homo sapiens
  source 1..39: mol_type = unassigned DNA
tgaagagtggctaatttccaacctcaggggttttagtga

SEQ ID NO: 18943 - DNA, 39 bp, Homo sapiens
  source 1..39: mol_type = unassigned DNA
tcactaaaacccctgaggttggaaattagccactcttca

SEQ ID NO: 18944 - RNA, 45 nt, Homo sapiens
  source 1..45: mol_type = unassigned RNA
cacctggttgatgggtctgcatcactgagctgtgactgtaccagg

SEQ ID NO: 18945 - DNA, 45 bp, Homo sapiens
  source 1..45: mol_type = unassigned DNA
cacctggttgatgggtctgcatcactgagctgtgactgtaccagg

SEQ ID NO: 18946 - DNA, 45 bp, Homo sapiens
  source 1..45: mol_type = unassigned DNA
cctggtacagtcacagctcagtgatgcagacccatcaaccaggtg

SEQ ID NO: 18947 - RNA, 36 nt, Homo sapiens
  source 1..36: mol_type = unassigned RNA
agtgtggaaattgtagaaataacaactaactgcatg

SEQ ID NO: 18948 - DNA, 36 bp, Homo sapiens
  source 1..36: mol_type = unassigned DNA
agtgtggaaattgtagaaataacaactaactgcatg

SEQ ID NO: 18949 - DNA, 36 bp, Homo sapiens
  source 1..36: mol_type = unassigned DNA
catgcagttagttgttatttctacaatttccacact

SEQ ID NO: 18950 - RNA, 132 nt, Homo sapiens
  source 1..132: mol_type = unassigned RNA
gcctagattcacgattggcaccccaagccatgcatctcatatagcctacacaagctatctctgatgactcttctgctttacaccaccacttcatctctgaccctttcattctgattcttcttttctggttca

SEQ ID NO: 18951 - DNA, 132 bp, Homo sapiens
  source 1..132: mol_type = unassigned DNA
gcctagattcacgattggcaccccaagccatgcatctcatatagcctacacaagctatctctgatgactcttctgctttacaccaccacttcatctctgaccctttcattctgattcttcttttctggttca

SEQ ID NO: 18952 - DNA, 132 bp, Homo sapiens
  source 1..132: mol_type = unassigned DNA
tgaaccagaaaagaagaatcagaatgaaagggtcagagatgaagtggtggtgtaaagcagaagagtcatcagagatagcttgtgtaggctatatgagatgcatggcttggggtgccaatcgtgaatctaggc

SEQ ID NO: 18953 - RNA, 49 nt, Homo sapiens
  source 1..49: mol_type = unassigned RNA
atagcgctctgcaacttggccatgccaccctcatcgccaagcgcccaca

SEQ ID NO: 18954 - DNA, 49 bp, Homo sapiens
  source 1..49: mol_type = unassigned DNA
atagcgctctgcaacttggccatgccaccctcatcgccaagcgcccaca

SEQ ID NO: 18955 - DNA, 49 bp, Homo sapiens
  source 1..49: mol_type = unassigned DNA
tgtgggcgcttggcgatgagggtggcatggccaagttgcagagcgctat

SEQ ID NO: 18956 - RNA, 29 nt, Homo sapiens
  source 1..29: mol_type = unassigned RNA
atctacaactgtagccgactgatcaaaat

SEQ ID NO: 18957 - DNA, 29 bp, Homo sapiens
  source 1..29: mol_type = unassigned DNA
atctacaactgtagccgactgatcaaaat

SEQ ID NO: 18958 - DNA, 29 bp, Homo sapiens
  source 1..29: mol_type = unassigned DNA
attttgatcagtcggctacagttgtagat

SEQ ID NO: 18959 - RNA, 41 nt, Homo sapiens
  source 1..41: mol_type = unassigned RNA
ttgataactcaattccatggctgggccccatttgtaagcag

SEQ ID NO: 18960 - DNA, 41 bp, Homo sapiens
  source 1..41: mol_type = unassigned DNA
ttgataactcaattccatggctgggccccatttgtaagcag

SEQ ID NO: 18961 - DNA, 41 bp, Homo sapiens
  source 1..41: mol_type = unassigned DNA
ctgcttacaaatggggcccagccatggaattgagttatcaa

SEQ ID NO: 18962 - RNA, 33 nt, Homo sapiens
  source 1..33: mol_type = unassigned RNA
aagaaagtcacttgtctcctgggtgcaatggag

SEQ ID NO: 18963 - DNA, 33 bp, Homo sapiens
  source 1..33: mol_type = unassigned DNA
aagaaagtcacttgtctcctgggtgcaatggag

SEQ ID NO: 18964 - DNA, 33 bp, Homo sapiens
  source 1..33: mol_type = unassigned DNA
ctccattgcacccaggagacaagtgactttctt

SEQ ID NO: 18965 - RNA, 30 nt, Homo sapiens
  source 1..30: mol_type = unassigned RNA
cagccggaagcatggtccagattccatcta

SEQ ID NO: 18966 - DNA, 30 bp, Homo sapiens
  source 1..30: mol_type = unassigned DNA
cagccggaagcatggtccagattccatcta

SEQ ID NO: 18967 - DNA, 30 bp, Homo sapiens
  source 1..30: mol_type = unassigned DNA
tagatggaatctggaccatgcttccggctg

SEQ ID NO: 18968 - RNA, 78 nt, Homo sapiens
  source 1..78: mol_type = unassigned RNA
atgatttttagtatttacggagctgtgcagtcattgccacaatctagttttagaatcttgtagccttttgcagtcact

SEQ ID NO: 18969 - DNA, 78 bp, Homo sapiens
  source 1..78: mol_type = unassigned DNA
atgatttttagtatttacggagctgtgcagtcattgccacaatctagttttagaatcttgtagccttttgcagtcact

SEQ ID NO: 18970 - DNA, 78 bp, Homo sapiens
  source 1..78: mol_type = unassigned DNA
agtgactgcaaaaggctacaagattctaaaactagattgtggcaatgactgcacagctccgtaaatactaaaaatcat

SEQ ID NO: 18971 - RNA, 77 nt, Homo sapiens
  source 1..77: mol_type = unassigned RNA
tagagcaggtgtgcctctgagtgccagggaggctggtggattgtggagctctgactatctcgtagcctaaggggcac

SEQ ID NO: 18972 - DNA, 77 bp, Homo sapiens
  source 1..77: mol_type = unassigned DNA
tagagcaggtgtgcctctgagtgccagggaggctggtggattgtggagctctgactatctcgtagcctaaggggcac

SEQ ID NO: 18973 - DNA, 77 bp, Homo sapiens
  source 1..77: mol_type = unassigned DNA
gtgccccttaggctacgagatagtcagagctccacaatccaccagcctccctggcactcagaggcacacctgctcta

SEQ ID NO: 18974 - RNA, 30 nt, Homo sapiens
  source 1..30: mol_type = unassigned RNA
atgtcttcatgaaccaggcgggaacctcct

SEQ ID NO: 18975 - DNA, 30 bp, Homo sapiens
  source 1..30: mol_type = unassigned DNA
atgtcttcatgaaccaggcgggaacctcct

SEQ ID NO: 18976 - DNA, 30 bp, Homo sapiens
  source 1..30: mol_type = unassigned DNA
aggaggttcccgcctggttcatgaagacat

SEQ ID NO: 18977 - RNA, 44 nt, Homo sapiens
  source 1..44: mol_type = unassigned RNA
atgggcagaaatggactgtgtacagagagcctggtgtggagcaa

SEQ ID NO: 18978 - DNA, 44 bp, Homo sapiens
  source 1..44: mol_type = unassigned DNA
atgggcagaaatggactgtgtacagagagcctggtgtggagcaa

SEQ ID NO: 18979 - DNA, 44 bp, Homo sapiens
  source 1..44: mol_type = unassigned DNA
ttgctccacaccaggctctctgtacacagtccatttctgcccat

SEQ ID NO: 18980 - RNA, 24 nt, Homo sapiens
  source 1..24: mol_type = unassigned RNA
ttatggagtatttttgctgttaat

SEQ ID NO: 18981 - DNA, 24 bp, Homo sapiens
  source 1..24: mol_type = unassigned DNA
ttatggagtatttttgctgttaat

SEQ ID NO: 18982 - DNA, 24 bp, Homo sapiens
  source 1..24: mol_type = unassigned DNA
attaacagcaaaaatactccataa

SEQ ID NO: 18983 - RNA, 64 nt, Homo sapiens
  source 1..64: mol_type = unassigned RNA
ttttttttctggcctgctctgtcgacacctggtgctgtggtcttcctcgcaggtctgtgttggg

SEQ ID NO: 18984 - DNA, 64 bp, Homo sapiens
  source 1..64: mol_type = unassigned DNA
ttttttttctggcctgctctgtcgacacctggtgctgtggtcttcctcgcaggtctgtgttggg

SEQ ID NO: 18985 - DNA, 64 bp, Homo sapiens
  source 1..64: mol_type = unassigned DNA
cccaacacagacctgcgaggaagaccacagcaccaggtgtcgacagagcaggccagaaaaaaaa

SEQ ID NO: 18986 - RNA, 50 nt, Homo sapiens
  source 1..50: mol_type = unassigned RNA
cgagtgcctccctgtgcctggggccttggcccaatggaatgtctcagcgc

SEQ ID NO: 18987 - DNA, 50 bp, Homo sapiens
  source 1..50: mol_type = unassigned DNA
cgagtgcctccctgtgcctggggccttggcccaatggaatgtctcagcgc

SEQ ID NO: 18988 - DNA, 50 bp, Homo sapiens
  source 1..50: mol_type = unassigned DNA
gcgctgagacattccattgggccaaggccccaggcacagggaggcactcg

SEQ ID NO: 18989 - RNA, 26 nt, Homo sapiens
  source 1..26: mol_type = unassigned RNA
ttgaaacacattctccacccaccaat

SEQ ID NO: 18990 - DNA, 26 bp, Homo sapiens
  source 1..26: mol_type = unassigned DNA
ttgaaacacattctccacccaccaat

SEQ ID NO: 18991 - DNA, 26 bp, Homo sapiens
  source 1..26: mol_type = unassigned DNA
attggtgggtggagaatgtgtttcaa

SEQ ID NO: 18992 - RNA, 26 nt, Homo sapiens
  source 1..26: mol_type = unassigned RNA
actccttatcacactgatggtggcag

SEQ ID NO: 18993 - DNA, 26 bp, Homo sapiens
  source 1..26: mol_type = unassigned DNA
actccttatcacactgatggtggcag

SEQ ID NO: 18994 - DNA, 26 bp, Homo sapiens
  source 1..26: mol_type = unassigned DNA
ctgccaccatcagtgtgataaggagt

SEQ ID NO: 18995 - RNA, 32 nt, Homo sapiens
  source 1..32: mol_type = unassigned RNA
aggtccaggctggccaggtggacgtgaagctc

SEQ ID NO: 18996 - DNA, 32 bp, Homo sapiens
  source 1..32: mol_type = unassigned DNA
aggtccaggctggccaggtggacgtgaagctc

SEQ ID NO: 18997 - DNA, 32 bp, Homo sapiens
  source 1..32: mol_type = unassigned DNA
gagcttcacgtccacctggccagcctggacct

SEQ ID NO: 18998 - RNA, 31 nt, Homo sapiens
  source 1..31: mol_type = unassigned RNA
gaccttcatcgactgcctggactcggccagc

SEQ ID NO: 18999 - DNA, 31 bp, Homo sapiens
  source 1..31: mol_type = unassigned DNA
gaccttcatcgactgcctggactcggccagc

SEQ ID NO: 19000 - DNA, 31 bp, Homo sapiens
  source 1..31: mol_type = unassigned DNA
gctggccgagtccaggcagtcgatgaaggtc

SEQ ID NO: 19001 - RNA, 25 nt, Homo sapiens
  source 1..25: mol_type = unassigned RNA
cctgtttcaagttaactttaccgta

SEQ ID NO: 19002 - DNA, 25 bp, Homo sapiens
  source 1..25: mol_type = unassigned DNA
cctgtttcaagttaactttaccgta

SEQ ID NO: 19003 - DNA, 25 bp, Homo sapiens
  source 1..25: mol_type = unassigned DNA
tacggtaaagttaacttgaaacagg

SEQ ID NO: 19004 - RNA, 48 nt, Homo sapiens
  source 1..48: mol_type = unassigned RNA
ttcgtggtacatcagtgggtaaagttgggagtggtcaattctgctgag

SEQ ID NO: 19005 - DNA, 48 bp, Homo sapiens
  source 1..48: mol_type = unassigned DNA
ttcgtggtacatcagtgggtaaagttgggagtggtcaattctgctgag

SEQ ID NO: 19006 - DNA, 48 bp, Homo sapiens
  source 1..48: mol_type = unassigned DNA
ctcagcagaattgaccactcccaactttacccactgatgtaccacgaa

SEQ ID NO: 19007 - RNA, 182 nt, Homo sapiens
  source 1..182: mol_type = unassigned RNA
aatctacgtggcttgctctctgaggatcagaactgtagaaatcacgattcagacaggggagtaaattttgctgggtcaaatgctttctctctgattcattactgtagatatgactgatagagaagggaggatgtttactgagcactaaagcccttctctgactactcattggcttttatatt

SEQ ID NO: 19008 - DNA, 182 bp, Homo sapiens
  source 1..182: mol_type = unassigned DNA
aatctacgtggcttgctctctgaggatcagaactgtagaaatcacgattcagacaggggagtaaattttgctgggtcaaatgctttctctctgattcattactgtagatatgactgatagagaagggaggatgtttactgagcactaaagcccttctctgactactcattggcttttatatt

SEQ ID NO: 19009 - DNA, 182 bp, Homo sapiens
  source 1..182: mol_type = unassigned DNA
aatataaaagccaatgagtagtcagagaagggctttagtgctcagtaaacatcctcccttctctatcagtcatatctacagtaatgaatcagagagaaagcatttgacccagcaaaatttactcccctgtctgaatcgtgatttctacagttctgatcctcagagagcaagccacgtagatt

SEQ ID NO: 19010 - RNA, 33 nt, Homo sapiens
  source 1..33: mol_type = unassigned RNA
ggcggctgcctgaagagatgcctgccagcctcg

SEQ ID NO: 19011 - DNA, 33 bp, Homo sapiens
  source 1..33: mol_type = unassigned DNA
ggcggctgcctgaagagatgcctgccagcctcg

SEQ ID NO: 19012 - DNA, 33 bp, Homo sapiens
  source 1..33: mol_type = unassigned DNA
cgaggctggcaggcatctcttcaggcagccgcc

SEQ ID NO: 19013 - RNA, 35 nt, Homo sapiens
  source 1..35: mol_type = unassigned RNA
tgcagggatcgtgggactttaccagatcggtttgt

SEQ ID NO: 19014 - DNA, 35 bp, Homo sapiens
  source 1..35: mol_type = unassigned DNA
tgcagggatcgtgggactttaccagatcggtttgt

SEQ ID NO: 19015 - DNA, 35 bp, Homo sapiens
  source 1..35: mol_type = unassigned DNA
acaaaccgatctggtaaagtcccacgatccctgca

SEQ ID NO: 19016 - RNA, 41 nt, Homo sapiens
  source 1..41: mol_type = unassigned RNA
cctctgagtactgcattcattgcactccataagttttggca

SEQ ID NO: 19017 - DNA, 41 bp, Homo sapiens
  source 1..41: mol_type = unassigned DNA
cctctgagtactgcattcattgcactccataagttttggca

SEQ ID NO: 19018 - DNA, 41 bp, Homo sapiens
  source 1..41: mol_type = unassigned DNA
tgccaaaacttatggagtgcaatgaatgcagtactcagagg

SEQ ID NO: 19019 - RNA, 34 nt, Homo sapiens
  source 1..34: mol_type = unassigned RNA
agctttctctgactcaagctgtggggctcctcta

SEQ ID NO: 19020 - DNA, 34 bp, Homo sapiens
  source 1..34: mol_type = unassigned DNA
agctttctctgactcaagctgtggggctcctcta

SEQ ID NO: 19021 - DNA, 34 bp, Homo sapiens
  source 1..34: mol_type = unassigned DNA
tagaggagccccacagcttgagtcagagaaagct

SEQ ID NO: 19022 - RNA, 31 nt, Homo sapiens
  source 1..31: mol_type = unassigned RNA
gaagcccagaaggttgataccagagccaaga

SEQ ID NO: 19023 - DNA, 31 bp, Homo sapiens
  source 1..31: mol_type = unassigned DNA
gaagcccagaaggttgataccagagccaaga

SEQ ID NO: 19024 - DNA, 31 bp, Homo sapiens
  source 1..31: mol_type = unassigned DNA
tcttggctctggtatcaaccttctgggcttc

SEQ ID NO: 19025 - RNA, 30 nt, Homo sapiens
  source 1..30: mol_type = unassigned RNA
gtgcttcaccgaccagacagccagaggctc

SEQ ID NO: 19026 - DNA, 30 bp, Homo sapiens
  source 1..30: mol_type = unassigned DNA
gtgcttcaccgaccagacagccagaggctc

SEQ ID NO: 19027 - DNA, 30 bp, Homo sapiens
  source 1..30: mol_type = unassigned DNA
gagcctctggctgtctggtcggtgaagcac

SEQ ID NO: 19028 - RNA, 30 nt, Homo sapiens
  source 1..30: mol_type = unassigned RNA
gcgtcccgggttgggcagggaactggcagc

SEQ ID NO: 19029 - DNA, 30 bp, Homo sapiens
  source 1..30: mol_type = unassigned DNA
gcgtcccgggttgggcagggaactggcagc

SEQ ID NO: 19030 - DNA, 30 bp, Homo sapiens
  source 1..30: mol_type = unassigned DNA
gctgccagttccctgcccaacccgggacgc

SEQ ID NO: 19031 - RNA, 29 nt, Homo sapiens
  source 1..29: mol_type = unassigned RNA
gtactaaaaaggaactctagccagtcact

SEQ ID NO: 19032 - DNA, 29 bp, Homo sapiens
  source 1..29: mol_type = unassigned DNA
gtactaaaaaggaactctagccagtcact

SEQ ID NO: 19033 - DNA, 29 bp, Homo sapiens
  source 1..29: mol_type = unassigned DNA
agtgactggctagagttcctttttagtac

SEQ ID NO: 19034 - RNA, 45 nt, Homo sapiens
  source 1..45: mol_type = unassigned RNA
aatcctgtacagcatgtaactgcactgaattccataggcaattgt

SEQ ID NO: 19035 - DNA, 45 bp, Homo sapiens
  source 1..45: mol_type = unassigned DNA
aatcctgtacagcatgtaactgcactgaattccataggcaattgt

SEQ ID NO: 19036 - DNA, 45 bp, Homo sapiens
  source 1..45: mol_type = unassigned DNA
acaattgcctatggaattcagtgcagttacatgctgtacaggatt

SEQ ID NO: 19037 - RNA, 32 nt, Homo sapiens
  source 1..32: mol_type = unassigned RNA
aggtccaggctggccaggtggacgtgaaactc

SEQ ID NO: 19038 - DNA, 32 bp, Homo sapiens
  source 1..32: mol_type = unassigned DNA
aggtccaggctggccaggtggacgtgaaactc

SEQ ID NO: 19039 - DNA, 32 bp, Homo sapiens
  source 1..32: mol_type = unassigned DNA
gagtttcacgtccacctggccagcctggacct

SEQ ID NO: 19040 - RNA, 28 nt, Homo sapiens
  source 1..28: mol_type = unassigned RNA
gggaaggtctgaagtcgctggagggctt

SEQ ID NO: 19041 - DNA, 28 bp, Homo sapiens
  source 1..28: mol_type = unassigned DNA
gggaaggtctgaagtcgctggagggctt

SEQ ID NO: 19042 - DNA, 28 bp, Homo sapiens
  source 1..28: mol_type = unassigned DNA
aagccctccagcgacttcagaccttccc

SEQ ID NO: 19043 - RNA, 19 nt, Homo sapiens
  source 1..19: mol_type = unassigned RNA
gtattcgtggcagagcccc

SEQ ID NO: 19044 - DNA, 19 bp, Homo sapiens
  source 1..19: mol_type = unassigned DNA
gtattcgtggcagagcccc

SEQ ID NO: 19045 - DNA, 19 bp, Homo sapiens
  source 1..19: mol_type = unassigned DNA
ggggctctgccacgaatac

SEQ ID NO: 19046 - RNA, 29 nt, Homo sapiens
  source 1..29: mol_type = unassigned RNA
agcagatcctgcagctctctgacctgtgg

SEQ ID NO: 19047 - DNA, 29 bp, Homo sapiens
  source 1..29: mol_type = unassigned DNA
agcagatcctgcagctctctgacctgtgg

SEQ ID NO: 19048 - DNA, 29 bp, Homo sapiens
  source 1..29: mol_type = unassigned DNA
ccacaggtcagagagctgcaggatctgct

SEQ ID NO: 19049 - RNA, 23 nt, Homo sapiens
  source 1..23: mol_type = unassigned RNA
aaccttgcattttaagaactggg

SEQ ID NO: 19050 - DNA, 23 bp, Homo sapiens
  source 1..23: mol_type = unassigned DNA
aaccttgcattttaagaactggg

SEQ ID NO: 19051 - DNA, 23 bp, Homo sapiens
  source 1..23: mol_type = unassigned DNA
cccagttcttaaaatgcaaggtt

SEQ ID NO: 19052 - RNA, 26 nt, Homo sapiens
  source 1..26: mol_type = unassigned RNA
aagatcaaattgtacagtgctatggt

SEQ ID NO: 19053 - DNA, 26 bp, Homo sapiens
  source 1..26: mol_type = unassigned DNA
aagatcaaattgtacagtgctatggt

SEQ ID NO: 19054 - DNA, 26 bp, Homo sapiens
  source 1..26: mol_type = unassigned DNA
accatagcactgtacaatttgatctt

SEQ ID NO: 19055 - RNA, 38 nt, Homo sapiens
  source 1..38: mol_type = unassigned RNA
aattacatcttgataaagctactggacgaattcactat

SEQ ID NO: 19056 - DNA, 38 bp, Homo sapiens
  source 1..38: mol_type = unassigned DNA
aattacatcttgataaagctactggacgaattcactat

SEQ ID NO: 19057 - DNA, 38 bp, Homo sapiens
  source 1..38: mol_type = unassigned DNA
atagtgaattcgtccagtagctttatcaagatgtaatt

SEQ ID NO: 19058 - RNA, 136 nt, Homo sapiens
  source 1..136: mol_type = unassigned RNA
gagatgttttaggttgtctggtttcctgtgttgcccagatttccaaatctccatgtgctttgactcttaggtctttgaggttctccagctatagattgtgtgctgttgttgtggtggtggtggtggtggtgatggt

SEQ ID NO: 19059 - DNA, 136 bp, Homo sapiens
  source 1..136: mol_type = unassigned DNA
gagatgttttaggttgtctggtttcctgtgttgcccagatttccaaatctccatgtgctttgactcttaggtctttgaggttctccagctatagattgtgtgctgttgttgtggtggtggtggtggtggtgatggt

SEQ ID NO: 19060 - DNA, 136 bp, Homo sapiens
  source 1..136: mol_type = unassigned DNA
accatcaccaccaccaccaccaccacaacaacagcacacaatctatagctggagaacctcaaagacctaagagtcaaagcacatggagatttggaaatctgggcaacacaggaaaccagacaacctaaaacatctc

SEQ ID NO: 19061 - RNA, 23 nt, Homo sapiens
  source 1..23: mol_type = unassigned RNA
atgtgtcattatggctcctggcg

SEQ ID NO: 19062 - DNA, 23 bp, Homo sapiens
  source 1..23: mol_type = unassigned DNA
atgtgtcattatggctcctggcg

SEQ ID NO: 19063 - DNA, 23 bp, Homo sapiens
  source 1..23: mol_type = unassigned DNA
cgccaggagccataatgacacat

SEQ ID NO: 19064 - RNA, 176 nt, Homo sapiens
  source 1..176: mol_type = unassigned RNA
ttatactagctcagagtcattttgatcagtcttgggcaaattaaccagccttcagtcagttcagtgctctctcctatgtggccctactccggcttcacattgaatagtccctcagtctagtccagatgtccaactgtatccactcaccctttcagaatgatgttgtgcttgctatt

SEQ ID NO: 19065 - DNA, 176 bp, Homo sapiens
  source 1..176: mol_type = unassigned DNA
ttatactagctcagagtcattttgatcagtcttgggcaaattaaccagccttcagtcagttcagtgctctctcctatgtggccctactccggcttcacattgaatagtccctcagtctagtccagatgtccaactgtatccactcaccctttcagaatgatgttgtgcttgctatt

SEQ ID NO: 19066 - DNA, 176 bp, Homo sapiens
  source 1..176: mol_type = unassigned DNA
aatagcaagcacaacatcattctgaaagggtgagtggatacagttggacatctggactagactgagggactattcaatgtgaagccggagtagggccacataggagagagcactgaactgactgaaggctggttaatttgcccaagactgatcaaaatgactctgagctagtataa

SEQ ID NO: 19067 - RNA, 50 nt, Homo sapiens
  source 1..50: mol_type = unassigned RNA
aatatgagctgggtttcaaggatgaataggattttgctgagaaaaccaga

SEQ ID NO: 19068 - DNA, 50 bp, Homo sapiens
  source 1..50: mol_type = unassigned DNA
aatatgagctgggtttcaaggatgaataggattttgctgagaaaaccaga

SEQ ID NO: 19069 - DNA, 50 bp, Homo sapiens
  source 1..50: mol_type = unassigned DNA
tctggttttctcagcaaaatcctattcatccttgaaacccagctcatatt

SEQ ID NO: 19070 - RNA, 73 nt, Homo sapiens
  source 1..73: mol_type = unassigned RNA
ctatagatttgaattattatgttgtcttgtttttgatgggggttgacaactgagattagaggtttatatcttt

SEQ ID NO: 19071 - DNA, 73 bp, Homo sapiens
  source 1..73: mol_type = unassigned DNA
ctatagatttgaattattatgttgtcttgtttttgatgggggttgacaactgagattagaggtttatatcttt

SEQ ID NO: 19072 - DNA, 73 bp, Homo sapiens
  source 1..73: mol_type = unassigned DNA
aaagatataaacctctaatctcagttgtcaacccccatcaaaaacaagacaacataataattcaaatctatag

SEQ ID NO: 19073 - RNA, 127 nt, Homo sapiens
  source 1..127: mol_type = unassigned RNA
ctgtctagatttaccatataatataacggttgaaatgttgacctgggtttgaagcctaactctgtaatctagctgtgtgactagagaagttatttaaattttctgaacatcatctgtaaaatggggc

SEQ ID NO: 19074 - DNA, 127 bp, Homo sapiens
  source 1..127: mol_type = unassigned DNA
ctgtctagatttaccatataatataacggttgaaatgttgacctgggtttgaagcctaactctgtaatctagctgtgtgactagagaagttatttaaattttctgaacatcatctgtaaaatggggc

SEQ ID NO: 19075 - DNA, 127 bp, Homo sapiens
  source 1..127: mol_type = unassigned DNA
gccccattttacagatgatgttcagaaaatttaaataacttctctagtcacacagctagattacagagttaggcttcaaacccaggtcaacatttcaaccgttatattatatggtaaatctagacag

SEQ ID NO: 19076 - RNA, 31 nt, Homo sapiens
  source 1..31: mol_type = unassigned RNA
ggggcagcaccaggtcccggggagagggatt

SEQ ID NO: 19077 - DNA, 31 bp, Homo sapiens
  source 1..31: mol_type = unassigned DNA
ggggcagcaccaggtcccggggagagggatt

SEQ ID NO: 19078 - DNA, 31 bp, Homo sapiens
  source 1..31: mol_type = unassigned DNA
aatccctctccccgggacctggtgctgcccc

SEQ ID NO: 19079 - RNA, 129 nt, Homo sapiens
  source 1..129: mol_type = unassigned RNA
ctgcgttcccagcgcgttagcagccgcgcagcccccggccctgagtgcggggggtggggtgggggggctcagggtggtttgtgtggtgcggcctgacagaaccttctgtgtgcggcggagggaggaggc

SEQ ID NO: 19080 - DNA, 129 bp, Homo sapiens
  source 1..129: mol_type = unassigned DNA
ctgcgttcccagcgcgttagcagccgcgcagcccccggccctgagtgcggggggtggggtgggggggctcagggtggtttgtgtggtgcggcctgacagaaccttctgtgtgcggcggagggaggaggc

SEQ ID NO: 19081 - DNA, 129 bp, Homo sapiens
  source 1..129: mol_type = unassigned DNA
gcctcctccctccgccgcacacagaaggttctgtcaggccgcaccacacaaaccaccctgagcccccccaccccaccccccgcactcagggccgggggctgcgcggctgctaacgcgctgggaacgcag

SEQ ID NO: 19082 - RNA, 23 nt, Homo sapiens
  source 1..23: mol_type = unassigned RNA
taatgtaggaagttgtatactgt

SEQ ID NO: 19083 - DNA, 23 bp, Homo sapiens
  source 1..23: mol_type = unassigned DNA
taatgtaggaagttgtatactgt

SEQ ID NO: 19084 - DNA, 23 bp, Homo sapiens
  source 1..23: mol_type = unassigned DNA
acagtatacaacttcctacatta

SEQ ID NO: 19085 - RNA, 29 nt, Homo sapiens
  source 1..29: mol_type = unassigned RNA
gaccctacgacagtggccctctgcatctc

SEQ ID NO: 19086 - DNA, 29 bp, Homo sapiens
  source 1..29: mol_type = unassigned DNA
gaccctacgacagtggccctctgcatctc

SEQ ID NO: 19087 - DNA, 29 bp, Homo sapiens
  source 1..29: mol_type = unassigned DNA
gagatgcagagggccactgtcgtagggtc

SEQ ID NO: 19088 - RNA, 30 nt, Homo sapiens
  source 1..30: mol_type = unassigned RNA
agagccgtccaggaactctacagcgccgcc

SEQ ID NO: 19089 - DNA, 30 bp, Homo sapiens
  source 1..30: mol_type = unassigned DNA
agagccgtccaggaactctacagcgccgcc

SEQ ID NO: 19090 - DNA, 30 bp, Homo sapiens
  source 1..30: mol_type = unassigned DNA
ggcggcgctgtagagttcctggacggctct

SEQ ID NO: 19091 - RNA, 29 nt, Homo sapiens
  source 1..29: mol_type = unassigned RNA
tcctaggtgtacaaggctgtagctgccgt

SEQ ID NO: 19092 - DNA, 29 bp, Homo sapiens
  source 1..29: mol_type = unassigned DNA
tcctaggtgtacaaggctgtagctgccgt

SEQ ID NO: 19093 - DNA, 29 bp, Homo sapiens
  source 1..29: mol_type = unassigned DNA
acggcagctacagccttgtacacctagga

SEQ ID NO: 19094 - RNA, 66 nt, Homo sapiens
  source 1..66: mol_type = unassigned RNA
aggcaatgtgggccaccaggatgtgaaggatgtccaggtagcaggggctggggcttctggacaggc

SEQ ID NO: 19095 - DNA, 66 bp, Homo sapiens
  source 1..66: mol_type = unassigned DNA
aggcaatgtgggccaccaggatgtgaaggatgtccaggtagcaggggctggggcttctggacaggc

SEQ ID NO: 19096 - DNA, 66 bp, Homo sapiens
  source 1..66: mol_type = unassigned DNA
gcctgtccagaagccccagcccctgctacctggacatccttcacatcctggtggcccacattgcct

SEQ ID NO: 19097 - RNA, 33 nt, Homo sapiens
  source 1..33: mol_type = unassigned RNA
agcgccggctgcagggcggaggactctggcctc

SEQ ID NO: 19098 - DNA, 33 bp, Homo sapiens
  source 1..33: mol_type = unassigned DNA
agcgccggctgcagggcggaggactctggcctc

SEQ ID NO: 19099 - DNA, 33 bp, Homo sapiens
  source 1..33: mol_type = unassigned DNA
gaggccagagtcctccgccctgcagccggcgct

SEQ ID NO: 19100 - RNA, 128 nt, Homo sapiens
  source 1..128: mol_type = unassigned RNA
ctctgtgtttttaaattatcttttccagctataaggaagaccagatggatgagaaactaatggaacctctgaaatatgctgaacaacttcctgtagctcagataatacaccaggtttgcatttcattt

SEQ ID NO: 19101 - DNA, 128 bp, Homo sapiens
  source 1..128: mol_type = unassigned DNA
ctctgtgtttttaaattatcttttccagctataaggaagaccagatggatgagaaactaatggaacctctgaaatatgctgaacaacttcctgtagctcagataatacaccaggtttgcatttcattt

SEQ ID NO: 19102 - DNA, 128 bp, Homo sapiens
  source 1..128: mol_type = unassigned DNA
aaatgaaatgcaaacctggtgtattatctgagctacaggaagttgttcagcatatttcagaggttccattagtttctcatccatctggtcttccttatagctggaaaagataatttaaaaacacagag

SEQ ID NO: 19103 - RNA, 22 nt, Homo sapiens
  source 1..22: mol_type = unassigned RNA
gtattcgtggcagagcccccaa

SEQ ID NO: 19104 - DNA, 22 bp, Homo sapiens
  source 1..22: mol_type = unassigned DNA
gtattcgtggcagagcccccaa

SEQ ID NO: 19105 - DNA, 22 bp, Homo sapiens
  source 1..22: mol_type = unassigned DNA
ttgggggctctgccacgaatac

SEQ ID NO: 19106 - RNA, 28 nt, Homo sapiens
  source 1..28: mol_type = unassigned RNA
agaagcaggacgctggacccgggcgcgc

SEQ ID NO: 19107 - DNA, 28 bp, Homo sapiens
  source 1..28: mol_type = unassigned DNA
agaagcaggacgctggacccgggcgcgc

SEQ ID NO: 19108 - DNA, 28 bp, Homo sapiens
  source 1..28: mol_type = unassigned DNA
gcgcgcccgggtccagcgtcctgcttct

SEQ ID NO: 19109 - RNA, 23 nt, Homo sapiens
  source 1..23: mol_type = unassigned RNA
ttttctagtaggttatataattt

SEQ ID NO: 19110 - DNA, 23 bp, Homo sapiens
  source 1..23: mol_type = unassigned DNA
ttttctagtaggttatataattt

SEQ ID NO: 19111 - DNA, 23 bp, Homo sapiens
  source 1..23: mol_type = unassigned DNA
aaattatataacctactagaaaa

SEQ ID NO: 19112 - RNA, 25 nt, Homo sapiens
  source 1..25: mol_type = unassigned RNA
gcaggttcgcgggtcgctggcgggg

SEQ ID NO: 19113 - DNA, 25 bp, Homo sapiens
  source 1..25: mol_type = unassigned DNA
gcaggttcgcgggtcgctggcgggg

SEQ ID NO: 19114 - DNA, 25 bp, Homo sapiens
  source 1..25: mol_type = unassigned DNA
ccccgccagcgacccgcgaacctgc

SEQ ID NO: 19115 - RNA, 29 nt, Homo sapiens
  source 1..29: mol_type = unassigned RNA
gtgcacacagcgcgccggcctgggcgggg

SEQ ID NO: 19116 - DNA, 29 bp, Homo sapiens
  source 1..29: mol_type = unassigned DNA
gtgcacacagcgcgccggcctgggcgggg

SEQ ID NO: 19117 - DNA, 29 bp, Homo sapiens
  source 1..29: mol_type = unassigned DNA
ccccgcccaggccggcgcgctgtgtgcac

SEQ ID NO: 19118 - RNA, 24 nt, Homo sapiens
  source 1..24: mol_type = unassigned RNA
tgaggtctttgtttttctggtttt

SEQ ID NO: 19119 - DNA, 24 bp, Homo sapiens
  source 1..24: mol_type = unassigned DNA
tgaggtctttgtttttctggtttt

SEQ ID NO: 19120 - DNA, 24 bp, Homo sapiens
  source 1..24: mol_type = unassigned DNA
aaaaccagaaaaacaaagacctca

SEQ ID NO: 19121 - RNA, 42 nt, Homo sapiens
  source 1..42: mol_type = unassigned RNA
agtccaggactcagctggagatagtgccctgcgttgtggagg

SEQ ID NO: 19122 - DNA, 42 bp, Homo sapiens
  source 1..42: mol_type = unassigned DNA
agtccaggactcagctggagatagtgccctgcgttgtggagg

SEQ ID NO: 19123 - DNA, 42 bp, Homo sapiens
  source 1..42: mol_type = unassigned DNA
cctccacaacgcagggcactatctccagctgagtcctggact

SEQ ID NO: 19124 - RNA, 126 nt, Homo sapiens
  source 1..126: mol_type = unassigned RNA
caccttcaccctctgcctcccacagcctccgtccgctaagtatggcgggcggcacacggtgaccatgatcccaggggatggcatcgggccagagctcatgctgcatgtcaagtccgtcttcaggta

SEQ ID NO: 19125 - DNA, 126 bp, Homo sapiens
  source 1..126: mol_type = unassigned DNA
caccttcaccctctgcctcccacagcctccgtccgctaagtatggcgggcggcacacggtgaccatgatcccaggggatggcatcgggccagagctcatgctgcatgtcaagtccgtcttcaggta

SEQ ID NO: 19126 - DNA, 126 bp, Homo sapiens
  source 1..126: mol_type = unassigned DNA
tacctgaagacggacttgacatgcagcatgagctctggcccgatgccatcccctgggatcatggtcaccgtgtgccgcccgccatacttagcggacggaggctgtgggaggcagagggtgaaggtg

SEQ ID NO: 19127 - RNA, 23 nt, Homo sapiens
  source 1..23: mol_type = unassigned RNA
gctaaacgtagtcccgccccact

SEQ ID NO: 19128 - DNA, 23 bp, Homo sapiens
  source 1..23: mol_type = unassigned DNA
gctaaacgtagtcccgccccact

SEQ ID NO: 19129 - DNA, 23 bp, Homo sapiens
  source 1..23: mol_type = unassigned DNA
agtggggcgggactacgtttagc

SEQ ID NO: 19130 - RNA, 34 nt, Homo sapiens
  source 1..34: mol_type = unassigned RNA
agctggactaccagcttcaggaccaggacagcgt

SEQ ID NO: 19131 - DNA, 34 bp, Homo sapiens
  source 1..34: mol_type = unassigned DNA
agctggactaccagcttcaggaccaggacagcgt

SEQ ID NO: 19132 - DNA, 34 bp, Homo sapiens
  source 1..34: mol_type = unassigned DNA
acgctgtcctggtcctgaagctggtagtccagct

SEQ ID NO: 19133 - RNA, 33 nt, Homo sapiens
  source 1..33: mol_type = unassigned RNA
tggtggattatttagtagattgtgctattaaaa

SEQ ID NO: 19134 - DNA, 33 bp, Homo sapiens
  source 1..33: mol_type = unassigned DNA
tggtggattatttagtagattgtgctattaaaa

SEQ ID NO: 19135 - DNA, 33 bp, Homo sapiens
  source 1..33: mol_type = unassigned DNA
ttttaatagcacaatctactaaataatccacca

SEQ ID NO: 19136 - RNA, 105 nt, Homo sapiens
  source 1..105: mol_type = unassigned RNA
gttgaagcccagagaggtgaagtggcttgctcaggacaccgcagaggccagggccgtgggaggaggactgcagaagtgcttaaagtttattttgaattaatcatc

SEQ ID NO: 19137 - DNA, 105 bp, Homo sapiens
  source 1..105: mol_type = unassigned DNA
gttgaagcccagagaggtgaagtggcttgctcaggacaccgcagaggccagggccgtgggaggaggactgcagaagtgcttaaagtttattttgaattaatcatc

SEQ ID NO: 19138 - DNA, 105 bp, Homo sapiens
  source 1..105: mol_type = unassigned DNA
gatgattaattcaaaataaactttaagcacttctgcagtcctcctcccacggccctggcctctgcggtgtcctgagcaagccacttcacctctctgggcttcaac

SEQ ID NO: 19139 - RNA, 52 nt, Homo sapiens
  source 1..52: mol_type = unassigned RNA
gggccccctacctaatggaaaaccagccactcttcttcccagccccaatgga

SEQ ID NO: 19140 - DNA, 52 bp, Homo sapiens
  source 1..52: mol_type = unassigned DNA
gggccccctacctaatggaaaaccagccactcttcttcccagccccaatgga

SEQ ID NO: 19141 - DNA, 52 bp, Homo sapiens
  source 1..52: mol_type = unassigned DNA
tccattggggctgggaagaagagtggctggttttccattaggtagggggccc

SEQ ID NO: 19142 - RNA, 58 nt, Homo sapiens
  source 1..58: mol_type = unassigned RNA
aagctgtaagctgaaggactattaaaacaatacacaactctgttcagtttttagtaaa

SEQ ID NO: 19143 - DNA, 58 bp, Homo sapiens
  source 1..58: mol_type = unassigned DNA
aagctgtaagctgaaggactattaaaacaatacacaactctgttcagtttttagtaaa

SEQ ID NO: 19144 - DNA, 58 bp, Homo sapiens
  source 1..58: mol_type = unassigned DNA
tttactaaaaactgaacagagttgtgtattgttttaatagtccttcagcttacagctt

SEQ ID NO: 19145 - RNA, 32 nt, Homo sapiens
  source 1..32: mol_type = unassigned RNA
gtctcggcttcagggagtcagtgatcagtcct

SEQ ID NO: 19146 - DNA, 32 bp, Homo sapiens
  source 1..32: mol_type = unassigned DNA
gtctcggcttcagggagtcagtgatcagtcct

SEQ ID NO: 19147 - DNA, 32 bp, Homo sapiens
  source 1..32: mol_type = unassigned DNA
aggactgatcactgactccctgaagccgagac

SEQ ID NO: 19148 - RNA, 162 nt, Homo sapiens
  source 1..162: mol_type = unassigned RNA
taaaagcagctccgagtttgttgaatgtctcttttcaggcccccagaacccgggcagtgaggaatgtgaggaggcatgcttgttcctccatcatcaagatgtgtcgtgactacccccagcttgtgctggtaagctgctggaccctggctgaagtagccaagt

SEQ ID NO: 19149 - DNA, 162 bp, Homo sapiens
  source 1..162: mol_type = unassigned DNA
taaaagcagctccgagtttgttgaatgtctcttttcaggcccccagaacccgggcagtgaggaatgtgaggaggcatgcttgttcctccatcatcaagatgtgtcgtgactacccccagcttgtgctggtaagctgctggaccctggctgaagtagccaagt

SEQ ID NO: 19150 - DNA, 162 bp, Homo sapiens
  source 1..162: mol_type = unassigned DNA
acttggctacttcagccagggtccagcagcttaccagcacaagctgggggtagtcacgacacatcttgatgatggaggaacaagcatgcctcctcacattcctcactgcccgggttctgggggcctgaaaagagacattcaacaaactcggagctgctttta

SEQ ID NO: 19151 - RNA, 32 nt, Homo sapiens
  source 1..32: mol_type = unassigned RNA
gattgagaacatggcccgtgactgtggcgagt

SEQ ID NO: 19152 - DNA, 32 bp, Homo sapiens
  source 1..32: mol_type = unassigned DNA
gattgagaacatggcccgtgactgtggcgagt

SEQ ID NO: 19153 - DNA, 32 bp, Homo sapiens
  source 1..32: mol_type = unassigned DNA
actcgccacagtcacgggccatgttctcaatc

SEQ ID NO: 19154 - RNA, 30 nt, Homo sapiens
  source 1..30: mol_type = unassigned RNA
cgaactcacagggaaccggcttttagaaga

SEQ ID NO: 19155 - DNA, 30 bp, Homo sapiens
  source 1..30: mol_type = unassigned DNA
cgaactcacagggaaccggcttttagaaga

SEQ ID NO: 19156 - DNA, 30 bp, Homo sapiens
  source 1..30: mol_type = unassigned DNA
tcttctaaaagccggttccctgtgagttcg

SEQ ID NO: 19157 - RNA, 48 nt, Homo sapiens
  source 1..48: mol_type = unassigned RNA
ggagagcaggagtggggtttggccaacagtactggtaaaattcactca

SEQ ID NO: 19158 - DNA, 48 bp, Homo sapiens
  source 1..48: mol_type = unassigned DNA
ggagagcaggagtggggtttggccaacagtactggtaaaattcactca

SEQ ID NO: 19159 - DNA, 48 bp, Homo sapiens
  source 1..48: mol_type = unassigned DNA
tgagtgaattttaccagtactgttggccaaaccccactcctgctctcc

SEQ ID NO: 19160 - RNA, 27 nt, Homo sapiens
  source 1..27: mol_type = unassigned RNA
ccggagtttgtagtttgtactgttaat

SEQ ID NO: 19161 - DNA, 27 bp, Homo sapiens
  source 1..27: mol_type = unassigned DNA
ccggagtttgtagtttgtactgttaat

SEQ ID NO: 19162 - DNA, 27 bp, Homo sapiens
  source 1..27: mol_type = unassigned DNA
attaacagtacaaactacaaactccgg

SEQ ID NO: 19163 - RNA, 32 nt, Homo sapiens
  source 1..32: mol_type = unassigned RNA
agtggcttggagaggagggaggacctgggtct

SEQ ID NO: 19164 - DNA, 32 bp, Homo sapiens
  source 1..32: mol_type = unassigned DNA
agtggcttggagaggagggaggacctgggtct

SEQ ID NO: 19165 - DNA, 32 bp, Homo sapiens
  source 1..32: mol_type = unassigned DNA
agacccaggtcctccctcctctccaagccact

SEQ ID NO: 19166 - RNA, 31 nt, Homo sapiens
  source 1..31: mol_type = unassigned RNA
ccacatgcctgtcccactgatgttgacttga

SEQ ID NO: 19167 - DNA, 31 bp, Homo sapiens
  source 1..31: mol_type = unassigned DNA
ccacatgcctgtcccactgatgttgacttga

SEQ ID NO: 19168 - DNA, 31 bp, Homo sapiens
  source 1..31: mol_type = unassigned DNA
tcaagtcaacatcagtgggacaggcatgtgg

SEQ ID NO: 19169 - RNA, 27 nt, Homo sapiens
  source 1..27: mol_type = unassigned RNA
ccaaatgtgaccagtgtgctccctacc

SEQ ID NO: 19170 - DNA, 27 bp, Homo sapiens
  source 1..27: mol_type = unassigned DNA
ccaaatgtgaccagtgtgctccctacc

SEQ ID NO: 19171 - DNA, 27 bp, Homo sapiens
  source 1..27: mol_type = unassigned DNA
ggtagggagcacactggtcacatttgg

SEQ ID NO: 19172 - RNA, 29 nt, Homo sapiens
  source 1..29: mol_type = unassigned RNA
atagggtagtgaaactctggagagagaat

SEQ ID NO: 19173 - DNA, 29 bp, Homo sapiens
  source 1..29: mol_type = unassigned DNA
atagggtagtgaaactctggagagagaat

SEQ ID NO: 19174 - DNA, 29 bp, Homo sapiens
  source 1..29: mol_type = unassigned DNA
attctctctccagagtttcactaccctat

SEQ ID NO: 19175 - RNA, 60 nt, Homo sapiens
  source 1..60: mol_type = unassigned RNA
attgaggtggccgcggctcctggccctccagaacttgggccacatctctgaggacatggt

SEQ ID NO: 19176 - DNA, 60 bp, Homo sapiens
  source 1..60: mol_type = unassigned DNA
attgaggtggccgcggctcctggccctccagaacttgggccacatctctgaggacatggt

SEQ ID NO: 19177 - DNA, 60 bp, Homo sapiens
  source 1..60: mol_type = unassigned DNA
accatgtcctcagagatgtggcccaagttctggagggccaggagccgcggccacctcaat

SEQ ID NO: 19178 - RNA, 57 nt, Homo sapiens
  source 1..57: mol_type = unassigned RNA
ttctgtcaaatactttttctctgatatcctatacttttgttactattcattgatttt

SEQ ID NO: 19179 - DNA, 57 bp, Homo sapiens
  source 1..57: mol_type = unassigned DNA
ttctgtcaaatactttttctctgatatcctatacttttgttactattcattgatttt

SEQ ID NO: 19180 - DNA, 57 bp, Homo sapiens
  source 1..57: mol_type = unassigned DNA
aaaatcaatgaatagtaacaaaagtataggatatcagagaaaaagtatttgacagaa

SEQ ID NO: 19181 - RNA, 23 nt, Homo sapiens
  source 1..23: mol_type = unassigned RNA
ttcttgtagccttttggcagagt

SEQ ID NO: 19182 - DNA, 23 bp, Homo sapiens
  source 1..23: mol_type = unassigned DNA
ttcttgtagccttttggcagagt

SEQ ID NO: 19183 - DNA, 23 bp, Homo sapiens
  source 1..23: mol_type = unassigned DNA
actctgccaaaaggctacaagaa

SEQ ID NO: 19184 - RNA, 99 nt, Homo sapiens
  source 1..99: mol_type = unassigned RNA
ttctattctgaatcatcttctttttctttttcccaggatacaagacatggtgggactctcagcgacctgggaaagcaaggtgaggtactaggagatcag

SEQ ID NO: 19185 - DNA, 99 bp, Homo sapiens
  source 1..99: mol_type = unassigned DNA
ttctattctgaatcatcttctttttctttttcccaggatacaagacatggtgggactctcagcgacctgggaaagcaaggtgaggtactaggagatcag

SEQ ID NO: 19186 - DNA, 99 bp, Homo sapiens
  source 1..99: mol_type = unassigned DNA
ctgatctcctagtacctcaccttgctttcccaggtcgctgagagtcccaccatgtcttgtatcctgggaaaaagaaaaagaagatgattcagaatagaa

SEQ ID NO: 19187 - RNA, 41 nt, Homo sapiens
  source 1..41: mol_type = unassigned RNA
catgagggtgcttgtaggctattggaggagtttggatattg

SEQ ID NO: 19188 - DNA, 41 bp, Homo sapiens
  source 1..41: mol_type = unassigned DNA
catgagggtgcttgtaggctattggaggagtttggatattg

SEQ ID NO: 19189 - DNA, 41 bp, Homo sapiens
  source 1..41: mol_type = unassigned DNA
caatatccaaactcctccaatagcctacaagcaccctcatg

SEQ ID NO: 19190 - RNA, 43 nt, Homo sapiens
  source 1..43: mol_type = unassigned RNA
ataaatcaaatgtttcatggcactagagagctgtgttagctaa

SEQ ID NO: 19191 - DNA, 43 bp, Homo sapiens
  source 1..43: mol_type = unassigned DNA
ataaatcaaatgtttcatggcactagagagctgtgttagctaa

SEQ ID NO: 19192 - DNA, 43 bp, Homo sapiens
  source 1..43: mol_type = unassigned DNA
ttagctaacacagctctctagtgccatgaaacatttgatttat

SEQ ID NO: 19193 - RNA, 31 nt, Homo sapiens
  source 1..31: mol_type = unassigned RNA
catttctcttgtcttgctctgaaactgagat

SEQ ID NO: 19194 - DNA, 31 bp, Homo sapiens
  source 1..31: mol_type = unassigned DNA
catttctcttgtcttgctctgaaactgagat

SEQ ID NO: 19195 - DNA, 31 bp, Homo sapiens
  source 1..31: mol_type = unassigned DNA
atctcagtttcagagcaagacaagagaaatg

SEQ ID NO: 19196 - RNA, 79 nt, Homo sapiens
  source 1..79: mol_type = unassigned RNA
ggtatatttggcgcaatggaggtaggattgtctgtgtgcctctaaaattaacctctcaagtagttaatctgatgatgac

SEQ ID NO: 19197 - DNA, 79 bp, Homo sapiens
  source 1..79: mol_type = unassigned DNA
ggtatatttggcgcaatggaggtaggattgtctgtgtgcctctaaaattaacctctcaagtagttaatctgatgatgac

SEQ ID NO: 19198 - DNA, 79 bp, Homo sapiens
  source 1..79: mol_type = unassigned DNA
gtcatcatcagattaactacttgagaggttaattttagaggcacacagacaatcctacctccattgcgccaaatatacc

SEQ ID NO: 19199 - RNA, 40 nt, Homo sapiens
  source 1..40: mol_type = unassigned RNA
tagtggagtaatgaccagcaaagaaattatattgggactt

SEQ ID NO: 19200 - DNA, 40 bp, Homo sapiens
  source 1..40: mol_type = unassigned DNA
tagtggagtaatgaccagcaaagaaattatattgggactt

SEQ ID NO: 19201 - DNA, 40 bp, Homo sapiens
  source 1..40: mol_type = unassigned DNA
aagtcccaatataatttctttgctggtcattactccacta

SEQ ID NO: 19202 - RNA, 32 nt, Homo sapiens
  source 1..32: mol_type = unassigned RNA
ggtgaggatctctggcgctggcagaagcagaa

SEQ ID NO: 19203 - DNA, 32 bp, Homo sapiens
  source 1..32: mol_type = unassigned DNA
ggtgaggatctctggcgctggcagaagcagaa

SEQ ID NO: 19204 - DNA, 32 bp, Homo sapiens
  source 1..32: mol_type = unassigned DNA
ttctgcttctgccagcgccagagatcctcacc

SEQ ID NO: 19205 - RNA, 69 nt, Homo sapiens
  source 1..69: mol_type = unassigned RNA
agttgttgtgaccctctgcttagaacagaggattgtatgagatcaggaatgtaacaaaatagtaactac

SEQ ID NO: 19206 - DNA, 69 bp, Homo sapiens
  source 1..69: mol_type = unassigned DNA
agttgttgtgaccctctgcttagaacagaggattgtatgagatcaggaatgtaacaaaatagtaactac

SEQ ID NO: 19207 - DNA, 69 bp, Homo sapiens
  source 1..69: mol_type = unassigned DNA
gtagttactattttgttacattcctgatctcatacaatcctctgttctaagcagagggtcacaacaact

SEQ ID NO: 19208 - RNA, 29 nt, Homo sapiens
  source 1..29: mol_type = unassigned RNA
gactcccggaggcgtcaggctgcaggtgg

SEQ ID NO: 19209 - DNA, 29 bp, Homo sapiens
  source 1..29: mol_type = unassigned DNA
gactcccggaggcgtcaggctgcaggtgg

SEQ ID NO: 19210 - DNA, 29 bp, Homo sapiens
  source 1..29: mol_type = unassigned DNA
ccacctgcagcctgacgcctccgggagtc

SEQ ID NO: 19211 - RNA, 26 nt, Homo sapiens
  source 1..26: mol_type = unassigned RNA
ttgctccttgttagaattttcaccta

SEQ ID NO: 19212 - DNA, 26 bp, Homo sapiens
  source 1..26: mol_type = unassigned DNA
ttgctccttgttagaattttcaccta

SEQ ID NO: 19213 - DNA, 26 bp, Homo sapiens
  source 1..26: mol_type = unassigned DNA
taggtgaaaattctaacaaggagcaa

SEQ ID NO: 19214 - RNA, 22 nt, Homo sapiens
  source 1..22: mol_type = unassigned RNA
tagcatgtaaagtgaagctgag

SEQ ID NO: 19215 - DNA, 22 bp, Homo sapiens
  source 1..22: mol_type = unassigned DNA
tagcatgtaaagtgaagctgag

SEQ ID NO: 19216 - DNA, 22 bp, Homo sapiens
  source 1..22: mol_type = unassigned DNA
ctcagcttcactttacatgcta

SEQ ID NO: 19217 - RNA, 28 nt, Homo sapiens
  source 1..28: mol_type = unassigned RNA
gtccttgaactccgaactttttatttta

SEQ ID NO: 19218 - DNA, 28 bp, Homo sapiens
  source 1..28: mol_type = unassigned DNA
gtccttgaactccgaactttttatttta

SEQ ID NO: 19219 - DNA, 28 bp, Homo sapiens
  source 1..28: mol_type = unassigned DNA
taaaataaaaagttcggagttcaaggac

SEQ ID NO: 19220 - RNA, 23 nt, Homo sapiens
  source 1..23: mol_type = unassigned RNA
ttatgtgccagttaattctgata

SEQ ID NO: 19221 - DNA, 23 bp, Homo sapiens
  source 1..23: mol_type = unassigned DNA
ttatgtgccagttaattctgata

SEQ ID NO: 19222 - DNA, 23 bp, Homo sapiens
  source 1..23: mol_type = unassigned DNA
tatcagaattaactggcacataa

SEQ ID NO: 19223 - RNA, 80 nt, Homo sapiens
  source 1..80: mol_type = unassigned RNA
ctgggaatatagcctgctggtcagagcaggggtgagcatttggctgagagcctagcatagtgtctgaaacagtaggcatt

SEQ ID NO: 19224 - DNA, 80 bp, Homo sapiens
  source 1..80: mol_type = unassigned DNA
ctgggaatatagcctgctggtcagagcaggggtgagcatttggctgagagcctagcatagtgtctgaaacagtaggcatt

SEQ ID NO: 19225 - DNA, 80 bp, Homo sapiens
  source 1..80: mol_type = unassigned DNA
aatgcctactgtttcagacactatgctaggctctcagccaaatgctcacccctgctctgaccagcaggctatattcccag

SEQ ID NO: 19226 - RNA, 30 nt, Homo sapiens
  source 1..30: mol_type = unassigned RNA
ggagcgccccaacgcggactcccagcctac

SEQ ID NO: 19227 - DNA, 30 bp, Homo sapiens
  source 1..30: mol_type = unassigned DNA
ggagcgccccaacgcggactcccagcctac

SEQ ID NO: 19228 - DNA, 30 bp, Homo sapiens
  source 1..30: mol_type = unassigned DNA
gtaggctgggagtccgcgttggggcgctcc

SEQ ID NO: 19229 - RNA, 31 nt, Homo sapiens
  source 1..31: mol_type = unassigned RNA
actctggaatgaagagactgggccggtgatt

SEQ ID NO: 19230 - DNA, 31 bp, Homo sapiens
  source 1..31: mol_type = unassigned DNA
actctggaatgaagagactgggccggtgatt

SEQ ID NO: 19231 - DNA, 31 bp, Homo sapiens
  source 1..31: mol_type = unassigned DNA
aatcaccggcccagtctcttcattccagagt

SEQ ID NO: 19232 - RNA, 27 nt, Homo sapiens
  source 1..27: mol_type = unassigned RNA
gcaggcgacagatgtacccatagatgc

SEQ ID NO: 19233 - DNA, 27 bp, Homo sapiens
  source 1..27: mol_type = unassigned DNA
gcaggcgacagatgtacccatagatgc

SEQ ID NO: 19234 - DNA, 27 bp, Homo sapiens
  source 1..27: mol_type = unassigned DNA
gcatctatgggtacatctgtcgcctgc

SEQ ID NO: 19235 - RNA, 43 nt, Homo sapiens
  source 1..43: mol_type = unassigned RNA
tacccaaaggagaaatttgataactcatatcttccaaccacca

SEQ ID NO: 19236 - DNA, 43 bp, Homo sapiens
  source 1..43: mol_type = unassigned DNA
tacccaaaggagaaatttgataactcatatcttccaaccacca

SEQ ID NO: 19237 - DNA, 43 bp, Homo sapiens
  source 1..43: mol_type = unassigned DNA
tggtggttggaagatatgagttatcaaatttctcctttgggta

SEQ ID NO: 19238 - RNA, 25 nt, Homo sapiens
  source 1..25: mol_type = unassigned RNA
tcattggttgtttagcagtatgttt

SEQ ID NO: 19239 - DNA, 25 bp, Homo sapiens
  source 1..25: mol_type = unassigned DNA
tcattggttgtttagcagtatgttt

SEQ ID NO: 19240 - DNA, 25 bp, Homo sapiens
  source 1..25: mol_type = unassigned DNA
aaacatactgctaaacaaccaatga

SEQ ID NO: 19241 - RNA, 64 nt, Homo sapiens
  source 1..64: mol_type = unassigned RNA
ttaaaagggctgaaatagacaatctctgagatcccactttgttacacatcctgtagatctatca

SEQ ID NO: 19242 - DNA, 64 bp, Homo sapiens
  source 1..64: mol_type = unassigned DNA
ttaaaagggctgaaatagacaatctctgagatcccactttgttacacatcctgtagatctatca

SEQ ID NO: 19243 - DNA, 64 bp, Homo sapiens
  source 1..64: mol_type = unassigned DNA
tgatagatctacaggatgtgtaacaaagtgggatctcagagattgtctatttcagcccttttaa

SEQ ID NO: 19244 - RNA, 72 nt, Homo sapiens
  source 1..72: mol_type = unassigned RNA
atgcagaatctcaaccttacccaagacatcttattttgcatgtcttgggtagggctgagattctgcatttcc

SEQ ID NO: 19245 - DNA, 72 bp, Homo sapiens
  source 1..72: mol_type = unassigned DNA
atgcagaatctcaaccttacccaagacatcttattttgcatgtcttgggtagggctgagattctgcatttcc

SEQ ID NO: 19246 - DNA, 72 bp, Homo sapiens
  source 1..72: mol_type = unassigned DNA
ggaaatgcagaatctcagccctacccaagacatgcaaaataagatgtcttgggtaaggttgagattctgcat
